United States Patent Application Publication US 2020/0377945 A1 - sequence listing, part 31

SEQ ID NO: 5354 - DNA, 228598 bp, Unknown
  gut microbiota DNA sequence
gttaagaatccatgtcactttgagtgcccacacagattgtctgataaattgttaaagagcagttgcgacgcgctttagcgctctgtcgcgaggtcccgtataatacgttttcctcattcagagtcaagcgcttattttgctttcctctgtcggctttcaacgtcgatttccgtcgttgaatcctcctggcccggcggcttgtttgccgttgttccgtgtcagtggaggcgcattatagggggtaattctgaagtgacaaggataaattcaaaaaaagaattcaaccgctcacttttcaaccaaatcaggtattgagctttaattcttgcctggtttttaaacaaaaacgagcccgctgggcccgtttttgtcgttttgtgatttactgcactgccacaatgcggtcgtcttttactaccagctcgatggttttacccggaaccagctcaccggaaaggatctgctgggctaacgggttctcaatctgctgctgaatagcacgtttcaatggccgcgcgccgtataccggatcgtaaccattggcgctcagcagcttcagcgcctcatcggacatctgcacttcatatccgcgctcttccagacgtttatacagacgctgcagctggatctgggcaatagaggcaatatgtttctcgcccagcggatggaagaccaccacttcgtcgatacggttgatgaactccggacggaagttctggctgactacccccagcaccaggtccttcatatgtccgtagtccagctcgccgaaccgttcctgaatcagatcggaaccgaggttcgaggtcatgatgactaccgtattacggaagtcgaccgttctcccctgcccgtcggtgagacgcccgtcgtcgagtacctgcagcagaatgttgaacacatccgggtgcgctttttccacttcatccagcaggatgacggaataaggacgacggcgcaccgcctcggtcaggtaacctccctcttcatagccgacgtatcccggaggcgcaccgaccagacgcgagacggagtgtttctccataaactcggacatatcgatacgcaccatcgcgtcgtcgctgtcgaacataaagttagccagcgttttacacagctcggttttaccgaccccggttggaccgaggaacaggaacgaaccaatcggccggttcggatcggacagcccggcgcggctgcggcgaatggcgttggataccgcttcaaccgcctcatcctggccaatcacccgatgatgcagctcctgctccatacgcagcagtttgtcgcgctcgctttccatcatgcgggagaccgggataccggtccagcgggccagcacttcggcgatttcagcatccgtcactttattacgcagcagacgcatggttttcccttcggactgagtggccgccgccagctgtttctccagttccggaattttgccgtactgcagctcggacatccgcgccagatcgccgacgcggcgcgcctgttcgatggcgattttcgcctgctccagctcagctttgatggtctgggtgccggagagcgacgctttttccgctttccactcttcttccagcaccgagtactgccgttctttatccgccagctcctcgttgagcatatcaagacgcttcaggctcgcctcatcagactctttcttcagcgcctgctgttccagtttcagctggataatacgccgatcgaggcggtccagctcttccggtttggagtcaatctgcatacggatgctggatgccgcctcatcgatgaggtcgatggctttatccggcagctgacggtcggcaatatagcgatgcgataaggtcgccgccgccacgatagccgggtcagtgatctgcacgtggtggtgcagctcataacgttctttcagaccgcgcagaatcgcgatggtatcttctaccgaaggctcggcgacgaacactttctggaagcgacgttccagcgcggcgtctttttcgatgtactgacggtattcatcaagcgtcgtcgccccgacgcagtgcagttcaccacgcgccagcgccggcttcagcatattacccgcatccatcgcgccgtcggctttaccagcgcccaccatggtatgcagttcgtcgataaacagaatgacgttgccttcctgttttgacaggtcggtcagcacgcctttcagacgctcttcaaactcaccgcggtatttcgccccggccaccagcgcccccatatccagcgccaatacccgacggcctttcagcccttctggtacttcgccgttgacgatacgctgcgccaggccttcgacgattgccgttttacccaccccgggttcaccgatcagcaccgggttgtttttggtacgacgctgcagtacctgaatggtacggcgaatctcttcatcacggccgatcaccggatccagcttgccctgctcggcacgctcggtgagatcgacggtaaatttcttcaatgcctgacgttggtcttcggcaccctgatcgttcacgctttcccctccgcgcatttgttcaatcgcctgagtcacgttggcggttgttgctccggcggattttaaaaggtcggtcagcgtaccgcgtgattcaagcgccgccagaacgaacagttccgacgaaataaagttgtcctttttcttttgcgccagcttgtcgcaaaggttgaggatccgcactaaatcctgagaaggttgcacatcgccgccggtgccttccacctgcggtaaacggctcaaggcctgttcgatgtcagtgcgcagtttcccggcattcacgcccgccgaggttaataaaggacgtaccgatcccccttcctgattcagcaaggcgctcattaaatgaagaggttcgatgaattggttgtcgtgcccgagtgcgagcgactgggcatcggcaagagcaagctggaatttattggtaagacgatccagacgcataactcctcccataaacaggtcaaatttgctactggagattaaatgaggtcatccctcaattattcaaggttaaagacccgaactatgtgaaaaataagtttgccttctggatcgtcttgattctctaggttatatcagccaaatgaaacttgccatacgaccggtggtcttgtcgcgccggtaagagaaaaaatcatccttttcgcttagcgtgcagcgatcgccgccgaaaatcagctcaacgccgacgtttgccagacgctgccgcgccagttggtagatatcagcaaaatatttttcgcctgccggacgaaaagcccggtgcgcattcttgtccttcgccataaaggcatcccggacttccggtcccacctcaaacgcctgcggaccgatggcgggccccagccacgccataatattttcggctttatcggcgaaacgagcaaccgtcgcttccagaaccccttcgcataagccgcgccatcccgcgtgcgccgcggcgacttcggtgccgtcgcggttacagaacagcaccggcaggcagtcagcggtcatcaccgcgcagacggtccctggcgtacgactataagaagcatccgcgcgtttcgacggatagggtccgccgtccagcgtcagaacctcggtgccatggacctgctccagccaaaccgggtaagacggcaagccgccggcggcaaacatccgccgccggttttcttcgacatcctgcagattgtcgccgcaatgggcgcccaggttgagcgagtcatagggcggcagactcacgccgccgatgcgggtagaactacaggccgccacgctgccgggcattggccactgcggtacaatcagtttcgtcataaccagtcaatatcgtccttatgggcttcaaaatcggcgcgcatcgcctcgatgagctcgaccatatcctgcgggatgggcgcgtgccactccatttcaatgccggagatcgggtgatacaggcgcagcatggtggcatgcagcgcctggcggtcgaatttacgcagcgcggtgatgaactcctccgacgcgcccttcggcggacgcggccggccgccatagacctggtcacccaccagcggatgggtgatatgcgacatatgcacgcggatctgatgtgtacgaccggtttccagacgcagacgcaggcgggtatggatgcggaaatgttccataatgcggtagtgggtcaccgccggtttgcccatcggatgcaccgccatatgggtacgcttggtcgggtgacggctgatcggctcttccactgtgccaccggcggtcatatgaccgatcgccaccgcttcgtattcacgggtgatctcgcgcaactgcagcgactccaccagccgggtttgcgccggaatggttttcgccaccaccatcagaccggtggtgtctttatccagacgatgaacaatacccgcgcgcggcacatcggcaataggcggatagtagtgcagcagcgcattcagcacagtaccgtcagggttgcccgcgccaggatgtacaaccagatcgcgcggtttattgatcacgatgatgtcatcatcttcgtaaacgatattgagcggaatatcctgcggctggaagcgcgcctcttcttcgatttccacatcgatagcgatgcgttctccccccagcactttttctttcggtttatcgccaatggtgccattgactaatacgcgttggtcgaggatccattcttttatccgcgatcgcgaataatcagggaacaattcggccaaagcctgatctaagcgttgaccgagttgattttcggtcaccgttgcggtgagttgtactcgttgtgccatatacagcttcttcgtttaacgttgggttttacggctttgccgtttaatatagtgtgctattgtagctggtcttaatcgggagcaggaacagagattctcccgcataaacattttgaggaagtcaaaacgtcatgacgcgcatgaaatacctggtggcagccgccacactgagcctggctttggtgggttgctccggctctaaggaagaggtgcctgataatccgccgaatgaaatctacgcgaccgcccagcaaaaactgcaggacggtaactggaaacaggcgataacgcaactggaagcgttggataatcgttatccattcggcccttattcccaacaggtacagctggatctgatttatgcgtattataaaaacgccgatcttcctctggctcaggcggctatcgatcgcttcatgcgtttgaaccccacccatccgaacatcgactatgtcatctatatgcgcggcctgaccaacatggccctggatgacagcgccctgcagggcttcttcggcgttgatcgctccgaccgcgatccgcagcacgcgcgcgatgccttcaatgacttctccaaactggtgcgtggttatccgaacagccagtacgccactgacgcctataaacgcatggtgttcctgaaagatcgtctggccaaatatgagctgtcggtcgtggattactacaccgatcgtggcgcatgggttgctgtggttaaccgtgtggaagggatgatgcgtaattatccggatacccaggccacccgcgatgccctgccgaagatggaaaacgcctatcgtcagatgcaaatgaacgctcaggcggacaaagtcgcgaagattatcgccgcgaacagcaagaacacctgagcctgactcatcgatcgcaaacggcagccactggctgccgtttttttatacgtttcccggcaagctgaagcggtttagcgccgggttaactcatcaaatatggcctgctttatcgggttcgacaagtaaaatctcacttcttcctgccctgtctcacaaaatgaatttgttgacaaaaagtgacaataaaatgtgatttagatcacacattttgacattgggaaaggtatgctggattcaccaagacgggaaagacaagaggtaaaatttatgacaatgaacattaccagtaaacaaatggaaattactccggcaatccgccagcatgtcgcagaccgtctcgccaaactggataagtggcaaactcatttaatcaacccgcacatcattctgtctaaggagccgcagggttttatcgctgatgcaaccatcaacacgccaaacggccatctggttgccagtgcgcgtcatgaagatatgtacgccgccattaacgaattgatcaacaagctggaacggcagctcaataaagtgcaacacaaaggggaagcccgccgcgccgcgacgtcggtgaaagaggcaggctttgtggaagaagaagagtaatccttaacttaagttgtgtcatgccacgcgccttcgggcgcgttttttattgacagagtgaaaacagtacaggtactgtaatccccactacctaaaggaatttaccatgaaacttgtcccgttcttcttcgcattcttttttaccttcccctgaccgggaggcaattcgtcgtataagaaagaatgcgaagacgaacaataaggcctcccacccgggaggccttttttatttgataacaacaaaggcaacatctatgaccgaggaaaacccattactggcgctgcgcgataagataagcgccctggacgagaagctgcttgctctgctggcggagcgccgcggactggctgttgaggttggaaaagccaaactggcctcccatcgtccggtgcgtgatattgaccgcgaacgcgatctgctggagcgcctgatgactatcggcaagcgccataatctggatgcgcactatatcacccgcctgttccagctgattatcgaagactctgttcttacccagcaaaccctgctgcagcagcatctgaataaaattaacccgcattcggcccgcgtggcgttcctcggtcccaagggctcttactcgcatctggcggcgcgtcagtacgccgctcgccactttgagcagtttattgagagcggctgcgcgaagttcgccgatatttttaatcaggtagaaaccggccaggccgattacgcggtggtgccgattgaaaacaccagctccggcgggatcaacgacgtctacgatctgctgcagcacaccagcctgtcgatcgttggcgagctgacgatccctatcgatcattgcgtactggtgagcacctcgacggatgccgataaaattcagaccgtttacagccatccgcagccgttccagcagtgcagccaatacctgagccgctacccgcactggaagattgagtataccgagagcacctcggcggcaatggaaaaagtggcgcaggcgaactccccggccgtcgcggccctgggtagcgaagcgggcggcgctctgtatggtctgcaggtgctggagcactgccaggccaaccagacgcagaacatcacgcgcttcctcgtcctggcgcgcaaagcggtgaacgtctccgaccaggtgccggccaagaccacgctgttaatggcgaccggtcagcaggcgggcgccctggtggaagccctgctggtgctgcgcaaccacaatctgatcatgaccaaactggaatcccgcccgatccacggcaatccctgggaagagatgttttatctcgatattcaggccaacctggatttgctgcccatgcgcaaggcgctgaaggagctggcggatatcacccgctccatgaaggtcctcggctgctaccctagcgaaaacgtggtcccggtggatccggtttaacattcgcggaacggtaatttcttcatccctgccaccgctaccggcagggtgaagatggcgcctgacagcggatactgcgccagctcatcgtcctccatgttttcccgggtggtggtgatatagagcgttttcatatccgccccgccgaagcagaccatcgtcgggcaacgaaccggcatcgggtaggattccagctcctcgcccagcggcgagaaacgggcgatccgccagccgtcaaacattgcgctccagtaacatccctccacgtcgatcgccgccccgtcagggatcccttcgccaggctgaaaacggcgaaagacttcgcgtcggccaggctcaccctgctcatccagcggcgtacggtagatcacggcgttcggcgtatcagaggtatacatccagcgccggtcggcgctaaaggccaggccattggcgccatggatgtcacactggatcactttcggctgcaggtcgttatccactcgcatcagcagcgcgccgttgtaatccccaggcccccagaaggtaccggcataaaagcgcccatcgcgatcggtcccgccgtcgttaaaccgcgccagctccgggttgctcgggttatcgcagactttccgccgcagcaggccgtgggcgtcggtcagccagatgccgctgcgcaatgcaacgataaacccgcccttctcgcgcagggcaaaacagccgacctcctctggaaactgcagcacctggtgttctccgctgcggatatcgtagcggtgaatttcacattccatgatatcagcccagtagagggcctgctctgcctcgctccaggtcgggcattccggcaggtatccggtgtagtcaaacagcggttgtggttcagccatcgttgtcatccctataaaaaaagccagcggtcgctggctttattgtatacatctttttcgctttactgccgattatcgttcgcctgacgcagcagcgtgcggctctcgctctggaaacgctgagcgtaatcgccaaaccagtgttcgactttacggaagctgtcgataaacgcctgcttatcgccctgctccagcaggccgatcgcttcgccgaaacgctggtagtagcgcttaatcagcgccaggttgttttccgatgacataataatatcggcgtacagctgcggatcctgggcaaacagacggcctaccatcgccagctccagtcggtaaatgggtgacgagagcgccagcagttgctcaagacgtacattctcttccgccaggtgcaggccataggcgaaggtggcaaagtggcgcagcgcctgaataaaggccatgttctgatcgtgctcaacggcgctgatgcggtgcagccgcgcgccccaaacctggatttgttcgaggaaccactgataggcctccggctggcggccatcacaatagaccaccacctgcttcgccaggctgccgctgtccggaccgaacatcgggtgcaggccaagaaccgggccctgatgcgccgccagcatcgcctgcagcggctccgctttcaccgaggcaaggtcaaccagaatgcaatccgccggaaggggcggcagcctgccgatcgtctccacggtggtgtgaatcggtacgctgacgataaccatgccggcatcggcgacgatatccgccgcccgggcccaatcgtttttttccagaatacgcacctggtagccggacagcgttaacatcttctcaaacagacgccccatctgcccaccgccgccgacgatgaccactggccgcagattcggctgcagggttttgaagcctttgtcgttttcgctggaataggattcccgcatcacgcgacgcagaacgtcctcgatcagatccggtggtacgccgagcgcagccgcctcttcacgtcgggaggcgagcatcgccgactcgcgctccgggacgtaaatcggcaggccatactggctcttcacctcgccgacttcggccaccagctccagacgcttagccagcaggctaagcaacgctttatccacttcatcaatttgatcgcgtaacgcggtcagttcagcaaccatactttcctcttaaaccaaacgggccgccaggtggccgcggagatccttatccagttcacgcagcagcgcctcggtagtctcccagctgatgcaggcatccgtcaccgagacgccgtatttcatcgcctcacgcggctgttcagaggactgattgccttcgtggatattactttcgatcatcaggccgataatggagcggttgccatctttgatctgcgcgaccacggattcagccacggccggctggcggcggaaatctttattggagttcccatgactgcaatctaccatcagcgacggcttcagtcccgcctgcgccatctctttttcgcatttcgccacatcttccggaccgtagttcggcgccttgccgccgcggaggatcacatggccgttcggattaccctgcgtttgcagcaggcagacctgcccggcctggttgatgccgacgaaacggtgcggcatcgccgcggcgcgcatggcgttgatggccgtagccaggctaccgtcggtaccgtttttaaagccgaccggcatcgacaggccagaggccatttcgcggtgcgtttgtgattccgtggtacgcgcgccgatagcggaccagctgaacagatccccgaggtactgcgggctgttgggatccagcgcttccgtcgccagcggcagtcccatattgacgagctcgaccagcagacgacgcgcaatcttcaggccgccttcaacatcaaacgaaccatccatgtgcggatcgttaatcagccccttccagccgacggtggtacggggtttttcaaaatagacgcgcatcaccaggtagaggctatcgctgacctctgcggcaagggctttaaaccgacgagcatattcaatcgcggcttccggatcgtgaatggagcaaggaccacataccaccagcaggcgcggatcgcgaccggcgatgatatccgaaatggtctgacgggcgtgcgcgatctgcgcttcctgctcgacgctcagcgggaattccgccttcagttgctccggggtcattaatacatgttcgtcggtaatatgtacgttgttcagcgcgtctttttgcatgattgcgatcctgtgtagctcgtttgcgataagggttgcctcagagggcatgacgtaacgataccacacaaagtaaagaattcaatccatattccgtaaattttaatttacaccaacgaattaattgccactcacaatggcgcgatgcgtataacaatatttacacatagaaaaaacaagccaaacttgcgcacccacggtatcggtactacgaaaaatcctggtgagaattgtcccaaagcaaagggcgcatctaatgacgggttttattaacagtggtattcttcgccgggcatcggcagcggcttttcccgcgctatggcgactttgacggaagcgttaatgacagtattacaccgtcttttattgactgtattttttctcatcgcggtatctcctgtttttgctgccggaccttcagaacatgttcgcgctattgtttccgggatcgtgacctacacccgttggccgtcattaacaggagcgccaaagctgtgcatttttgcctcatcacgcttcacccatagcctggctcatgaagatccggatgcattaccctatcaaccggtgatagtacgtaatcgtgaagaagcgttaaaaacgacctgcgatggtttttattttggcagcgaatcgccgactgaacagtcagaactcactcgccgctatggcccgaggccgctgttactcatcgcagaacaaaatacggattgttcaattggtagcgcgttttgcctgatcatcaatgacgaccgggtccgcttctccgttaatctggacgttctgacgcacagcggggttcgggttaacccggacgttctgatgcttgcccggaagaaaccacatgaataaggacttttcacagactccgcgcccgactttcaaacgcgcgctccgtcgcattagcgtgataagcgtggtgatctccatgacgctggtctggctgctgctaagtacagcctcaatcttcacgctcaagcagtacgcgcagaaaaatcttgagctcactgccgcgaccatggggcgcagcctcgaagccgccctggtgtttggcgacagcgcggcggcagaggagaccctcgcgtcgttgggcaagcaagggcagatctcccaggcaatcgtgctaaacggccagatgcagcacttcgccgcgtggcgccatgaaccgctggccaataaagagcaagtgagcgggcttatcagtaaatggctgtttccggagcccacggtgcagcccatctggcaccagggcaaacaaatcggcgagctgagattgaccgcgcttgatgaactgattagccactttctcggtatctcgattctggtgctgaccggcagcattctgctcgcctcgttcatcgccctgctgctgacccactccctacaccgggggatcgtcgccgccctgcagagcatcactgaggtcgtgcatgatatacgtgaaaaccgccacttctcccggcgggtgccggaggagcgtatcgaggagttccatcttttcgcccaggactttaacagcctgctgggggaaatggaggactggcagcgccagctgcaggccaaaaacgcgcagctgttgcgcagttcgttacacgatccgttgaccggcctggctaaccgcgccgcctttcgtaacgcgctcgccgagctgatgcagaatgaagtcgatcatcaaacctcggcattgctgtttcttgatggcgataatttcaaactgattaacgacaactgggggcatgcggcgggcgataaagtgctgatggaggtcgccagccgcctgatgacttttgccggtaaacgccatctggcgtggcgtcttggcggcgatgagtttgccgttctgctgcgcgaggtgcgctcggaagcagaagtgcaggccctgtgccaggcgctaacggaacaatttcttccgccattcaacctgcacaacggtcatagcgccacgctctcgctgagcgtcggttatgccctggcgtgggagcacgccaccgcggaatcactgcaagaacttgccgatcagaatatgtatcggatgaaaaaccaacgtatccagcagacgctgaaataataaaggactcattatgatcagaaaatatttcgtccccgccctgatggcggcggcgcttttgacaggttgccaggctcctcagggaaaatttaccccggagcaggtggcggcgatgaaatcttacggcttcactgaaagcaatggcgattggtccctgggcttatccgatagcatcctgtttgacaagaatgactaccgactacgtcccgacagccgccagcagatcatcacgatggcctcgcggctggcggctaccgggatcacccatagccgccttgaaggccataccgataattatggtgaagatagctacaatgaagccctgtcgcttaagcgggccaacagcgtggccgatgcctgggcggaaggcgctcatgtcccacgcagtaatttagtcacccgcggccttggcaaaaaatacccgatcgccagcaacgacacggcggccgggcgcgccgaaaaccgccgggtaacggtggtcatcagcacgccgtaagtcttcacttagtcgctggacttcatcatcctcattgccgttgccgcgcgccagcgcaggtagtcaacggcaatgaacagcagcaggctggctcccattaacggcatggccaatccaagggcaaacgccagcccaagcaccaggcttcgggcaggccaggcgagcgacagccacgcctgcagcagcgaatgcgccggatcccaggccgcctgaggcggacggcggatccaccataatcggtaccccaccccgatggtaacgcacagcgcgcagccaaatcccaccagcagcagctgattcgccagaccaaagaggatccccatatggaaatcgacgccccagcgggtgagcttcgccatcagcggaaagtcggcaaaacgcgtgcgatccaccacctgcatcgtggcgccatcgatcgccaccgcgtccacctgcgtcggccagcgacggtcgatctcattcaccgtccaggcgcggtcgtctgacactggcggacggatctccagccggctggcgttcagccccgcctgacgggccgccgccagcgcctggtcaaactgggccaactgcagcgccggctgatgctgggccatggccatcgcatccatatgatgtccggcatggggatcgtgcgtcatcggcatctcgccatgcagctgggtattgacctgcggcgtcagccagccgaacgctgcccgcattttgtccacattgccgccggcccattgcgaccaggtcaggccggtggcggagaagagcagcatacccaccagtaagccccagcccagcgtcacgtgcagccgacgatgattctgcagggcgttattcagccgccgttttggacgcgtcatcgcccacagggcaatgcctccgagcgcggccacccacatccaggaggcggccagttcgctgtataacctcccgctgtcgcccagcagcagagagcgatgcgcataatcaatccactggcgcagcggcaggatgccgctggtgccgtagaccgtcatatcgcccttcacccgcagcgcgatcggatcgacaaaaatagcccgggattccgactctccgagacccggatcggcaaacataatgcgcgtggtctcgcccaacgcaggcgccggacgcaccgccagcagccgcagattgccctgggtcgcttcttcggccaccgcaatctgggcgctgagcggctgcggagtcccctcggcaaggccatgcagcgcgtcgtgatagagccagttttccagctgcggcgtcgccacgtacaacgtaccggtcagggcagcgacaaagataaacggtccgataaacagaccaatatagaaatggaggcgacgcagcaggttcagccatgccgcgcgcgaggtgcaggttgtcatacttttccttttttaaagcaaaagaggtcgttgcgcggtgcgcagattgatttttattaaagggaaaaagcagacagccgcggcggggcgcgggtttcggggtagagccaggtaaagtagtgccagtgctttaataccgggcgagaaaccggcaggcgaatgcgccgcagaagcatggcgacgaacagcgccagcgcgaaaaggagccccgggacatgggctaacagcacgcaatagccacacgcttcggcatggtccagcggcatttcgtgtccggtatgcgtggcgccgtctgtgctgtgcatcatcgccatcttgtgcccgggcatctgcgccatgctcgcggacgagctatccatcatcatggcgtggtgcatgccgggcatggcgctcatggggtctttttgcagggagacggagattagcggggccaccacgatcagcaggatcgccaacagcgccagccaggcggctcgccgtttaggtgtcgtttgctgaaaactgttgctgaccaccgcccctccgtatagagggcgtattgtaaatgatttacatcacgatggttacaacaaagataaaaaaagggccagccatctggccagccctttctatcaggatgtcgcgaaagcgaatcttagttaagacgctctttgatacgagcagacttaccagtgcgctcacgcaggtagtacagtttagctttacgtacagcaccacgacgtttaacagcaatgctgtcaactaccggagagtgagtctggaagacacgctcaacgccttcgccgttggaaattttgcgaacagtgaatgcagagtgcagaccgcggttacgaatagcgataaccacgccctcgaatgcctgcagacgttttttggaaccttcaacaacccatactttcacttccacggtatcacccggacggaaggaaggtacgtcctgcttcatctgttcttgttcaagttgcttaataatgttgctcataatttaatctcttatcctgggtaaactgatattgggggctcacgcctgcccatcatgtttatgctgctgttgcgcgtgttcagttttgaactccgccagcagctttgcttgctcttcagtcagagccaggttttccagaagttcaggtcttctaagccaggtgcggcccagcgactgcttcagacgccagcgacgtatctcagcatggtttcccgacagcaatactggcggtacttccatctcctctaacacttcaggacgggtatagtgggggcaatccagcaacccatcagcaaaggaatcttccgttgccgatgcttcatggcccagtactcccggaatgaaccgggaaacggagtcaatcagcgtcattgccggtaactcaccaccgctgagaacgtaatcgccgattgaccattcttcgtcaatttcggtttggattacgcgctcgtctatcccttcgtagcgaccgcacaccagaatcagtttctgattcgttgccagttcgctgacgcccgcttgatcaagcttgcgtccctgaggtgacagataaatcaccttcgcgccttcacctgccgcggcttttgctgcatgaatggcatcccgtaagggttgcaccatcattagcatccccggtccgccgccgtaaggacgatcgtccacggtacggtgccggtcatgcgtgaagtcgcgaggactccagctttcgatgctcagcaggccattttttactgcccggccagttaccccgtaatcggtaattgcgcggaacatttcaggaaacaggctaattatgccaatccacatagcgccgtcttttaccgtttatccggagaatttaaaaaccaggatcccaatctacttcgatagtacgcgtagtgagatcgactttcttgataacctgcccatcgaggaacggaaccaaccgctccttgataccaaatgcatctttcaggtttgccttgatgacgagcacgtcattcgacccggtttccatcatatcgatgactttaccgaggctatagccttccgtcgtaactacctggcagcccatcaggtctttccagtagtagtcaccctcttccagctccggcaactgcgatgaatccacgataatttcgcaattagtcagtagattcgcggcatcacgatcgtcaacgcctttcagcttgatgatgatgtcctgattgtggtggcgccagctttccagctcaacgacctgccactgacccgccttctggattaaccagggctgatagtcaaaaatgctttcggcgtcttcggtggaggaaaacactctgagccaaccacggataccgtaggaagaacccattttccccaatacgatcggatcaacaggtgcttgcgcggtgtgttgcttgctcatcatgaccaccgtgacagattaagctgctttgttagcggctttgatcagcgcggcaacgcgatcggaaacagtagcgccctggccaacccagtgagcgatacgatccagatccaggcgagtttcttcttccgcaccgttagcgatcgggttgaagaaaccaacgcgctcgatgaagcgaccgttgcgtgcattacggctgtcggtgacaacaacctggtagaacggacgctttttagcgccgtgacgtgctaaacgaatagttaccataacatcctcttgtgtgaataaaacaaccgggccccatcgaggaacggagcccggtgtcatattaaaagcccgaaaattttactgatttctggggaaaatgcaatcagcagttgataagtctgctgtaaaaggccgtcggcggtgcagccagtttagtaccagcgtgtgcgcaaccactgtaacgtacaggtagtacgtgaggatggcgagcacaccccggcgctaaaatggcaaacaagataaccttatgcccttgtttttaacgacccgggaagcctggcggcatcatccctttcatcccgcgcatcatcttcatcatgccgcctttcgacttcatcttcttcatcatgcgctgcatgtcgtcgaactgcttgagcagacggttcacatcctgcacctgcatgccgcagccggcggcgatacggcgcttacgcgagcctttgatgatttccggcttagcgcgctctttcagggtcatcgagttgatgatcgcttccatacgcaccagcactttgtcgtccatctgcgctttcacgttgtccgggatctgccccatgcccggcagcttgcccatcaggctggccatgccgcccatgtttttcatctggcgcagctgctcaaggaagtcggtgaggtcgaaaccgtcgcctttcttcagcttggaggccagcttctcggcctgcgcgcggtcaaccttgctctcgatatcttcgatcagcgacagcacgtcgcccatgccgaggatacgggaagcgacgcggtccggatggaacggctccagcgcttcggttttctcgccgacgccgaggaatttaatcggcttgccggtaatatggcgaatcgacagcgccgcgccgccgcgggcgtcgccgtccactttggtcagcaccacgccggtcagcggcagcgcttcgttaaaggccttcgcggtattcgccgcatcctgaccggtcatcgcatcgacgacgaacagggtttcaaccgggttaatggcggcgtggacgtgcttgatttcgtccatcatcgcttcgtcaacgtgcagacgaccggcggtatccaccagcagcacgtcgtagaatttgagtttcgcttctttcagcgccgcgttgacgatatcaaccggcttctgcccaacatcagacgggaagaaatcgacgccgacctgctcggccagggtttccagctgtttgatcgccgccgggcggtaaacgtccgcggaaacgactagcactttcttcttgtgcttctcgcgcaggaatttccccagcttaccgacgctggtggttttaccagcaccttgcaggcccgccatcagcaccacggccggcggctgcgccgccaggtcgagcgtctggttctcttcgcccatcgccgccaccagctcgttgcggacgattttgacgaactcctgacccggggtcaggcttttattgacttcatggccgaccgcgctctctttgacgcggctgatgaaatcacggaccaccggaagcgcaacgtccgcttccagcagcgccatgcgcacttcgcgcagggtgtctttaatattgtcttctgtaaggcgtccgcggccgctaatgttgcgcagcgtacgcgacaaacgatcggttaaattatcaaacattgtctctcgcctgaggtggaaacggtcggtcgccgcagcgacacacaaaacgaatgtggcggagtataacacgacatcaatctgaatgtgctgcaacggttggagcagaggcctgctaacgttatactgcttctctttcttatttagccaacagccgacacctatgcctgtttttgctctactcgcccttgtcgcctactccgtcagcctcgcgctgattatccccggcttgctgcaaaaaaacagcagctggcggcgaatggcgattttatctgcgactatcgccttgatctgccatgcttttgcgctggaagcacggatattccccggcggcgagagcgggcaaaatctcagcttactgaacgtcgggtcgctggtcagcctgatgatctgtacggtgatgactatcgtggcctcgcgcaatcgcggctggctgctgctgcctatcgtctatgccttcgcgctgatcaacctggccttcgccacattcgtgcctaacgaatatatcactcacctggaaaccaccccggggatgctggtgcatatcggcctgtcgctcttctcgtacgccacgctgatcattgccgcgctgtatgcgctgcagctggcgtggatcgactaccagctcaagaataaaaagctggccttcagcagcgaaatgccgccgctgatgagcattgagcgcaaaatgttccacatcacccaggtcggcgtggtgctgctgaccctgacgctgtgcagcggcctgttctacatgcacaatctgttcagcagcgaaaatatcgataaagcggtgctgtcgattattgcgtggttcgtctatatcgtcctgctgtgggggcactatcatgaagggtggcgcggacgtcgtgtggtctggttcagcgtcgctggcgccggtctgctgacgctggcctattttggtagccgcgtgctgcagcagttcgtgagctaagtcttttaaggaatcctacgtggaacatatctccaccaccacgctgatcataacgctgatcgtcatggtgattatctctgcctatttctccggttccgaaaccggcatgatgacgctgaaccgctaccggttgcgccacatggcgaaacaaggcaaccgccccgccaagcgcgtggagaagctgctgcgcaagccggaccgcctgattagccttgtgctgatcggcaataaccttgtcaacattctcgcctcggcgctgggcaccatcgtcggcatgcgcctgtacggcgacgccggcgtcgcgatcgccaccggcgtacttacctttgtggtgctggtatttgccgaagtgctgccgaagaccatcgccgccctctatccggaaaaggtcgcctaccccagcagcttcctgttggcgcccctgcaggtgctgatgatgccgctggtgtggctgctgaataccatcacccgcatactgatgcgcatgatgggcatccgcaccgataccgtcatcagcagcgccctgagcaaagatgaactgcgcacgattgtgaatgaatcccgttcacaaatctcacgacgcaatcaggatatgctgctgtcggtgctggacctggagaaggtcagcgttaacgacatcatggtgccgcgcaatgagattgtcggcatcgatatcaatgatgactggaaatctatcgtccgccagctgacccactccccgcatggccgcatcgtgctctaccgcgattcgctggacgatgccatcagcatgctgcgcgttcgcgaagcctaccgtctgatgacggagaagaaagagttcacaaaagagatcatgctgcgggcggcagatgagatctactttgtgccggaaggcacgccgctcagcacccagctggtgaaatttcagcgcaataaaaagaaagtcggtctggtggtcgatgaatacggcgatattcaggggctggtcaccgtcgaagatattcttgaagagattgtcggcgacttcaccacctccatgtcacccaccctggcggaggaagtgaccccgcttaacgacggcacggtgattatcgacggcagcgccaacgttcgcgaaatcaacaaagcgtttaactggcacctgccggaagatgaagcccgcaccgtcaacggtattatcctcgaagcgctggaagagatcccggtcccgggcacccgcgtgcgcattgagcagtacgatatagatatcctcgacgtgcaggacaacatgatcaaacaggtgaaagtgatgccggtgaaatcattacgcgagagcgtcgcggagtagcgctagcgaaggaattaatatcacggtgggctgcggcccgccgtttttttatctcgcgccgggagcgatgacacaaaaaacggccacccgcaggcagccgttgagcaaggcagcaagcgttatttcgctttcgctaccgtcaccatcgcggcgcgaatagtacggccgttcagggtataacctttctgcatcacggacagcacgttgcccgccgccacatcttcagactcgaccatcgcaatggcctggtggacgttcggatccagcggaacgttggtgtcggcgatcacttccacgccgaacttacgcactacgtccagcatagatttcagggtcagttcgatcccctccaccatcggcgccagctccgggttagccttgtcagccacttccagcgcgcggtccaggctgtcgatcaccggcagcagttcattgacgaatttttccagcgcgaatttgtgcgctttctcgatatcctgctcggtacgacgacgcaggttatcttcgtcggctttggcacgcagcatcacttcacgttcacgtttctgcgcttcagccagctgggcttccagattcgcaattttttcatcgcgcggatccacctgctcagccgaaacttcaggctctaccgcctcaacgtcgtcgtgctgctccgtgataatttcttccggggcttgcccctcaggcgttttctgttctttactactcatgaatttctccgcgtttttttcgcattcatctcgctaacttcgcttattatggggatcagtttccgggtttcaagggaagcggacagattgtcactatttcatttaacgcaaggacatccagatcatgaagaaccatttcaagtgtatcggcattgtgggacatcctcgtcaccccaccgccctgaccacacatgaaatgctctggcgctggctgtgcagcaaagggtatgaagtgctggttgaacagcagatcgcccatgaacttcagctcagcaacgtgaaaaccggcacgctggcggagattggccaacaggccgatctcgcggtggtggtgggcggcgacggcaatatgctcggcgcggcgcggaccctggcccgttacgacattaacgtcatcggcattaaccgcggcaacctcggctttctcaccgaccttgacccggacaacgccctgcagcagctcgccgacgtgctggaaggccactacatcgccgagaaacgctttctgctggaggcccaggtgtgtcagcaggtttgccagaaacgtatcagcaccgccatcaacgaagtggtgctgcaccccggcaaagtggcgcatatgattgagttcgaagtctatatcgacgaagtctttgcgttctctcagcgatccgatggcctgattatctccactccgaccggctccaccgcctactcgctgtcggctggcggcccaatccttacgccgtcgctggacgccatcaccctggtgccgatgttcccgcacaccctttcagcgcgaccgctggtgatcaacggcgacagcaccatccgcctacgcttctctcaccgctgcagcgatctggagatcagctgcgacagccagattgccctgccgatccaggatggcgaagatgtcctcattcgccgctgtgattatcacctcaatctgattcaccctaaagattacagctatttcaatacattaagcaccaagctcggctggtcgaaaaaattgttctgattttcacggctgcctctttactggataaaaaaccagtctatactgtacgaaaacacagtattggtttttcatacaggaaggcagctatgttggcgcaactcaccatcagtaattttgctatcgttcgtgaactggaaattgatttccacagcggcatgaccgccatcaccggggaaaccggcgccgggaaatccattgccatcgacgcgctggggctgtgcctcggcggcagagcggaagccgacatggtgcgtcgcggcgccacccgtgccgacctgtgcgcgcgcttcgcgctgaaagatacccctgccgcccagcgctggctggaagagaatcagctggagagcgggcgtgagtgtttacttcgccgggtgatcagcgccgacggccgctcgcgcggcttcatcaacggcaccgccgtcccgctctcgcagctgcgcgagctgggccagctgctgatccagatccacggccagcatgcccaccagctgctgaccaaacccgaacaccaaaaaacgctgctcgacggctataccggtgagtatgcgcttactcagcgtatggccgagcactatcgccagtggcaccagagctgccgcgagttggcccagcatcagcatcagagccaggagcgcgccgcccgcgccgatctgctgcagtatcagcttaaagagctgaacgaatttaacccgctgccgggagaattcgagcagattgacgaagagtacaagcgcctggccaacagcggccagctgctcagcacctgccagcacgcccttacggtactggcggacggcgaagaggccaatctgcagagccagctttataccgcgaagcagctggttagcgagctggtgggcatggacagcaagctttccggcgtcctggatatgctggaagaggcggccattcagctcagcgaggccagcgacgagttgcgccactaccatgaccgtctggatctcgatccgaaccgtctgtttgaacttgagcaacggatttcccgacaaatcgcgctggcgcgtaaacatcaggtgatgccggaagagctgccggcggtttatcaggcgatgctggaagagcagcgcctgctggacgacagcgccggctcgctggaatccctcagccagcaggtggtcgaacatcatcagctggcgctggagaccgcacgccagctgcatgccctgcgccaggccagcgccgacgagctgacccagcttatcaccgaaagtatgcactcactttcgatgccgcacggggtcttcgcgattgaggtcgcgttcgatgaacgccatctcaccgccgacggcgccgaccatattgagttccgcgtcaccactaaccccggtcagccgctgcagccaatcgccaaagtggcctccggcggcgaactgtcgcgcattgcgctggcgattcaggtgatcaccgcgcgtaaaatggaaaccccagcgctgattttcgacgaagtggacgtcggcatcagcggcccgaccgccgccgtggtcggcaagctgctgcgccagctgggcgagtccacgcaggtgatgtgcgtgacccacctgccgcaggtcgcaggctgcggccaccatcatttctttgtctgcaaagagaccgatggcgagatgaccgaaacccatatgcagccgctggataaacgtgctcgcttgcaggagctggcccgtctgctgggcggcagcgaagtcacgcgcaacaccctggcgaacgcgaaagagttgcttgcggcgtaaactttttgattttcacagggtcatagtgaacagcaaattgcctgctgacctgcagccggaggtttccaacggcgcgaaggtctattattatcggcatattacagatgagccacgtactgctcgggcccaaaaaggaatcaaatcactatgcgctgtaaaacgctgactgctgccgcagcggttcttcttatgttgaccgcaggctgttccactctggaacgagtggtttaccgtcctgacatcaaccagggtaactatctggcaccaaacgatgtagcaaaaattcgtgtcggtatgacgcaacagcaggtagcttatgctctggggacgccaatgatgacggatccgttcggcaccaatacctggttctatgtcttccgtcaggagccgggccaccagaaagtgactcagcagaccctaaccctgaccttcaacagcggcggtgtgttgactaacattgataacaagcctgcgctgaccagtcagtaaggcccggaaaagcaaaaagcgctcgatgagcgctttttttatggctgatagtcggtctgctgcaggttactttgcggcgcttttctctgcccgctggcgacgcagctctttcgggtctgcgatcagcggacgatagatttccacccggtcgccgtcgtgaacttcgtcatgcagctttaccggacgactgtagatacccagcttgtttttcgccagatcgatgtcatcacgcagcgccagcaggccgctggcgacaatcgcctgctcgaccgtcgccccctcgtccaaggtgacccgctgcaggtactgcttttcaggcagcgcgtaagcgacctcaacacgaatattagctggcactgtagacctctttggcgcgcgaagtaaacgcctgcaccatgttggcggccagttccttaaagacccggccaaaggccatctcaatcagcttattggtaaactcaaaatcgagatggaactcgattttgcacgcctccgggctcagcggaataaacttccagccgccaatcagcttcttgaacgggccatccaccaggctcatcaaaatgctctggttgctggtcaatgtattgcgtgtggtgaaggtcttactgatgccggctttggacacatcaaccgccgccgtcatttgcgtcggccccaattccagcacgcggctaccggtgcagcctggcagaaaatcaggataggacttcacatcgtttaccagttgatacatctgttccgcgctgaaaggcaccagcgcagtacggctaatctgaggcatagcaggttccacatttaaacacagtgcaaataatatcatttatctgctgctaaaaaaaacgctgtgccgcaactcgtgctaagatgcgcagtatacctcgcaggatgcgatcgaggtaactgtgtataagacgatgacttcaggacattatgactaagaaaaaagcccacaaacctggatcagccaccattgcgctgaataaacgcgcccgtcacgaatactttatcgaagatgaatacgaggctggtctcgccctgcagggctgggaagtcaaatccctgcgtgcaggcaaagccaacatcggcgatagctatgtcatcctgaaggatggcgaagccttcctgttcggcgccaactttacgcccatggccgtggcttccacccactatgtctgcgacccgacgcgcacccgtaagctgctgctcaaccagcgtgagctggacacgctgtacggccgcattaaccgcgaaggttacaccgtcgtcgccctgtcgctgtactggaagaacgcctggtgcaaagtgaaaatcggcgtcgccaaaggtaagaaacagcacgacaagcgtaccgacctgaaagatcgtgaatgggcgctggacaaggcgcgtattatgaagcacgccggacgttaatttcccctccccgaaggccagctctcgctggcccttacgctatatccttgttgatgctgatttttcgtccaccctgctgaaataatcctgcgtgatggggctggtaacgacattcacaaatctgttatacttgacctacacattggggctgattctggattcgacgggatttgcgaaacccaaggtgcatgccgaggggcggttggcctcgtaaaaagccgcaaaaaatagtcgcaaacgacgaaaactacgctttagcagcttaataacctgctctgagccctctctccctagcttccgctcttaagacggggatcaaagagaggtcaaacccaaaagagatcgcgtggatgccctgcctggggttgaagcgttaaatctaatcaggctagtttgttagtggcgtgtctgtccgcagctggcaagcgaatgtaaagactgactaagcatgtagtgccgaggatgtaggaatttcggacgcgggttcaactcccgccagctccaccaaaattctccatcggtgattaccagagtcatccgatgaagtcctgaaagcccgcacggcgcaagccctgcgggcttttttgtgtctgttgttgtccgagaacatccatcaaaatccggtgattattggtatacgtttaggtatacggtaggatgtatacccaaaagcgtataccaattcatgaagaagcggccacagtggcacggacaacacgccccctgaccaacaccgaagttctgcgcgcgaaagcgttagagaaggatctaacgctgcatgatggcgatgggcgtttcctgccctttctcttgctgatgcccgagggttaagagcagattacctaaccctattagccaacggaatcgacccgcaaattcaagctgaagttgcagaggaacagcagcgaatcgctctggacagtatttttttcgacggtcgccgctaactggttccagctcaaaagcaaaagcgttacccatgattacgctaaagatatatggcgttcactggaaaaagacgtattccccaccatcggggagatccctgtccagcaaatcaaagcccgaacactggttgaagcccttgaaccgatcaaagctcgtggggcgctggagacggtgcgccggttggtgcaacgtgttaacgagataatgatttatgccgtaaatactggtcttattgatgccaatccagcatcaggcattggaatggcctttgagaagccaaaaaaacaaaatatgcctacgttgcgcccagaagaattgcctatgctgatgcgttctctcgtcatgtcaaatttgcctgttccgactcgctgcctcattgagtggcaactcctgactctagttcgtccttctgaggcttccggtgctaggtgggctgagctcgatctcgatgcaaagctctggactattccagccgaacggatgaaggctaagcgtgagcacattgtaccgttatccccccaggcaatagagattctggaagtcatgaagccaatcagtgctcaccgagaatacgtttttccgagtagaaatgatcccaaaatgccaatgaatagccagactgcgaatgcagctttgaaacgtattggttatagtggaaaattagttgctcatggtttacgttctattgcaagtacagcaatgaatgaagctgggttaaatgcagatgtgatagaagctgctctagcacatacttacaagaatgaagttcgtaaagcttataaccgctcaatctatttagatgcgagaatagaattaatgaattggtgggggcaagctgtccaccaacaatacaaataaggattgaatatgcaacctgtaactttagatggaatgatcgcagcatcacttccttgggctaaagaagtcatcaagaataaaataatcccaataatttcatcacgagttaaagattatttagatgatgttagagccgcgagatttctaaatgacagcatggaaaaattcctttctcgtgtcggaggacaatgttctttagtaaacacattagctttccaaaacacccccatcgaactaaaaaaaatatatgaaccaatttctgtataccatgacaacgagcaatcaaactatgagtgtttaattaataacaagattgacatcttaaattcttataaccatatattaataactgactccgcaggtatggggaagtcaactttaatgaagcgaattgcattatattgcatagaagaaacgaatcaaataccaatttatctggagcttcgtcgcatacaagattatagcattgctgaacaagtaaagaatcaactaggtttaggtaaaaacatttccaatgcatgccttaaagaaattccctttatttacttattcgatggcattgatgaaatacctcaagggattaaatcctccgtagtcaactctttgcgtgagtttgcagatgatttttcagaaagcaaaataattataacttccagacatgatagcttcctctctgagttgtatggattctcaaggttcaaaataaaaccgttagattcttatcaagcgtatgatttacttagacgttacgataacaccggaaatatttcgtcaaagttaatcaaaggtcttcgtttagaagaaggaagaaacttcgatgattttctttcaactccattatatgtttctttattattttgcgcatataaattcaaaccaataattccacgtaagaaagaattgttttacagccaggtatttgatgctttatttgaatctcatgacctaacaaaagagcttggttacgtcagggaaaaacattctaagcttgattcaactgacttccatcagattctgcgaagattaggattttggtgtttaaaggaaggtggaaggattgagttcactaaagatgatcttcaaataatcattaaagaaattgcatctaaaataccagggttgactatatctgcatcattattcataaaagatcttatcgaaaccgtacctttatttgtcaaggaaggagcaataattcgctggtcacataagtcacttatggaatatttcgcagccatgtttatatgtagggacactaaagaaagacagcgaggaatattaagaacgctttataaaaacgatgagtctataagacataaaaacctttttgaattatgtgcggatattgattactcgaccttccgttcgagtgttataaagaaccttttagaagattatgtccacttatatgaaaaaatcagccaacgatcgataacaagcaccccaaaagaagtcatttctaaagttgaacttctctttccaggtcgctcactaatttatatcttctctaagggagaagaaaacaaaaccctttccaaactaataaatggagacttcagggagtttaaagagcttaatacaaaagatggctacttaaacactacatttgcagatataggtaatgcatgggtagtaattgcacgtaatgaaacaataatctctcatgtattaagcatactaaaagtaaaaaatccagaatatttccatagtaatcatagattaacaagtgatgatacgaatcttacattagaggttcgtcgtgctataagacatgatgatgaagtaaagattgacgtaaattttgaaaacatcctaaactgcgatggaaaaacaaatcttaacttaatttcaggaattttgacttttgataaaacaccccaattaaaatatagaaaagctcttgccgaacttgacaaaataaactttgatgacagcaatggaataaatcaacttttggaaggattctaattcatttaaaaaattattgaggccaagtacatatggcctcaataccctcactcatatttaagctcaccaaaaagaccaaccatcaaatcgtcttcaagtacaaggaatggtaattcaacatattcacttggatgtcgtggcttagcctttccgtcatgaggagcatttttcgtatgcccttggactttttcaccattcacttttatatatgggaaaacaacgattctcccatgatttttcgatataatagttccttcgtgccagatactttcaccgcttttaagtgaatcactactattagtcgctttaacaatccatccaacatcgccagtttcttcataccaaaatacatacccacccgccattaataccttatgaccctttgcatgagcatctgcaagcatcctttttacactggaaagctgtaatagttcatttgcacgtggtaataaccgtattctaatttctgactttactctgccccagtgatctcgacctgaaaatccaaacgctcttgatatcttctctctaaatgcaactttagtggtcaggtcattgtaatagagatacctaccccaatctccgtttgcatgttttccaataaccattctattttctttcaaatgagcaatttcaatcagcgggttaatattaatctcttgtagcagttcatctttgatagatatactagcgcgttgataagcatttaattttaaaatcacttcatcttctttgggccttgacagtgacgaagtaatatttaaagcttcagaaagcattaaatattcttcattttgaagcctttgcctagaaattattgctttttctgcctttaaaaaatacgaatctttgacctcttgactaatttcaagctcactaactttttcctttatgaaattatttattacctcggcagcattcaatgcttcttcataagtattaaacaccaatccataatcaaactgttcaagtatctctttccttcttttccatttaaagggctccttatattcgctgatgtactcatgcagaatccaatcactatttatatatctcggatatggatgaacggctatgaccaaaccgtgggggtattctttattacgcatgttctaatccctcaacgttatgctttgatttcgaaccagcttaatttatatgtataccaagcgtcataagcctacatcatttgtgattgtaagatcatcaatttctaataatgcttttaatgttagcgcgcaatgctctccccgccacgcctgcccgcttaagggggtacttttaatgcagggcaaaggtgggctcagttcgcaccgcaactggcgctggtcgggagtacaggggcgggaaaacacatgcaaaaccatgcaccttttggatacatggcttaattcgggaaaaatgacgggatttacaggtaattttttacggcctactgcgcggccagctcggcgcgtcggcgggtgtaaatcgtgttctgtgcaggggtaaatctttcacgattatcatccctcgaaggcgcatcaggcctgtatccgatggccgttaaaatgtcgttatccggtgctgaataaccaatgtcatttcctgcggccagccagacggaaagggcttcacgtagatatgccattgaacggttaagtgcgcggttttttatcatcgcgggctggttcttaacccccatcagttctggtgccagtgcggcggccaactctgcgccgttctgctgcataaaatcatgaagccggttacgaatgctgatgcactgtacttcctcatgtgaacggatatagcgaccggcggcctgattaatctcccatttttttatatcaaggccgtcagattgcctgtgcgttactagaagatttaatggaagccggaccactgaaagccgcaccgtcgctgtcctttctcgggctcgcagtgatggatgaactctgcgcccgccatatcaccgcaccagtactgcactgagggagaaaacaacgatgaaaatgaacataacggaaaccgtaaaacaggctcgaggccactggccgcacatactcccggcgctgggcgtgaaggtcattaaaaaccggcatcaggcttgtccggtatgcggcggctctgacagttttagctttgacgataaagaggggcgcgggaggtggttctgcaatcagtgtggcgcaggtgacgggcttaagctggtagagaaagtgtttggcgtgaccccgtcagaagctgccgggaaggtgaacgccgtaaccggcaacctgccgccggttgccccggagattattgcggccgtagaggccgaaaccgaggccgaccgcaaagcggcggcgtgatgttccgcgccggtgatgtggttgtcccgctgtatgacgataccggcgcactggttaatctttagcttatcaatgctgacagtctaaacgcaccctgaaagcaggtcaggttaaaggggcatgtcacaccatcgaagggcaaaagcagaccggaaaacgtctgtggattgcggagggctatgcgaccgcgctcaccgtgcatcacctgaccggcgaaaccgtcatagtggcgctgtcctcagtgagcctcctttctcttgcgagccttgcccgacaaaagcacccggcatgtcagattgtgcttgcagccgaccgcgaccttaacggaaacggccggagtaaagccgctgcggccgcagacgcctgtgagggcgttgttgctctgtctgttcggcgactggaatgatgcgtttatgcagcacggcgaagaggccacgcggaaagcgatttatgacgccatacggcctccgcctgacagtcctttcactaccatgagtgaggcggaatttaccgccatgagcaccagcgaaaaggcaatgcgggtgcatgaacattacgacgaagcgctggccgtggacgcgaacggccagctcctgtcccgctatgaggccgggatatggaaaattattccgccatcggattttgcccgcgacatggccgggttgttccggcgactgcgtgccccgttctcgtcagggaaaattgcctcagtggtggagaccctgaaactgattatttcccagcaggccgcccgcgcgccgtatgattggttttcgcaatggcgtactcgataccctcaccggcgtattcagcccacacagcaaatcacactggctgcgtacgctgtgcgacgtggactttacccctccggtggagggcgaaacgctggaaacccacgcgccaaacttctggcgctggctcgaccgtgggaccagcggcaacgctgacaagcgtgatgtaatactcgccgcgctgtttatggtactggcgaaccgctacgactggcagctctttcttgatgtgaccggaaccggcgggagcggaaaaagtattctggctgaaattgcgaccctgctcgccggggaagacaacgccacgtctgcgaccatcgagacgctggagtcaccacgcgaacgcgcggcgctgattggcttcccactgatacgcctgcctgaccaggataaatggagcggggacggcgcggggctcaaagccatcaccggcggtgatgctgtgtcggttgacccgaaataccgcgacgcctattcggcctatatcccggcggtaattctggccgtgaacaataacccgatgcgcttcaccaaccgcagcggaggcgtatcccgtcgccgggtgataatccacttcccggagcaaatcgccccggaggaacgcgatccgcagctcagggacaaaatcgcacgcgagctggccgtgattgtgcgccagctgatgcagcgcttccgtgacccgatgaccgcccgcacgctgctccagtcacagcagaactcagacgaggcactgagcatcaagcgcgatgccgatccgacgtttgatttttgcggctaccttgaggagctgcccgaacctgacgggatgtatatggggaatgcgaatattgtcccgcgacagccgcgcctgtatctgtaccacgcctatctggtctatatggaggcgcacggctacaagaatacgctcagtctcaccatgttcggcaaaggactgtcatcgatgctgaaaagagtacggcctgaattacggcaagcggcgaacgaatcagaggatgcagactaatctcgcactcagagatgaaagcaacgcagactggctgccccggtgcaacgaaagaacagcaatataacctactcggaccggcatcagccggtctttttttacctttaactcccgagattgaacagtaaagtgttcactgttcacggactcttcaccttgtatctaactgaattaaatgaaaaataatatcgagtgaacagttttccataaaaaaattttttcctacctctggggttcatcgcgccaagatgcaatacgggaagttaatcattaatgagctgtgagtagtgcctcggctgagaacgcttaacgcactgattcaaataatggtaagtgtaatcaattcgagttcacagaaaaatgtgattagttgttattgaaataatcacttaaatacaaaaacatttttgcagttatctcatcaaaagtctaaaaacattgtcttgcaaaaaaaatctctttacttattgaaatggctgtattttttagttaagttattgactctttggaatcaattttatataaaaaccttgcttagcaaagcataaagggactgtgatggacattaaataccattcagaggcggaaaaaaagttctctgagcacttattatctttaggatacaccaaagattcaatattatacgaaccagcattttttgccaatgatggcagtaggacatacagaccagactttgcaattatagatccagaaaagaaagaatatcttgccattattgaaataaaggcagacaggcttataaataacgaagaagttcttaatcaattaaaaaaatacagacatgcaattggcaataaaaaaatcccactattcttggtggctgtatcatccattccaaataatccattgccatttgcactttactcattgagtgaggcaggtgatttagttaaatctgacttcaatcttttcccaactttccgagcccttactgcggaagaatcggcggttaggaaaaatgatatccggcagaaaaaaactgaaactatggatacttttcaacgagtttcctggtttcttgctgcagtcttatttctaattgtgattgctgatattaaatttcattttttgacgactgagagaatggccttattaggagctagtgttgcactcatagtcattccatttgcacaaaagtttaaaggactaggcattgaatgggagaaagctaagaacgctaatcgtgacgaatagtaaagtaaatttgcagtttctccttaacaacatctctcctgtgctatcgactcgaaaaaaaccttgttgggatgagattcctcataccagcaaagctgtagttatgttcctacaaagctaaattggtatacgcttaggtatacggtaaaaataaatttcattaaaacctgattaaatacagtaaattaatggctaacatcagactccgccagctccaccaaaattctccatcggtgattaccagagtcatccgatgaagtcctgaaagcccgcacggcgcaagccctgcgggcttttttgtgccctcaatttatcccgcgcagtccaaagagaactcattaaatccgaaccttttaggcctattgattggcccaacgaaaagctctgttgttttcgcgctaccaattacccgccccccctctcaggataagacaacccacaacatctcgcacaaccctttcaccctccggccgcgtccgcggccggagggatagatttaccccttgtgagaatacgcgtccagcatggcaaggaccgcccgacgcgccgcatcgtctgcgatattgtcaggcagcgcatcagcccgcaggttgacataagcgtcagcagcccttcgaatggcaatcccgacggagtgacgatcgtgtgttgccagagtggaagtcagcaggccatcgggatcaatgccgagggcttctattcgacgaacgccgcgttgcggtagattggcgcgacgaaacagcatcggtcccaacacttgttcccggaagaaagacagcatccccagcgcttcgaagagttcccccctgcccagtttaaccacggcataatgcagccagatccaggcccgggactcaaaccactccggcgtcatgttcggccagtgcgcgcaaaattttgccagctgtcgcttgagagcatcgttatcacgggtaaatagcacggcaggctcctcaacgcgctgagtgagcatgtccagggtgataaatttcagatcgacatgcagaagttccgggccaaacaggcagatcagcaggcgaggctcaccgacgtgttccccggtgaaagcatgtagcagatggccgagcgttccggcgaacgccatacgctgagccatgatttcgtcataatagagagggtcgatcaccaccacgaaatccagatcggagtattgatcaaacccgccatggataaacgagccgccggcgagaagggagtggatccgcgaatcagactgtaatttaagcttcagttgctctgcaaaacttctgtgtaaatcgggtagcgtattaagcatactttttcctgttcacaaaaaatacaaagcattacagaatatcgagcgattcatcagcagaccagatatttctgctggaaccctaccctccatcgcgaagcgctaaatgcaagcaatactcccctcaaaccacctcgctcatccactcagcaaacgcccgcacggcgggagagagaaagcgctggtgcggatagagcaatgtgacgggtaccgggggcggctgccagtccgtcagcacttccaccagtctcccctcctgcaggtggtcagcaacgatattctccgccagctgcgccagcccaaatcctgccaggcacatttttatatagagccccgtttcattcaccgcggcgttgccgctgacgggtacagaaaaggtctcgccatggcgaacgaagcggaactcatcggcccgcctcgcctgaccggagaaataatgcacagcccggtgctgagagagcgcctccggtgacggcggcacaccatattccctgagatagtccggtgacgcgcaggtgacccagcgaaagcggcccagagggcgggccaccaggctggagttgttcagctctcccgttcgtatcacgcagtcgacgccttcctgaatgagatcgacctggcgatcgctgacgccgatcatcaggtagatatcgggatagcgccggtaaaagtccggcagatggggcatgacgatgaaatgcgcgatgcccgcgggcatatcaacccgcaggcgcccctgaggccgcgcgacagactcgctcagggtggattcactatgttcgatgagggcgagaatttcccggcactgcgccagatactgcatcccttccggggtaaggctcacccgccttgtggtccggttcagcagccgtaccttcaggtatttttcaaggtttttaatggtactggtgacagtggaggccggcagggaaagggtttccgcggcacgcacgaagcttcctgcctccgcgacgcgcataaacatctgcatagcctgaatacgatccaccttctttctctcctgtagcgagcagcttaccgacagacggcatgattatttgtggattatgaataatgaaaacaatttacgcacctttttacgcttaatcgcctggcgtatcgttgcacggtggattacgaaagggggccagaaaatgaacatgccctcaataaatatccagataatcattacgttaaatagcatgcacaaaggaaaaaccatgtccgttcagcctgtcgaaataagtaaggcctatcgtttattgcaggtcgggtccaccaccatgatttccgcaaaatatgatggcgtcgaaaatgtcatgtcagccgcctgggttgggctggcaggcgagcgaaaagtggtggcctatattggcacccaggctttcactcgtcagctggtggaaaagagcggctatttcgtggtgcagatccccgtagtcagccagatggcaaccgtcctctacgctggcgggcgcagctatgccgacgcgccggataaaaatgacaccatccccttcttttatcagccggaatttgatcttcctcttgtggcaggctgtgcgggctggctggtgtgcaaagtgatgccctacccggacattcagcagcaacacaatctgtttatgggcgatatcgtcgccgcctggagcgatgaccgggtattccgcaacggacattggatctttgatgatgcgccggacgagctacggaccgttcactatgtagcaggcgggcagttctatgccatcggcaaaggcagcaaattcgatcatgggccgggtcaggactgaccctccccggtcatgcggatcgctgacgagatgtctgcgcaacagagcggctgatactccggcgccagacgccgggcgcctggccgtactggcgcttgaagctgcggttgaaggactgctgggagtcaaagccgagggcaatcgccacgttcaggatcggctcgttactgtgggccaagcgttcgatcgacttttgcagctttttcgcccgaatatattctccgaggggctgcccggtatgttctttgaagatccgctgcaggtgccacttcgaatagccggctcgtcgggcaacggtgtcaatatccagacggctatcaagatggttgtcgatccagtcgatcagatcctgaatgatggcgccggtgttcatcatgttaccccctcgcggccggttaaaagcatctttgtcagttgcatttaaaggtggcctgtttttacacaaaatgcaagttttattgttacatttaaatccacgccgggatcgcggttttttatcccccccctggaccgcacataaagtgcaacaattattcttgcacttagttaagcgccttcctacaatcgccgcgatagtgtattcgaaattgttacagttttgtggcgatgatcgacacaaatggccttaagccagcccggacaaaggaagtggcgcggcttctcacgctgcgtcttgcccggcggctacatttaccggaataaaaataatgagcctgcaaaaaacctggggaaacattcacctgaccgcgctcggcgcgatgatgctctcctttctgctcgtcggctgcgacgacagcgtcgcacagaatgctgcgcctcccgccccgacggtcagcgccgctaaggtgctggtgaagtcgatcagtcagtgggatagttttaacggtcgcattgaagcggtggagagcgttcagcttcgccctcgcgtctcgggatacattgataaagtgaattacactgacggccaggaggtgaaaaagggccaggtgctgttcacgatagatgacagaacctatcgcgccgcgctggagcaggcgcaggcggcgttggcaagagccaaaacgcaggccagcctcgcgcaaagcgaggcgaaccgcaccgataaattagtccataccaacctcgtctcccgtgaagagtgggagcagcgccggtcagccgcggttcaggcgcaggccgacattcgcgccgcgcaggcggcggtggatgccgcgcagcttaacctcgacttcaccaaagtgaccgcccctattgacggccgcgccagccgggcgctgatcaccagcggtaacctggtcaccgcgggcgacaccgccagcgtgctcaccaccctggtctcgcaaaagacggtgtacgtctactttgacgtcgacgagtcaacctacctccactatcaaaacctcgcccgccgcgggcaaggcgcgtccagcgataatcaggcgctcccggtggagattggcctggtgggcgaggagggttacccccaccagggcaaagtggattttctcgataatcagttaacgccgagtaccggcaccatccgcatgcgtgcgctgctggataactcgcagcgtctgttcacgccggggctgtttgcccgcgtgcgtctgccgggcagcgcagagttcaaagccacgctgatcgacgacaaagcggtactgaccgatcaggatcgtaaatacgtctatatcgttgataaagatggtaaagcacagcgccgcgacattaccccagggcggctggcagacggtttacgcatcgttcagaaggggttgaatcctggggatagcgtcatcgtcgacggcttacaaaaagtgtttatgccgggtatgccggttaacgccaaaaccgttgccatgacctccagcgccacccttaactgatccctaatcagagaatccaagacatggacttttcccgcttttttatcgacaggccgattttcgccgcggtgctgtcgattttaatttttatcaccgggttaatcgctatcccactgctgccggtgagcgaatatccggatgtcgtcccgccgagcgtccaggtgcgcgcggagtatcccggcgccaacccgaaagtgattgccgagaccgtggcgacgccgctggaggaagcgatcaacggcgttgaaaacatgatgtacatgaaatcggtcgccggctccgacggcgtgctggtcaccaccgtcaccttccgcccgggtaccgacccggatcaggcgcaggttcaggtgcagaaccgcgtcgcgcaggccgaagcgcgtctgccggaggatgtacgccgtctggggatcaccacccagaagcagtctccgacgctgaccctggtggtgcatctgttctcccccggcgggaagtacgactcgctgtatatgcgcaactacgccacgctgaaagtgaaggatgagctggcgcgcctgcccggcgtcggccagatccagatttttggctccggtgaatatgcgatgcgcgtctggctggatcccaataaggtcgctgcccgcggtctgacggcctcggatgtggtgacggcgatgcaggagcaaaacgtccaggtgtctgccggacagcttggcgccgagccgctgccgcaggagagcgatttcctgatctccattaacgcccagggccgtctgcataccgaagaagagtttggcaatatcattctgaaaacggcgcaggatggctcgctggtccgcctgcgcgacgtggcgcgcatcgagatgggttccggtagctatgcgctgcgctcccagctcaacaataaggatgcggtcgggatcggtatcttccagtcacccggcgctaacgccatcgatctgtcgaacgcggtacgcgccaaaatggccgagctggccacccgcttcccggaagatatgcaatgggcggcgccgtacgacccgacggttttcgtccgcgactccatccgcgcggtggtgcagacgctgctggaggcggtagtgctggtggtgctggtagtgatcctgttcctgcagacctggcgcgcgtcgattatcccgttgatcgctgtgccggtatcggtggtgggtaccttcagcattctctatctgctgggcttctcgctgaataccctgagcctgttcgggctggtactggctatcggtatcgtggtggacgacgccatcgtggtggtggagaacgtcgagcgtaatatcgaagaggggcttgcgccgcttgccgcggcgcatcaggcgatgcgtgaggtctccgggccgattatcgccattgcgctggtgctgtgtgcggtgttcgtgccgatggcgtttctctccggggtcaccggccagttctacaaacagttcgcggtgaccatcgccatctcgacggtgatctcggccatcaactcgctgacgctctccccggcgctggcggccctgctgttaaagccgcacggcgcgaagaaagacctccctacccggctgatcgatcgcctgtttggctggattttccgtccgtttaaccgctttttcctgcgcagctcgaacggctatcagggactggtaggcaaaacgcttggacgccgtggcgcagtgtttgcggtgtacctgctgctgctctgcgccgctggggtgatgtttaaagtcgtccccggcgggtttattcccacccaggataagctgtatctcattggcggcgtgaagatgccggaagggtcgtcgctggcgcgcaccgacgcggtgatccgcaaaatgagcgagatcgggatgaataccgaaggggtcgactatgcggtcgctttcccggggcttaacgcgctgcagttcaccaacacgccgaataccgggacggtcttttttggcctgaaaccgttcgaccagcgcaaacacacggcggcggaaattaacgcggagatcaacgccaaaatcgcgcaaatccagcagggctttggcttttccatcctgccgccgccgattttaggtctgggtcagggttccggctactccctgtacatccaggatcgcggagggctgggctatggcgcgctgcaaagcgcggtgaatgcgatgtccggggcgattatgcagacgccggggatgcacttcccgatctcgacttaccaggctaacgtgccgcagctggacgtgcaggtcgatcgcgataaggcgaaagcgcagggggtatcgctaaccgatctgttcggtacgctgcagacctatctcggctcgtcttatgtcaatgactttaaccagttcgggcgtacctggcgcgtgatggcccaggctgacggaccataccgcgagagcgtggaagatatcgccaatctgcgcacccgcaataatcagggcgaaatggtaccgatcggcagtatggtgaatatcagtaccacctacgggccggatccggtgatccgctacaacggttatccggcggcggacctgattggcgatgccgatccgcgggtcctctcttcttcgcaggcgatgacgcatctggaagagctgtcgaagcagatcctgccgaatgggatgaatattgagtggacggatctcagcttccagcaggccacccagggcaacacggcgctgatcgtcttcccggtggcggtgctgctggcattcctcgtactggccgcgctgtatgaaagctggaccctgccgctggcggtgatccttatcgtaccgatgacgatgctctccgcgctgtttggcgtctggctgaccgggggcgataacaacgtcttcgtgcaggtgggtctggtggtcctgatgggcctggcctgtaaaaacgccattctgatcgtcgagtttgcccgcgagctggagatccaggggaaaggcatcatggaagcggcgctggaggcatgccgcctgcgtctgcgcccgatcgtgatgacctccatcgcctttatcgccgggaccattccgctgatcctcggccacggcgcgggggcggaagtccgcggcgtcaccgggatcacggtgttctccgggatgctgggcgtgacgctcttcggtctgttcctgacgccggtgttttacgtgacgctacggaaactggtgacccgcaggaagccggtccaggaggatctgcccgcctagcctgcagcagataacaaaaaaaccgccttcacaatttgaaggcggttttttttcgtcaccagaaaatgattaatgcgcttttttaaagcgggcgatcatttccggcaccggatcgcagccgctggtatcggcgtttttgaccgcctccagcgcgctggccacggtatggcgagcgaggacgtttaacgaagcctgctctgcttcatcggcaaccgatttgaagtaccagcaggcgttggcgctgaccacgcagcgggccgggacgtcaggacgcgacgcccacagttttttatcttcgataaccgaaagatagatatcacgcagggtgatcttgtccgccggacggccaagatgaattgagccgttgcgaccaagcgtggagacgataatgccgtcacgagttagcggaaccattagtttacggataaagctcgggttcgcttccaggccgtaggccagaatcgcactcgtcgaacgttcacccatctgctccgccattgctacgctgagaaccatctgcaaagctgtcgggaagcggtaatctaacatggcagtgtcctgggttgcggtgaatcttgttctttttggcaccgcagaggtgaataatcaatgaacaacaatataacaaatacgggaatttttttgaagcaatctgcggttagcctgcgaagtaaattttctgatttcacgggcaaaggcggggcaaacacagattccctttcgtaccgttttatttaacgcaaacgccatcctttgttccgctagccgcgccctgtcgccccgcgacctgtccacaccagcggcgcctaaccctgtggataacctggaggcagttgcctggcagccgcagcccgggcgggctaccggctgccgttcgttttttgaacaggggacatacccccgccgggcagcgcgctaagcgcgaaaatcaccaccccggcacagggaagcgcccgccccgcttaataattccacttcggccgcgccaccgtgtttttcttcagcaggtcgcggaacgctttcaggtagggctcattgctgcgcccgcgcttacagatggccgagaacggcgactgaaagccaaactcgttgggcagcagcacccgcaggcggttctctttgatccacggccaggcgtaatgctccggcagatagccaatatatttccccgagaggatcagcagcagctgggcgtcgacggtctcgacggtggcgctccctttgctgaagccccgacggcggagatcgctggtgttccagtagctgcgggtcaccagcgggcactggctgatctgctctttatcgagctggcggctgaagaacatcgggtgcagatcgctgcagtagagccagtgctgttcacggtacagcggctcgctgatgatgttatgcacctgcgagttgtagctgccgatagccaggtcgatatggttgttcagcacgccgttcagttgctccgccggggtgcggataatcagtttgatatgcacatggggaaatttgtcgctgaagctgcgcagaaccaccggcagcgagagcgccgtttcggtctcgatggagtcgagcgtcgagatgcacagggtgccgctgtgctcccctttgagcagcgccgactgccgctccagctcattgagttcgctcagtacgcggatcgcctgctgtaaaaactgctgacctttctcggtcagagaaaagccgccgcgcccgcgctggcagagggtgaagccgagctgtccctctagctgcgacatggcattgctgatggcggagaccgaaatacccagctcctgctgggcccggctgtagctctccaggcgggccaccgcctcgaaaacctgcagctggcgaatattgaggctggcgtcgtgatgcatcgtatttagttcaccaataaatgaactgagtatttacgccagacgatgtaaagtccagcgcgggttgcgcactatctctcctgttacgtttcatccgtcagattcaggagcagacatggataacctctttcaccaaccgcagggtggcaatgagatgccacgcttcgccggacgcgccacaatgatgcgcctgccgtttatcgaagatttacagggacttgacgcggcatttgtcggcattccgctggatatcggcacctcgcagcgctcgggcacgcgctacggaccacgctatattcgcgccgaatcggtgatgatccgtccgtacaatatggcgaccggcgccgcgccgttcgactcgctgtcggtggctgatatcggcgatgtgccgatcaatacctacagcctgctcaaatcggtgcaaattatcgaagattactacaccggtttgaatagttatccgctgatcccgctgaccctcggcggggaccacaccattaccctgccgatcctgcgggcgctgaccaaaaaacatggtccggtggggctcatccacgtcgacgcccatacagacaccaatgatgagatgttcggagagaaaatcgcccacggcaccaccttccgccgcgccgtagaggagggactgctcgacctcaaacgggtggtgcagattggccagcgcgcccagggctatgccgccggcgacttccagtggggcgttgaccagggatttcgcctggtgcaggcggagcagtgctggcatacctcgctggcgccgctgatggccgaagtccgccagcagatgggcgacgggccggtgtatctcagctttgatatcgacagcctcgatcccatctgggcgccgggaaccgggacgccggaagttggcggtctgagctccattcaggcgctggagatcgtccgcggctgccgcggcctgaacctgattggcgccgatctggtcgaggtctcgcccccctacgacgtgagcggtaatacctcccagctggcggccaacctgctgtacgagatgctctgcgtcctgcccggcgtgaagtacgcctgaggaagccgccatggagctgaaatgctttcgcaccctctggggagtgacgaccccctggccgcaaacgctggatgaactgcagcgcgtcggctgctgcggtatcgaagcccgcgtgccgttaacggtggccgagcggcggcagctcgccgaccgcctgcaggcgtcggggctggagtatatcgccattcttttcagcggcggcggggtgctccccgcccagcatgaaacgcccgagcagcatctggcgcgcctgcagtcccgcttcgccgaggccagcggcctcaacccgcgctttgtcaatctgctcgcgggcaacgatcgctggccgctggcgcagcaagtcgattttctcggcaaggcgcatgagctggccgccgggtttggtttgacctgcagctttgaaacccatcgcgccacctcgctgtacagcccgtggctcaccctggagatcattcagcagctcccccagctgcgctttaccgccgacatcagccactgggtggtggtcagcgagcgcctgctggatgaccccagcgatgacttcagcgcctttatcgaccgcgtgcatcacgtgcaggctcgggtgggctacgaccaggggccgcaggtgccgcacccggcggcgcctgagtatcagccggcgctggcttttgccgagcgcttctggcagcaaatctggcgttcgcagcgccagcgcggctacccgcagaccacgctgaccccggagtttggcgccgacggctatctgcaccatctgccgttcaccaacgttccggtggccgatctctggtcgctcaacgcctggatggccgcgcgccagcaggcccactttcagcagtttttatcgctcactgaacaggaaccgcagccatgaccgccgtgaagcacgcttttactgaactcccgaccatcgatatccgcgatctggccggcgatgacctcgccaggcgtcaggcggtggccgacgccatcggccgcgcggcgcgcgaggtgggctttttctacatcaccggccacggtatcgacccggcgctgatcgccggcatccgcgaggcggcgaagcagatcttcgccctgccgatggaggagaagatgaactattacatcggccactccaaaagccataagggctacgttccggaaggagaagagatctacggctccggcaagccggaccataaagaggctttcgatatcggcttccaggcagcggatgaccatccgctggtgctcgccggtacgccgctgatcggcgccaacgagtggcccgatctgccggatttccgcgcgcgggtgctggcctactacgacgcggttttcgccctcggccaccgtctgttcgacgctttcgccctcgcgctcggcctgccggaagggtatttcaaaccgatggtgacctgcccgccggctaagctgcggctgatccattacccattcgacgccagcgtcgaagatgttcccggaattggtgcacacaccgactatgagtgcttcaccctgctgctcgctgaccagcccggccttgaagttctcaatgaagaaagcgtgtggatcgatgcacctcccgtcaaaaacgccgcaggagaagaggcgttcgtgatcaatatcggcgacatgttggaagtgctcagcgctggcacatttgttgctacagcccaccgggtgcgcaaagtgccgcaggagcggtactccttcccgctgtttttcgcctgcgattaccacacgctgatccgcccgctgccgacctttctcgccgccggcgaagccggtgaatatcaggagctcagcatcggggagcatatgtggagccaggccctgcaaacctatcgctacctgcgcgaaaaggtcaatcgcggtgaacttcagctaccggagcgcgcgcgcggcaccaatacgtttggccatttgaaaaaacaggctcagcaaaaaaacccctaaccacccgtgaggatccatgatgactagcaccctgaaaaaaatctcgcgccatgtcgcgcttaccctcgccgtcagcgcctgtttttcccctgtcacccaggcggcggaactgctgaccgagggcgtctttaaggtggggatggaggtcacctacccgccgtttgagtcctatgacagcaataacaatatcgtcggtctcgacccggagtttgccgcgctgatcgcccaacatctgcaggccaaaccgcagctgatcgacaccaagttcaccagcctgatcctcggcatcggcaagaaatatgacgcggtgatctccgggatgtacgtgacgccggagcgccagaaacaggccgacgccatcccttacgccctctccggcgcgtcgatcatcgccctgaagggcggcgcggtgcagccgaaaaccgaagatgagctgtgcggtgtgaaggtcggtctgcaggcgggcaccacctgggtgaccagcctgaaaaaacactccgatgagtggtgcctgaaaaacggcaaaccggccatcaccattcaggagttcccgacggcgccggaagcctcccaggcgctgctgtcgaagaacatcggcgcccagcttgagattgccccggcggcgcagatcattgtcgacaagagccgcggccgcctggcgataagctctacgcgcctggtctacccgctgccgctggggatctacgtcgccaaaggcaacaccgagctggcggaggcgatcaaggccaccctggccacgctgaaggccaacggccaatatgccgcgttgatcaaaaaatacaacttagaaagcatcgattaagacaataagcactgcgcaacaggagtcagtatggcgttcgattggggatactttttttcattgtttagcattggggcattctggcaggcgtgcgtgaccgtcatcgtaatcagcaccttgtcctgggggatcggcctggtggtcggttttctgttagcctgcgcgaagctctcggcgccgcgctgggtcaagatccccgtcgaactctatatctggttttttcgcagcgtgccgctgatggtgctgctggtgtttgtctacaacctgccgcagctgtttccggtgacccagccgctgctcggggtgccgtttatcgccgggctggtgtcgatgaccgtcaccgaggcggcctatatggcggagatccaccgcggcgggctgctgtcggtggccaaggggcagagcgaggcgggccatgcgctgagcttcagctttatcggcatccagcggctgatcgtgatccctcaggcgtttcgcatctcgctgccgacgctgatcaatgaatacatcaccatcattaagctgagctcgattctgtcggtagtctccttacccgagctgctgctcaccggccagcgcttgtatgcgcagaatttccttgtgatggagaccctgctggcggtagcggtgtactacgtgatggtggttaccgtcttcacctggctgttccgggcgctggaaaatcgtctcgatattcagcgtaagcgtccgcaaaccctcagcgaggcggaatgccaggcgctgcgccagagcctgccggcgctgagcgaagagagcaacaccccggccgtcaatggcgcgccgccggcgctcgatctgcggggcattcgcaaatcctgggggcagcatgaggtgctgaaaggcatcgatctgcaggtggagaacggggaggtgatcagcatcatcggcccgtccggctccggcaaaaccaccctgatccgcaccatcaacgccctcgaaagccttgatggcggggagatcattctctacggcgaggactatcttaagggcggagctatcgtcgacaaacgccagatgcgcgccggggtgcggcgcatcggcatggtcttccagagcttcaacctgttcccccaccgcacggtgctcgacaacgtgatgctggccccgcgctatcaccagctgctggaccagccggtcgcccgcgagcaggccctggcgctgctcgaccgcgtcggcctgctggcccatgcccacaagtaccccggacagctctccggcggccagcagcagcgcgtggcgatcgcccgggcgctggcgctgaagccggacatcatgctgtttgacgaaccgacctcggcgctggatcccgagctggtaggcgaagtgctgaaggtcattcagtcgctggcccgcgaaggcatgaccatgctgattgtcactcacgagatggacttcgccctgtcgatttccgaccgcgtggtgctgatggagaacggcgtggtgcaggccgatatcgccccgcaggtgatccgcagcccgctggaggcgccttctctgcaacgaatccgtgaatttatgggagtacgctaaatggcaaccgagcaacacctgcgccagcagctggccgccgcctaccggctggcggcgctgttcggctgggaggataccctctacactcacttctccgtgcgcctgcccggcgacggcgagccgcgttttttaattaatcccttcggcatgatgtttgacgaagtcaccgccagcaacctgatcgtagtggatatgcagggtaaggtcgtagagggcgacgcgccggctaactcggcgggctttaccatccatagcgcggtgcatatggcccgggaagacgcccactgcgtgatccacacccatacgctgccggggatggcggtggccgcctgcgaggatggcctgctgcagctcaaccagatcagcaccgaattttaccagcgcgtcggctaccatccctatgaaggggtggcctttgacctcgacgaacgggcgcgcatccagcgctcgctggggaataatatcgccatgatcctgcagagccacggcctgctgtcggtgggccgcaccgtggctgacgcgttttacatcatgtactacctgaaccgcgcctgcgagatccagatggccgccgcccagctggcggccctcagcccgatccacaccatcgctccgcacctcagccagcacgcctgcgagcagctgatgggcgtggagcatgaacgtcaacaggtctggcaggcgtggctgcgccgtcttgaccgtctcgatacctcttacaaagactaacgcctatgtctgatatcactatcgtggtggattgtaacgacgcggatttcgcccgcgatatctgcgccgccctgcagcagtttcccgacgtcacggcgcttctgccccatcaccaggcggtgcgcgacgcccagtacgccagctgctggttcccggacccgcagctgttgacccgttcgccggggctgaagctgatccaggccgcgtccgccggggtcgatcatctgccgcccgcgctgttcgccagcgagatcccgctgtgccgggtgatcgatgaagattttcgccacggcatgttcgaatatgctctgtggagcgtcctgtggtttcagcgccatttcgaccgggcgctggcccaccagcgaacccaaacctggaagctctatccccagcgcgccgccgccgacttccatatcggcattatgggtctgggcgaaattggcggctatatcgctgaccagctggcccgcctcggctatcgggtctccggctggtcgcgcagtgaaaagcagctgactggtgtcacctgctatcgcggcgaggaggcgctcgaccactttcttgggtcgcttgacgggctgattaacctcctgccgctcaccgcgcagacccgaggtatccttgccgcgccgctgttcaaccggctacccgccggagcggtgttgatcaattgcggccgcggggagcatatggtcaatgacgatgtgctggcggcgctggagagcggccagctcgccggggcggtgctcgacgtcttcccgcaggagccattgccggcggacgatccgctgtggcgccatccgcaggtggtcatcaccccgcatatggcctctgcggcccctgccgaggtgatcgcccgccagttgctggagaacattcagcgccagcgccgcgggctgccgctgaagaacctggtcaataagcacgccggttactgatccccagccatactgccgctgctacgcttaatgggagatccacaaccagaaggcaggaacatgaagattgatttagcgggaaaagtcgcgctggtcaccgcctccacggcgggtattggcttcgccatcgccaaaggcctggcggagagcggcgcagagatcatcattaacgggcgcagcgagcagagcgtgaacgccgccatcgctcgtctgcaaaatgaggtgccgggcgcgaaggcgcgccccgccatcgccgacctcagcgacgccgacggcgcagcgcagctgctgcgggccgtgaccggtgtcgatattctggtcaataacgccggaatctatggcccgcaggatttctacgccaccgacgacgcgacctgggacaactactggcagaccaacgtcatgtccggcgtacgcctgtcgcgggggctgctcccggcgatggtcagtaaaggctgggggcgggtggtgtttatctcctcagaatcggcgcgcaatatcccggcggacatgatccactatggcgtcaccaagaccgcgcagctgtcgctggcccgcggcctggcgaaatatgtcgccggcagcggagtgaccgttaacagcgttctgccagggccaacgatttccgacggctttgccgaaatgctgaaagacgacgtggcgaaaaccggcaagtcgctggaggaacaggcgaaagcgtttgttatgacccatcgtccgagctcggtgatccagcgggcggcctcggtggcagaggtcgccaatatggtggtctacgtctgctcgccgcaggcgtcggccacctccggcgccgcgctgcgcgtcgatggcggcgtggtggatgatattctctgaatcccctttatgcaggggagccccctcccctgccgccttccagggcgctaaaaagcgcaaaatgttaaaaaacagccgcaaagtcgcacaaagtgaacaggaacatgtattcccaaaacttatgatatttgttttaaatataagttgtggtgtaaatgtctctgttacgaagcttgctattctttctcggcgcggcggtcgcggccgccctcgcggtactctgcctgtgggtggatattcgggtgtttggcaacgacatcccggaagtgtcgctcaccgaagtggtccaggagagcgtgctggccgttatcgtgctggttcatctgctgctggcgcggaaatatgcccacttgcgctatagcaatatcctcatcggcggcttctttctcgccatgctgatccgcgaactggatggcctgtttgatttactctcccacggcagctgggtgtggtttgccctgctggccaccgcggggtcgctgctgttgccgttgcgccatctgcgtcagaccctgtcgcagctggcggagtatacccgcaccccgtattacgggatgatgattagcggcctgctggcgattctggtcttctcgcggctgtttggcatgcacggcctgtggtacgccgtgctggaagagaactacgcccgggtggtaaaaaatacggtggaggaaggcagcgagtcgtttggctatatgctgtgtctgaccgccaccctcggctacgcctgctactttcgcggtctggcgcgacaggcgctgtcgccgcagcgctaaccgtggacgatagccaccgccggacatatctgccggtggtggcgcgccgccgcggttaaccgcgaattttccacttccgtttgagaacctctttgtcctggctatccagccactggttcactttctccagcagcgccgggttatctttactcatcatatacaccttgttgctggcggtaccggcgaacggcgtttcgttagcaacgcagaacacgccgggctctttgctctggtaatagtcgccttcaatcagatcggtcaccatcatatcggccgttttctgccgcagcgcctgcaggttatcgacattgttctgcacgcgaataatttgcgcctgcttgatgtgttcatcgacaaaactctggtttgtgccgccagggttgacgatcactttcacgtccggacggtcaattttttccagcgaaccgagccgcggggcggcctggcagttggctaaggcgatttttccgttcgccaccaccggatggctgagggcgaaggcttgcgcccgcgccggggtctcggtaaccccacccatcgcaatatcaaacttgtccgcctgcagatcggcggcgagcgcgggccagctggtgtagacgaagctcaccttgaggccgagcgtgcgcccgagatcgcgagccatgtccacgtcatagccctgcagttcgccggcggcattgcgaaacgccagcggcgcgtaatcgcccggcacgcccaccttcagttcaccgctgtgctcgatggattgcatatcgcgcgcctgggcgccgcaggtcattatcgccagcgtcagcgccagccccaccgtcagtctcatttcgccatccttaaagttatcgtttttcatgccagagtgaccggccgcatcagtcacagtatccgcagtgcgagccagggcattcatcctatttttaaacaccgggacatacaacccgacgtggggcaaaacgttaattaatcctctttctcgctgtgagcttgctggttgttttgactttcagtaaaatgccccgcagtgcattcatattttattcctggccatacgtttaatatattatttattatcgtttttttaccttcctcttatgcgttaatagttgaatattaaattataaccttctgattaataagtaaaaacacttcatgcaacaactttcgttaggatttttctaatgatcctgcttatcatcttatttactcccctcctctccagcagtaatacttggttacagaagcagtgtataaggaaatacattatgattattatcatttccgccaataagttttttattaacggcatccggtctctggttaacatgaccatgagtgctcaacgtcggtatagtcaaacattgtttctggataatatttctgacgtgaatgataaaagtctaaccatagccagaaccattatcgtggactatagccacccggacattcaacaattagccgcactgctctatcgtaaaaaaaagatcattcatggcgatatcgtttttgtcgttaaaagtgagattcttgccgatccagtcgaaaacattatcataaactctatttcgacgatcgtgcttgattatatagatgttacccaacggctgcagaaatacttacagaatgcgtctgatcatcgctgtattaaagtgttcagaaaatcaattagctcgctggacagttgtgtcaatattaaacttacgaaacaggaggactctcttctcccctatatcatctcaggtttaaataataagaaaattgctcaggccaccgaccttagcaatatgatgatcagtcactatcggagaaacatctaccagaaactcaatgtccgcaatattgcaggcctgtatcatttcctccactccctggaggggggataagttcgctttatggctatcacaacaacagagctaacggcttatgcagcgtcaatgagtatgcctggctattagcttccctgggtcacaacagaaggaattggctatgaaaatgaaatcactttgcctggcaatggcactcgtcggcttgacctcacactatgccgccgcggcggacggtacgctgtatttttcaggtacaattgtcaactcaagttgcaaactggcaagcggcaatgagaagggtctcattgaagttaagatgggcgctgttccgctgtctaaattaaaaaatgataccaatggcaccgggccagaagttggggtcaatattagcgtcaaagattgtgaagcgggcacgtactatattgtgctcgacggtgcttcagccaacgaggcgcctatcactaacgtactggctctcgatgcgggtaatcctacagctaaaaaagtcggcattaagctaaccgaccgcaataataccccggtcacgctcgataaacctttcgatcccaacgtcgacccgagtattacggtcaatgccgatggcaccggtaccttcaacctgaaagcctactactatacctgggataaagacaacgccgaagctggcgacggcaatgcgaccgccaggtttaccattatgcaggaataacacctggccagggacggcacgtcgcggataaggggtaacatatgaaaacgctgctggcagtgatcataggcgctttggcttttcagacccaggcggccattaccatcgatgcctcacgggttatttatttgggcaaagataaatcggccagtctgaaaattaacaaccgaagcagcaaaaactatatcgtccagacctggcttgatacgggtccggagacccccagcagcggcttacccattgtggccacgccgcccctggtcaaattacgccccgagcaatcggcacaactgcgctttatttactcaggaaccggtcttcctgccgacagggaaagtctgttttgggtgaatattcaggaggtccctcctgcgcctgaggaaaataacatcctgcagttcgcaattcgcactcgattaaaactattttatcgcccgcaaggaattgccacatcgctgcccaaagccgttgaaaatctgcagtggcagcaaagcgctaacacgttatcttttactaacaacagtccactgcatattacggttattaatgccgaggcgatcgacaacaaaggcaaaatctatcctctgaaaaactttatgttgctgccgtacagtcatcacgctgtcaatatcgccagcatgcagcgcttgcataaaatgaaatatattaatgattacggcgccgttgttgatattccaataaaaaaataaacgtcgcacctctttagggagatagagtgatggacgatagtaaattacgctattttgccagcgcatggttaatctccatcacgttaccggcagacagcgcggaacgctataatgcccagtttgtgaacggcatcgacccgctggcttttaatcagtttgtcgccagcgatggcgacgtcatgccgggcacctatgacgttaatatttacattaacgatctgctggtggatagccgccccgttcgcttctcagaggatagcgcacacggcgggttggccccctgcctgagcgcggcggaatatatccgctatggcgtcaagattgacgatgaccaccagccctgtttcgcgctgtcgcagacgatccgccaggcagagcaacagctggatatcgctaatcatcggctgatcatacatatccctcagcaatatattgagcactatcctcgcgactatgtttcccccatgcgctttgatgaaggtattaacgctgctttcgtcaactacagctattctaccgatgccaataatggcgacgggggcagccaccagtaccaatatctttcgctaaacagcgggatcaatattgcatcgtggcgattgcgcaataatgcctactggaataagttcagcggccaggcggataagtggcaaagcatcgccagttgggcggaaacgaacatcattccctggcgcagccggcttgtcgtcggccagaccagtaccgacaacagcgtcttcgatagcgtccagtttcgcggcgtacagcttggcaccgatgtcgaaatgcgccccagcagccagaccggcttcgcgccggtcattcgcggtgtggccaacagcaatgcccgggtggaagttcggcagaacaactatctgatttacagcgagaacgtcccagccggtccctttgagctaaatgatatcagcgccgttaaccgcagcggtgatttctacgtgaccgtcattgaagccgacggtagccagacgacctttactgtcgcctacaccaccctgccacagctggtgcgggcaggccaatggaattatcagctgtcggcgggtaagtatcatgacggcgctgacggctatgcccccgccctgatgcaaagctcgctctcttatggcctgaataataccttcacactatacggtggcgcccttgcagcggagaactatcgcgccggcgcctttggcgtcggtagcaatctgggggagattggcgccctctcagccgactatacgctggcgggaacgacgctggcgaatggccagcgcaagcagggagggagcgtgcgttttctgtatgctaaatcctttttatcaagcaagaccgactttcaaatcgcgggctaccgttactcaacggcaggttattatagcctcagcgatgcggttaacgagcgtcgacgctggcacaatggcctgtacgaaaatgattactggccctctgacgaagacgaaagctggctggcaagcgctccccaacactattacacgtcctggttttataataaaaagcatcgctttgatatttctgcccggcaaactctcggtaagaacagcgctttcttccttaacttcagccagcaaaattactggaatagctcaggaagcgatatctcgctgcaggcgggctttaacagcactatccataacgtgaactatggtctgtactatcagaatacgcgcagccacttcacccatgacgacaatagcatcacactgcgcgtttccatcccttttactctgcaagaaaaccgccggatcaataccgcatttaccctcgcccacagtaaatcgtctggcacgtccgggcaggctggggtaaacggcacgctgctcgatgatggtcgcctgagctgggccgtcaccagcgcctatgatgacaccagccatagcaccaacagcgccagcctgggttatctcggccagtacggtaatctgtataccggctacgcctacagcaaaagccatcgtcaggcgagtctgaatctgagcggcggcgtggtggcgcaccgcggcggcgttaccctctcgcaaccgctgggctcaacctttgcgctagtggaggccaaagacgctcagggggtagggatagagaatcagaccggcgtgcgcatcgatcccttcggctacgctgtcgtaccacaaagcgttccctatcgggtcaattctgtcgcgctcaaccctcaggacttcgatacctttcttgatgtccctaacgcggtagcggataccgtgcctacccgcggggcaatcacccgggtgcgctttgatacgttccggggatatagcgtgctgatccataccaccctcgccgacggcagctatccaccattgggcgcacagctctatcgcgccagtgggatcagcaatggtctggtcggcccgggaggagaagtttacgtcagcggagtcgattcaggcgaaaagctgcagatgaaatggggcgaaacgcaccagcaaagctgcgaaatcaccctgcccgaactgcgccaggagcctcagcaggcgacggcctggcgtgaattatccttaatctgcacagtaaccccctcgaggtaattatgcgccgacttagcgatacgttatttctgacatggctttccgttctgttcatgctgagcgccttcccggcgcaggcgctgacctgcaagaccacctcgtccacgatcagcgaagtcgtgaatatcgagagcatcattaaagtctccagcagcgagcttattgccaataaaaagatatgggtctccagccctattaccgccaccttcagttgcgaagataccgataattttccgaacggtgaaagcgcctatttctggctggatccggaaaataaagccagcagcttgcccgactttatccaggtaggcattacttacaacggcatcgactatctgctacaaaataaaaaatcggtggagattggcccggcgacgctgtgtgataaaagcgggaatacctgtaagtccccggccattgggcagacattcagcctggtttaccaggtctatatcatctcgacgggccgcagagtgaccggggaaggtaaaatagacgataacctaaaattgtcgctttttcaggtagatggccaaggcggtctacgcaacggcaccgctggcgccaactataatcttttcattaccggcctgaaccgtatcagaacaatggcctgcgtccccacggtatctatttcgccaagcgaaattaactttggcgatattcctgccggtaacgcccgaccgggctactatgaaaaaacacgcccctttaccgtcacctatggtctggtcaagcagggtaacggcagtgattgcgggaccgaacctatgcttgctacgtttagcaccactaatacgatacaggagagcgccattattttgccgcagcccgacagcggcttcggcattgccatctcgccaaacgccagcatgcatccccttattgagatgaatgctccgattcactttacgctggcaacgggcgcgaccctcgcgagcacctatacggcggggctgctctggttgtcgagaacgccgaagctggggcctttttccgcgaccgccaaaatcaccgtgacctttgaataacgccgccccaggctagttatactccagggcgaaagtcaccatgctgttggccgtaccggctcccaccgtggcgtcagtctgcacatactgggcgttgaaattgatcgcctcggcggtaccggcgctggcgccggtcacccttttcaggatcggcaagttgctggcctcattgatcttaacgctggtgccgtcgggcactgccgcaccggggttattgccgtaggtcagcttcacgccgacgccgctggcgctgttgctggcctggctcagggccagggtatcgctctccacgctgacgccgaaaaagccgatgcgcacgtcggtcggcgtcggacagaagaccggaatcgaaaagcgcttcgcctggccgccggtagtccctttgccatgaaactccccccggttaaccgtacccagactgacctggatcgtcgatgtcgctacctggcagctgccgctgctgccaatgtccacattcagggcggcgatatcgatgctgaccggcgcgctggcgacaaagctggcgcttgcgctggtctgctgttcaatggtcatctcccccacctgcggcagcggcggcgagttggtatgcgtcccgtccgccagttgcaccgttccggttttatagaaggttaccgcaatcctcaccgtggtttgctgctgcgtcatcagcgccgggagcgtcgcactgtcgcataccaccaccgactcgccgccggcggagtggctgccatcgatggcacgcatcgggccgccggcgcactggaagctgagggcgtaaccaatgccgtcgatagcgctggggtagacatgctgtccgttaatcaccatcggcgagccgccggttttcagctgcttatagacgatgcgtttggcgctcgccgtcggcagctgcaggtcgcaggaaaaagggatcccgctgccgttatccgccatcgcgctggtcatctgggtattgatcggcagcgtgggtaaatacttgatattaggaatattgaccgtggtctggccgatatttgcgcggcaggtttcagcccgcacgccgggaagataggcgctcagccccagcagaaagaggaaaggaagtagacgaaaaacagatttcatagccgcctcagcgtgtctggcacagtccggagacggttttcaccgtattcagactctgctgtgggttatccggaagatgaaaatgcagcgtgcagctctgcgactggttgttgacgatccaactcaccgccagggttccctcctgcggcacaccgctgagatacacctggccgccgtcggccaccatgccgcccggcggattgccgctctcctcctcctcgaccagccgcgcactggcgccaaacggtagcggcccctgggcattgcgcagggtaaacagcacccggttgccaatgtgggtctggtagttggccatcaccaccgcgccgccgccggggatcacggtctgcccctgctggtcgacgtcggtgtcgtcggccatcgactccgtatcgagggtaatgacatttttccggtaggcggtcagggagggcaccacggcatagccgcgccagtcggtgtgcacattgttgccgttttgcaccgccacgccggcggcccccggcgcccggacgatggcgaagctctcacccaccgtctggccgaaggtgacgccgtgcggatgcgcgaccaccgagccggcgcctccccaggtcaactggttgctggcggcgtcatggcgatagccgatctgggcgttgccgaagccgccgtggtagtccagggaggcgctgctgttgctgcctcgtccctggttgccataaccttgctgaaccgagtagaacagatttggccgcgtcggcaccgcgccatacagcgacatctgctgcgaggtatagccattgctgtccgaggtggtgttgtagctcaccgcgctgtcggacagcggaccacccagcggaatattgatattgaatgaccaggagcggtcatttttttgctggccgctggcgcgggtgtagtaatagcccacgccccaggagatccctttccaggcgctgtagaacccaaggtgcaccgtctcatcccgactctgccgatgccagtactcctgcgaccaggcggaaaccgccagactgcccaggccaccaaggctttgcgacaccgacagctcttcccggcgacgccggttgtctacttgcccctgggcgctttcaagggcgctggcttcggcaaaatcgtaatagccgcttgacgagtagcgatagctggcgaggctgaacgcagtgcccgagctgacaaaatttttctgatactgagcgcgcagcgaatggcccgtatagcgcttgcccgacggcgtacgggtgacggcctgggtgacatcccctcccagcgatccgaactcgccaaaaccgcggcccaggcccagcgcccacgcctgatagtcccgggccagctgcgtaccaccatagagggtgaatcccgccgtcaaaccgtagaacaaagtgccctgcagaaattccggcgagcgcaccgactcccccccggagtggtagcggccgacgctgagactgaatttgccgcgcccttcgcgcagcatatatggcaccgcggaatagggctgggtaaaggtacgcaccgcgccattgctctcggtcaccttcacctccagatcgccgctctgcgaggtggggtagagatcgctgatggcgaacgcccccggcgacacaaaggtctcgtagatcacatacccgtgctgagagacggtcactttggcattgctgtgcgccacgccacgaatggtgggggcaaagccgcgctggctgtccgggagcatttcatcgtcagacatcagctggacgccgcgaaactgtatgctgtcaaacacatcgccggtggtataggtatcgccgatccgcagcaagctcttcagcgagcggacatcgcgctgcagccaggtgctctgggtatcccagtgccggcgctgctggtcatactgcattgaggagatgttgcgcagtcgccaggcgcccaggttgaggccgctgcgtaaattgagatagtttgagcggctgctctccccttcgtcggcgttctttatttgcgcgccggaaaaatagtaatcgacaaacgcggccggcacgccatcgtcccagcgcgacggatcgacatagccgcggctttgcacgttcatcgccgcctggggaatactcagcgtcaggcgctggttagcgaagctgaaccgactgctggcgtcgggaataaacttctcgatccgggtgaaggtttcgccttcatgcagcgcttgaaaggcgggaaacgcgctgacgttgacgccatactccgccagctgaccgggcgtcagcaccgggcgcagctgcccgccatcgtcaacaaacgtgatatcagcctgatccagctcctggtcattaaccaccacggtgacaggataagtccccggctgctggccgccgggtttggcgaagtagtgcagatcggaggtttgctgctgcgggtcagcaaactccagcgccgccgggtcaaaatagtcgtcggccagcgcccggctcaacggactgagacaaaacatcatcgtcggcaccgtcgccagcgccaccgcccgcccggcggtaacgggcaacaaggcatactcccgcaccctggctgttgttattcttttcatgctggcgccgtccggtaagctcatcaaaaaggggaattactgctgggcgaaatcgctgacgccgccgtagtcattaatcgcccgccatttgacggtgccgtgcccgctcaccggccacgttttctcgccgaagggagccaccatgccgggatcgtcgatgctttgcccgcccacttcgacggcgtaaaaagagacgaagtagggagtgggatttatcaccgtcagccgaccgccggactggctaaacttcagctgctgccaggcctttgccgggtcgcccgccaggtcgttggggcgatagaagattttgaatttcgatttaatattcacctgcagcttattcacctcgccctgaggcgtcggggcgatacttttgacgttcagccagaagaccgattcacggtcgcggggcagcgaggcgccaataaagttaatccgcagaacgttattttgctccggatcgagacggaacaagggcggcgttacaatgaagggcaccctggccttatcgttttccgcgtaattttccacccacgactgcaccagatagggcgtatgggtatcggcattggtgactgaaatagcggcttcacgcttcccttcctgataaatcacacgggttccacccatgacaataccggcctgcgctgccgtggtgcacagcagaaaagccgcaacggcaattattttcttcatcatgacttaccatcaggtaaaagttgaacagacaacaaaataaagcagtgaataacagagccagtactcgacgggataattagcaaaaacaactataccgtcacgaatatatttcgtgacttcatgacaattaacacattagctatctgtaattaatcaagacgcagtgggctgactctgaataacgcgcaattagatcaattataaatcatattgaaattagctgtaccgtcggctttacctgccgtcacggtcgccgcggtggagatatagtcggcgtaaaactcgaggtcggcagagccggtgccgccgctggtacccggagtgaccgtctgtttggctgacgttttaccgaggctgacagccgtcgaccgatcgtgctcatacagcttaatcgctacgccgctggcgccgccgttgatggccagcagggagttatcagactgatcgcgcgcgccgtcaaacagcacggcgaccgtagtcacgctggccgggcaatctttcactttgatatggaagggggttttggtggtttcaaaaccagtgccggtaaaatagttgctggcccatttgcccagatcaaccttctggccattagaactactatcgacgttgcaagagctgtcggtgattgacccattgaagatgacctgcccgccggcgccttccgaactggtgcccgagtcaggattgatagtgttggccgcggtagcctgcaaggctacgccagaaagcagcgttcctatgaggatggttataaagcgaggttgttttttcattatttatctcatcgttaacgaacatattttccatcatcgacaatagccccaaagctatcgcgaaacggctcgtcagctcctccctgtaaatgtacgttgcgttccttccgcaggatattaggcacatccccctctactctgccttatttcgccaatagatggccatgaataacaaacagaagaaaaaagagttattttgatgtgcgaaataaatatattacccgaagtatcaaaaggcaacccggggagatgttaactataagttaataactatgttcgccatatatttaatttttgaaatggcttttcaatgttaatttacatatctatacaaaagaaattcaaatacctttaaacaacaacagatcaattcaattaacaaatttaaagacaattgttcaaaaattcgtcttgttttattgtgcgctcgtcagagcgtacacaaaaattaggaattttcctggtattaatattcataatttctacacaaacggcgccagggtgcgccacctccacccgctaatcccttattatggaagtgtttttattttcaagtgaaagccaatacataagtgacataaatacatgggcgctgccgccggcaaaataaccaccctcttcgaatggttattttgaagttaaaaaaaatccgcaacccgaatggattgcggactgaggatcggtcagaaatgagatggacttcagaacaggcccagcggcgcggtgccgtagctcaccagcaggtttttggtttgctgataggcatccagcgccatcttgtgcgtttcccgcccgacgccggactgtttatagccgccgaacgccgcatgcgccgggtagacatgatagcagttggtccacacgcgaccggctttaatgccgcgacccatgcgataggcgaggttggtatcccgcgtccacaccccggcgccgagaccaaactgggtctcattggcgatagccagcgcttccgcttcgtccttaaaggtggtcaccccgatcaccggcccaaagatctcctcctggaaggaacgcatatcgttgcgacctttaatcagcgtgggctgaatataaaagccattatccagcgccggcgcgatagccgcccgctcgcctccggtcagaatttgcccaccctcttcccgggcaatctgaatataggagaggatcttgtcgaactgctggcgggaagcctgagcgccgatcatggtgtcggtatctaacggatcgccgcggcggatctgcgccaccttctccatgacccgtgccataaagggctcatagatggattcatggatcagcgcccgcgacgggcaggtacagacctcaccctggttgaagaagccgagcaccagcccctccaccgccttctcaataaattcctcttctccgtccatcacgtcggcgaagtagatgttgggcgatttcccccccagctcgacggtgcaggggataatattttccgccgcgcaggcgagaatatgccgcccgaccggcgtggagccggtaaacgccagcttggcgatacgcttgctggtggccagcgcctcgcccgcctctttgccgaaaccctgcaccacgttaagcaccccggccgggaacagatcgccgatcagctccagcagcagggtaatgcttagcggcgtctgttccgccggcttgagcaccacgcagttccccgccgccagggccggggccagcttccacgcggccatcagcagcgggaagttccacgggataatctgcccgaccacccccagcggttcatggaaatgataggccaccgtggtttcgtcaatctcggcggtgcttccctcctgagcgcgcaggcagccggcgaagtagcgaaaatgatccaccgccagcggcaggtcagcattcagggtttcgcggatcggtttcccattgtcccagctctccgccaccgccagatattccagatgctgttcaatacgatcggcgacctgcagcagcagcctggagcgctgttgcactgaggttttaccccacgccggcgccgcgcgatgggcagcgtcgagggcgaagtcaatgtctctggcatccgagcggggaaactgcgcaatgttgcagccgtcgaccggcgaagtattcataaagaattcaccgctcagcggctcgacaaatctaccgtcaataaagttgccgtaagccgatttaaatgaaaccacggcgccgggctggccaggatgtgcataacgcatcgcaaatctccttctgtagggttgagacgcagcggcatattgattttttaagtttgccgccgaacgcttctcactttgcaggggttatgccagttttttattttctttaaatatttttatttattaatacgttgccttcactaaccgagcagatggtcagccactgtcgcacgggtttccacttatgtgttgcaaatcgcaacaccaaataaaccaaatagctacaatattgcaacacagcaacatcgacccagaggtgccctgtggcaggcaatccctttcttctcgcaccagaggttaatgcgaatcccctgctgagcgattcgtggtctcgctgccagcgctacgggctggatcccgccaccgaggattttccccgcctcggtgccggcgagctggcggaccggctcgccagccaccgaggcctgcagcagctggcgcagccggtggtggaagccctgtcgcgccaggtcgcagacctgcagtcggtggtgatcctttccgaccccgacggcctggtgctgcatactctcggcgatacccaggcgctgcaaaaggcccagcgcgtggcgctggctcccggcaatctgtggagtgaaagcgggcgcgggaccaacgccatcggcaccgcgctggcgattgacgatggctgcgagatcgatggccgtcagcactttcttacccgcaaccagaatctgtactgcgcggcgatgccgctccagcgaccggacggaagcatcgccggggtgctggatatctccggcccggcgaattttccccaccagcacacctttggctgggtaaaagcggcggcaaagcaaattgaatatctgtgggtgaaacagagtctgcatcctgagcagtggctgatgagcctgcaccggcaggtggacaaactcgacagcgtcgaggagctgctgctggtcttttccgacaacgtcctcaccgccggcaaccggctggcgatgcgcgagttcggcctgagcgcggcgcagtttggccagctcacctttgcctcgctttttccgacgctgacgcaaacggcggtcagcgtcccgctgccgctgaccacgccgcagggccgctaccactatcgcctgcgggagcccacccgccgccgggtggcggtaagcgccccgccggccatgcatctcccctttaccagtccgcgcgaaggcgaaaagctgctgcggctgctcaacgccggcatcgccctgtgcattgaaggagaaaccggcagcggcaaagagtatgtcagccgcacgttgcaccggcacagccgctggcgcagcggtaaatttgtcgccattaactgcgccgccattccggaatcgctgatcgaatccgagctcttcggctaccagccgggggcgtttaccggcgccagcaaaaatggctatatcggtaaaatccgcgaggctgacggcggggtgctgtttcttgatgagatcggcgatatgccgctggcgctgcagacccgcctcctgcgcgtcctgcaggagaaagaggtcgctccgctgggcgccagccgcagcgtgccggtgaatttcgccttgatctgcgccacccaccgcaacctgacccagcgggtcagcgccggagaattccgtgaagatctgctgtggcgcctccgggaatacgccctggcgctgcctccgctgcgcgagtggccggcgctggaaacctttatcgccaccctgtggcacgacctgggcggtgcttcacgccgggtgacgctttcaaacgcgctgctggttcacctcagccagctgccgtggccgggaaacgtacgccagctgcagagcgtcctgaaggtaatgctggctctcgccgatgagggcgacacgctgacgcccgacgcgctgccggaggcgtatcgcgccgcgcctgcgccgttgccgcgcgggggattgcaggcccatgatgagcagttgattgtcgataccctggccagggtcaacggcaacgtcagccgggcggcgcagatactgggtatcgcccgcagcacgttgtaccgccgtgccgcccgtgccggacggcctcgtcgctgaggctatggcgtaaagcgcgccggtagcttgcacgctgtcggaaaacctccgccgccatagatggcggttatttctctctgcgctaaccaggtgttgcggtaagaggtagcccttcccgcagggcatcgatcgccgcccgcgttttttgcggcagccacggcccctccggccataccgcgtggatggcgaaacgcacctgagcgctgggcgccaacacctgctgcaatgtcccatcggcaagcgcctgcgccaccagccagtccggcagccaggcgatgcccatcccctgctgcactgccgccgcgatggcggcaaaatcatcctgtatcagccacgtctgcggactgaagcgcacttcgccctgctgcgggtcatacagttgccatttttgcagctggccgttgtgcagatagccgagggtacggtgctcgttcaacccggcaatagtctgcggcgctggctgctggcgcaggtactccgccgccgcgcacagcaccatgccgtgctctcccagcgcccgggcccgcagcgacccggtatcggccaggctcccgatacgcaccgcaagatcaaacccctcctccagcagattgacctgccggtcgctgtagtggagctcgagcttcagtaacggatagcgctggctgaggcggaacagcagcggtgccacgcagcgctggccaaacagcaccggcagcgacacccgcagccgcccctgcacctcatctttgccgcgctgcagcgtctcttcggcctcgcggatgcgctccagcgcttcccggcactggagatagaattgctccccctcttccgtcagcagttgccgtcgggtggtacgctggaataacgccacgccgagacgcgcttccagccgggcaatggtttttcccaccgccgaacgcgtcacatggaggatcgccgccgcgctggcaaagttgccgctctcgaccacggtgacaaataccgggatcgcattcagatcgtcgcgcacagattggttccttacgggatacaatagggaaaaataatgtcactcctgagacaaaaaagacagtgttagtctttgcttctatctttcatttgaggcactcatcatggctaacgttctggttttaaaatccagcattaatggcgaaacatccctgacaaatcagttgattaacgaatttctcgcggcgcgccaggcggcgggacacggcgatcggctcaccgaacacgatctcagcgccatggcgctgccaacgctggatcgccccctgttcgccgccctgcgcggggcagtggatccgcagcctgctatccgcgaggcggtcgccctctccgaccagcttatcgccgagttaaaggccagcgacctgctggtgatcggcgcgccgatgtataacctcaacgtcccgaccgatctaaaaaaatggttcgacctcgtggcgcgggcgcgggaaacctttcgctacaccgagagctggccgcaggggctggtggagggcgtccgggcggtggtcgtcagcagccgcggcggtattcaccagggagaaactaccgacgccgtcacgccctatctgcgcgcggtactggggctgatggggatccaggaggtggaatttatctatgccgaagggctggacaatcgcccgcatggtcgcgacgccgggatcgccagcgcccgggcgcagattgcccggctcgccgttcaggcctgagtcgtggagaaattgtgctggcgctggcggcctttttattttagagttatctaaatttagacaaagctaaaataaatgaccacacctgaagacctgcaggcccgcgccggagaagccgccgcgctgatgaaagcgatgagcaatcctcaccgattgctgatcctgtgcatgctgtgcgatgcgcccagggccagcgccggcgaactcgcccgggctacagggctgagcccctccgccacctcgcaacacctcgcgcggatgcgtgacgaggggctgatcgacagcgagcgcgacgcccagcgtatccactatttcattactcaccctgcggtacagcaggtgatcaatacgctgaaaacgctctattgcccgtgaggatcctatgaccatcgccaccttaactcccgccgaggcccaggcgcagattgcccagggcgccagactgattgatatccgcgatgcggatgaatatgcgcgcgaacatatccccgatgccgagctggtgccgctcgccactctgaccagcggtgcgcccctcaatgcccgggccggagagacggtcatctttcactgccaggcgggttcccggacgcagaataatgcgattcgtctggccgcggccgccgcgccggcgcagacctgcctgctggcaggaggaattcaggcgtggaaagccgcggggttgccggtagtggaagattcatcgcagccgctgccgctgatgcgccaggtgcaaattgccgctggcgtcctgattttactgggggtgctgctgggctataccgttaacggcggctttttcctgctcagcggcgcggtcggcgccgggctcaccttcgccggcgtaaccggcttttgcggcatggcgcgtctgctggcgaccatgccgtggaaccggcgccagggggttaaaacgcgctccagataagccaggcaatgccgccgaagagcagccatttgacgatgtaatagaccgtcttattccattttttcaaccgtttaccaacaatacggatctggtaaatatagcgaaacgcccggttaatcccgccggtgcgatcgccgatatcgttgggcgccgaagcggcgctcatcagatgacgtcccagccagtggttaactttctgcgcccagcggtagcgcatcggccgttcaatatcgcagaacagaatcaggcgattctcaccactggtattttccgcatagtggatataggtctcatcaaacagcacgccttctccatcgcgccagctgtaacgctggccatccacctcaataaagcagcggtcatcgttcggcgttgccaggcccagatgaaagcgtagcgagccggcgtaggggtcgcgatggcgcggcagacggctaccgtccggcagagtggcaaacatggccgctttcaccgacgggatatcgcgcagcagcgcggtagtttgcggacagagctggctggcggaaggatgggcatcctcataccatttcagataaaagcgtttccagccggttttgaaaaatgagttaaacccggcatcgttatatttatcggccgctttaatctgctccagctgctgaaggtggagaccttcgtcgcgaataacctgccagttttgctgcaatatcgccagctcgggaaacatctccggccgcagataaggcgtattcggcacgcgggaaaataaatacataaatccattcagcggcgcggtaaatgtggaatggtcggagagctgccgccagaaacgatagcgcacccgtccgcggtaatggacatacagtacagcaataacaatgatcaacagaatgatatacttcatggtgtctttcctgacctgattggtggtaaccctaccctcgccgtccccctttctcagcagcggtatggcgccagcaaaacattaacaatgttaatacatataactccaaattgttttaacaaaaaacagcacgcccggtgttcagtgagcgggcgttgagctatggtttaggtttatccatggtgttaacagtgaggagtgaattatgtttgctgtcggcgatctggtacaaccccgagcgggcggaccaaaactgaaagtggtggaagtgcaaggggagcaactggtggtggttcaggccgcacaggagcagggagagcgctattcgctgaagtcggacgaggtcacgccgtatcaggaagagggagacttcggcgtctgctaaagcccctcgcttaaagtcataaggccaggccggtgggtctctcaccaccggcctggcgctggcccgaaggcgttaaattaaaaagctatccagcgatttaccctgggcgacagcctcggcaatcggcttcggcattcttccctgtccggtccaggttttctctgcgccagtatgatcggtataacgatatttcgccgggcgcggttgacgctttttgcctcccgcctttggcggctgaatatcggccaccagctcgtcaggagaaataccgtcggcgcgcatcagttcaagccaggtattcactttctcctgatattcagcctgctgctgagctgcctgctgctgttgcgtacgtttttcttcagtgacgatcctgagcttttccagcatctcttcaagcacgtcaatggagaattcacgggacagggcacgcagtgaacggatattattcagtttgtgtaacattgaagacataaaattaaaaaattccaaatagcaaattaaaagatacaacgcggcaagtgtaatagaaacgtttatttatttccagccttcggttgtccagataaatatataaggtggatattagcggttatcccctggaactatattggcaaatacctgagcctttttcataagcacaggcaaaaaagagagtgaataaataaaaaaggcagaatgacgggaaaaaccaccgttctcgccaggaatattagctttatggtcagcgggttacctgctgttcatacgtggcctcactgatacatacctttggccacagtgaatagttaatcagaaaatgggaataaaacaacaattcgcaattcagaatttttcaccataaaaaagcgacttacggcataaaaaatcctaaaagagagcggaatcacacactcgcgtgatgttgcgccatggttggctatcaggcgccgttccctcggccagtctcgatttcgcaatcaagagtaacacattgataaatattgatatttgcaaaaacaggaataaaagtagcgtaacgaacaaaaaacaaaccagcgcagagtattttatcgacaaaaaggcgataaataaaaatttatagctagttgccacttttaatgcagagatatactctacgcacatcaaaacaggcagcccaaaaacgctataccaacgcgcatttttcggcgttaatgacttcattttcgaggagcactccgatgttctctgcgcactcccgcttgcggcatgcggttgcagacacctttgcgatggtggtttactgcaccgtcgtcaacatgatgatcgaaatttttctctctggtatgacgtttgagcagtcgttatcgtcgcgtctggtggcgatcccggtcaacattattattgccgtaccctatgggatttatcgcgatttcgccatgcgtcaggcccggcgcatcagcccagccaggtggatgaaaaatatggccgacgtgctggcctacgtcacctttcagtcgccggtgtatgtcgctattctgtggagcgtgggtgctgactggcaccagattgtcgccgcggtgagctcgaacctggcggtatcgatgatgatgggcgccgcctacggctacttcctcgactattgccgccgcctgttccgcgtagcgccctatcagcaggcgaaggcctgaccaacgcgttagcagcgactggctctgccagtcgcctcttcccgccagcccgcctcgcctggatccttaaatgcctatcgccgtattaattcgtcgacattgccggctgggcttcgccaaatagcccattcagaaaacgctcaagcgccatgcgtgagctaaatccatgcggaataccataatgttgttgcgcatccccggctaaatacagcggaaactgttcataatgatcacaggttttgatatctgaagccggttcggccagcatattgctgcgctcttttaacgccggatgaataactaacgctgttcgccccatgcgcgcttcgcggttcacataaacataattatcgccgcggcgatagccgtacgctttttgcgtcacaacatccatggtgaagccggctttttcaagaacacgcgccacctcatcgggtcttaaatacatactgattcctcgttatcttttaccgcacattgaccttaccttattcattaaggacagtgctttcggaaaattccagaaaccacaacagtaagcataattcaaaatcttgtcctacacttactcactcgatggaattaagggagataacgatggctaaccatgtgaaccgcaacaattttgacgagaacgccgaagatattcataacgatgtcagccaattagcggatacgctggaagaggtgctgaaatcatggggcagtgacgccaaagaggaagcggaagcggcgcgtgtcaaagcgcagtcgctgttaaaagagactcgtgcccgccttaatggccacaaccgggtgcagcaggcggcgctggatgcgcgccaggcagcgtgcgatgcgctgggctgtgccgatacctacgtgcgcaataaaccgtggcacagtgtgggcgccgccgccgccgtcggggtatttattggcgtattgctcaatttacgtcgataatagcttaagcgtcggctgccgccgcgcgattggcgcgcggtagcccgcgagctttacggaaggcaatgaagataacaaatacgcgtcagcccctgcgcgcctctggccgcaggggtttttctgcttccccgacttaagcgccatcaaatcgcaatcgcctctctcagccgtcgggcaagtccgtcagccatcgccggcgaacgtatattggtaaaactcatcaataatcccccctcgcccgcgtggcgaatccgccagtcgctcagcgcctgcaccgccagcccggccacaaccgcccgccgcgcgagcagccgatcgtcgccgctgaccgacataaccagttgtattccccccagctgcggtgtgacctgaaagccctgcgcctgcagagccgactccagccactgtctacgctggctatagctggcgcgcattttcttcaaatgacgccaaaaatgtccctgctggataaaatccgccagcgtctgctgccacagggtgggaacggtgcaggattggcgctccgcggtctggtgaaaacgcgccaccagcggggtcggcaccaccagccaggcggtgcgcagcgccgggaacatcgacttactgaaggtgcccgcgtagatgaccctctgcggcgcatcaaggcttttcagcggcggcagcggtttgccgtgatagcgaaactcgctatcgtaatcgtcctcaatgatccacgcgtcgcgctccgcggcccacgccagcagctggcggcgtcggggaagcgacagcgcgacccccagcggactctgatgggctggtgtgagcagggcaaatcgcgcctgcgggtgatgacgctggccccagccgacgtccatcccttcgtcgtccacgggaatcgcatccaccgccagctgcccagcctcgacgaccggccggataaagggataccccggatcttccatccacatatgctgtcccggctgcgccagggtacgcaggataaggttcatggaggcggcatagctgccggtgatcaacacctgatccggctgacagtcgatactacgcgacaggcgtagataatcgacgatagcctggcgcagaagcggatcgccgccgggatcgccgggtgcaagatcgaaccgcgactgcgtccgcagccgacgccccatcacccgcgcccactgcccgcgcggaaagagatccagcgccggcagccccatctgaaacggcagcggctccgtcggcgcggccggttgcactggcggtaccggcgccagctggcgcgggctgagccgctcgctgacaaaggtccccgcctgcccacgccgctcgagccatccctgggcgaccagctctccccaggcgttttcgatggtcgcccgggagacgccctgctcctgagcgtacacccggctggcgggcaaacggctgcccggggtcagttcgccacgttcaatcgccgatttcaactggcgggcgatacgctgataaagcgggaggttaattgcttccattatggtctgcttttttcatcagaatatggctatcttttgcagtccattatagtgctattttggctgccgtcttagagaggagaacaccatgaaccaattacgtcagccattcagtgaactgagcccggaagtctataaagggctggtacaggccagcatcgcgctggagaaaagcgagctgggcaacgccctggtagagctggtttatttacgcgtctcgcagatcaacggctgcgccttctgtcttgagaaacatagccaggcgctgcgcaaaggcggcatggcgcaaagcaaactggatgcccttgcgggctggcgggtaagcgcccactttactccggccgaacgcgcggcgctggcttgggccgagtcggtcaccgacattgccgccagccatgcggaagatgaggtttaccagccgctgcgcgaacattttaccccgcgtcagataagcgatctgaccttcgccgtcagtctgatgaacgcctttaaccgcctcgccgtggccatgcgcctgtagttccgcacagcctcccccctcctccgccgatctatcccggcgggggactcgcttgccaaaaacgctatatattgagtggttgaagttttaaataactacatctagtatttccttatcgaatggcccactacgttcgacgctatgtttagcgccgtgctgttatcttaaaaggaaatacgaatcatgcgcattattatttacactcgaaatgactgcgtgcagtgccatgccacccggcgagccatggagagccggggactggcctttgaaatggtcaacgtcgaccagcagccggatgccgccgacaccctgcgcgagcagggatttcgccagctgccggtggtgatcgccggtgagctgcgctggagcggcttccgcccggatatgatcaatcgcctgcgcccctcctttacggcggccagcgcatgagcctcatcgtctacttctccagccgttcggagaatacccatcgctttgtgcagcgcctggggctgccggcggtgcgcatcccgctgaacgagcgtgaacatctgcgggtagacgagccctatattctcatcgttcccagctatggcggcggcggcaccgccggcgcggtaccgcgtcaggcgatccgctttttaaacgacgtgcataaccgccagctgatccgcggagtgattgccgccggcaatcgcaactttggcgacggctgggggcgtgccggagatgtcatcgcgcaaaaatgcgccgtgccctatctctaccgcttcgagctgatgggaacccccgacgatatcaacaccgtgcgtaaaggagtcagcgaattttggcaacgacaaccgcagaacgtataaccgccgccgtggattttcacgccctcaacgcgatgctgaatttgtacgacagcgagggccgcatcccgtttgaaaaagatcgccaggcggttgaggcctttatggcgacccaggttcagcccaacgccctcaccttccccagccaggaggataagctcagctggctcgtcagcgagggctattacgatccgcaggtgctggccggctatgaccgcgggtttgtgctggcgttgttcgcccatgcccggcgcgctccgtttcgctttcagaccttcctcggcgcctggaagttctataccagctatgcgctgaagacctttgacggcaagcactacctcgaggatttcgccgaacgcagcgtgatggtggccctgacgctggcccggggcgatgaacagcaggcgcggcagctgacggaggagatactcagcggccgctttcagcccgccacaccgaccttccttaacgctggcaaacagcagcgcggggagctgatctcctgcttcctgctgcgtattgaggataatatggagtccatcggccgggcggtgaactcggcgctacagctgtcgaagcgcggcggcggggtggcctttttactctccaacctgcgcgaggccggggcgccgatcaagcgcatcgaaaaccagtcttctggggtggtgccggtgatgaagatgctggaggacgccttctcctatgccaatcagctcggcgcccgccagggggcgggtgcggtctggctgcatgttcaccatcccgatattttacgctttcttgatacccggcgtgaaaatgccgatgagaaaatccgcatcaaaaccttgtcgctgggggtggtgatccctgatatcaccttccagctggcgaaagaagatgcgcagatggccctgttctcgccttatgacgtcgaacggctgtacggcaaacctttcgccgattgcgccatcggcgacctctatccgcagctggtggccgacgagcgggtccgcaaacgctggatccgcgcccgcgacctgttccagcgcctggcggagatccagtttgaatccggctacccgtacatcatgtttgaagacaccgtgaaccgcgccagtccggtggccgggcgggtcaccatgagcaatctgtgttcggagatcctgcaggtcagtacgccgtccgcctataatgaagacctcagctatgcgcatatcggggaagatatctcctgcaacctcggctcgctgaacatcgcccataccatggactcgccggatttcggccgcacaatcgccaccgcggtgcgcgccctgaccgccgtgtccgacatgagcgacattcagtcggttccctcggtggcggccggcaacgcggcctcccacgccatcggcctggggcagatgaatctgcacggttacctggcgcgggaaggcattgcctacggcagcccggaggggctggacttcaccaatatctacttctacaccgtgacctggcacgcgctgcacacctcgatgcagctggcccgcgagcgcggccagcgcttcgccggcttcgagcagtcgcgctacgccagcggggcgtacttcgacaaatatctgcaggaggagtggcagccgaaaaccgaacgggtgcgcacgctgttcgcccgcgccggcatctctctgcccgaccgggaaagctggcgccagctgcgcgacgatgtcatgcgctatggcatctacaatcgctatctgcaggcggtgccgcccaccggctcgatctcgtacatcaaccatgccacctccagcattcacccgatcgtctcgaagattgagatccgcaaagaggggaaaaccgggcgggtgtactaccccgcgccatttatgaataacgacaatctggccctctaccaggatgcgtatgagatagggccggagaagatcattgacacttacgccgaggcgacgcgccacgtcgaccaggggctgtcgctgaccctgttcttccccgataccgccaccacccgcgatatcaacaaggcgcaaatttacgcctggaagaaaggcatcaagacgctctactacatccgtctgcgccagctggcgctggaaggcactgaaattgaaggctgcgtgtcctgcgcgctgtaaggagaacaggatgacccatttaacgcgcgtcagcgcaatcaactggaaccgcattgatgacgataaagatcttgaggtctggaaccgtctcaccagcaacttctggctgccggagaaagtgccgctgtcgaacgacattcccgcctggcaaaccctcagcgcggcggagcagcagttgaccattcgcgtctttaccggattgaccctgcttgacaccattcagaacaccgtcggcgccccggcgctaatggcggacgccttaaccccgcatgaggaggcggtgctgtcgaacatcagctttatggaggcggttcatgcccgctcttacagctccatcttttccacgctgtgccacagcaaggaggtggatgccgccttcgcctggagcgaaagctgcgatcccctgcagcgcaaggcgcagctgatgctgggttactatcaggccgacgagccgctgaagaaaaaaatcgccagcgtgttcctcgaatcctttctcttctactccggcttctggctgccgatgtacttctccagccggggaaagctgaccaacactgcggatctgatccgcctgatcattcgcgatgaagcggtgcatggctattacatcggctacaagtaccagaaaggactggagatcgtcagccccggcaagcgcgaagaattgaaaaatttcgccctcgatctgctgatggatctttacgacaacgaactggcctacagccgggagctgtacggcgagagcggctggttcgacgacgtcagcgctttcctgtgctacaacgccaacaaagcgctgatgaacctcggctacgaggcgctgttcccggcggagatggcggcggtcaatccggcaatcctcgcagcgctgtcgcccaacgccgacgaaaaccatgactttttctccggttccggctcctcctacgtgataggaaaaatggaagagaccgccgacgacgattgggacttttaaccgtactttcaccaggaatatcgcaggcggattcctggtgattaatttcacaaaatagcgtttaatccaccaaatattctctccatgacctaaccgtcatcacttcgtcatatttagcagaaaaccggtccatttcagtcgaattatccaaagataatcaaaaaatattaccaacaacaaattaccgcccagcccttatatcacgggggcttagccacagttgtccccatctgattttgccgagagtttgccattgagggttgtcacagaatctgagtatgttagggtgtaaaaagatcataatcaccatcgggtatcatatcgcaataaacaaataacaggaacttctctattgcatggcaattaaattagaaatcaaaaatctttataagatatttggcgagcatccacaccgtgctttcaaatatattgagaaaggactcaacaaagcgcaaatactggaaaaaacggggctgtcgcttggcgtcaaagacgccagtctggccattgaagaaggcgagatattcgtcatcatggggctctccggctcggggaaatccaccatggttcgccttctcaatcgcctgattgaacccacccgcggccaggtgctgattgacggggtcgatatcgccaaaatgtcggatgccgagctgcgcgaggtgcgtcgcaagaaaattgcgatggtttttcagtcctttgcgctgatgccgcacatgagcgtgctcgacaacacggcgtttggcatggcgcttgccggcgttcccgccgccgaacgagagcaaaaagcccgggaggcgctgcgtcaggtggggctggagaattatgcccacgcctggccggatgaactctccggcggcatgcgccagcgcgtcggtttagctcgcgccctggcgattaatcccgatattctgttaatggatgaagccttctctgcgctcgatccgctcattcgtaccgaaatgcaggatgagctcatcaaattacaggcgaagcatcaacgcactatcgtctttatttcccatgaccttgatgaagccatgcgaattggcgatcgtatcgccattatgcaaaatggcgaagtggtccaggtcggcactccggatgaaatattaaataatccggccaatgattatgtgcgcaccttcttccgcggcgtggatattagccaggtattcagcgcgaaagatattgcccgccgcagcccggttggcctgattcgtaaaacgcctggttttggcccccgttcggcgctgaaattattacaggatgaagaccgggaatatggctatgtcatagagcgcggtaatcgctttgtcgggattgtctcgattgattctctgaaaacagccctcagcgccgggcaggggatcgaggcggcgctgattgacgccccgctggcggtggaagcgcaaaccccgctcagcgatctgctctcccacgtcggccacgctccgtgcgccgtgccggtagtggatgaagaacaacaatatattggcatcatttccaaacggatgttgctccaggctttagatcgcgagggggtgaatcatggctgatcagaccaatccatggggcagcgccccgtcaaccgacagcgccgcgcaggctgccgacgcctggggtggtgcctctactgccgcgccggctaatggcggcggcgccgactggctgcacagcgccccggcgccgcagccggaacagttcaatatcatggatccgttccataagaccctgatcccgctcgacagctgggtgacccacgccatcgactggatcgtgctgcacttccgtccgctgttccaggggatccgcgtgccgatcgactacatcctcagcgccttccagcagctgctgttggggataccggcgccggtggcgattatcgtcttcgcgctaatcgcctggcagatctccagcctcggcatgggggtcgccactctggtatcgctgattgccatcggcgccatcggcgcgtggtcgcaagccatggtcactctggcgctggtcctcaccgccctgctgttctgcatggttatcggcttgccgctggggatctggctagcgcgcagcccgcgggcggcgaaaatcatccgcccgctgttggatgccatgcagaccacgccggcgttcgtctatctggtgccgatcgtgatgctgttcggcatcggcaacgtaccgggcgtggtggtgacgattatcttcgccctgccgccgatcgtccgtctgaccatcctcgggataaaccaggtgcctgcggatctgatcgaagcgtcgcgctcatttggcgccagcccgcgccagctgctgtttaaggtgcagctgccgctggccatgcccaccattatggccggggttaaccagaccctgatgctggccctgtcgatggtagtgatcgcctcgatgatcgccgtcggcggcctcggccagatggtgctgcgcggtatcggtcgcctggatatgggcctggcgaccgtcggcggggtggggatcgtgatcctggcgattattcttgaccgcctcacccaggccgtcggtcgcgacgcccgcagtcgcggcaaccgccgctggtacaccaccggcccgctggggcttatcactcgccctttctgtcgataagtcgataacagcgccgctccccgacaccagccgatgcccgggagcggcccttcccgttaaacaataagaggaaccaccatgcgacatagtacgatgttggccaccgccgcctttgccaccctgctcgccaccagcgccttcgccgccgacctgccgggtaaagggattacggtgaagcccgctcagagcactatctccgaagagagcttccagaccctgctggtcagtcgcgcgctggagaagctgggctacaccgtcgagaaacccagcgaagtggactataacgttgcctatacgtcgattgccgccggagataccacctttatcgccaccaactggcaaccgctgcacgatgacatgtacgccgcggcgggcggtgataacaaattctatcgcaaaggagtgtacgtctcaggcgctgcccagggctatttgatcgacaaaaaaaccgctgagcagtaccacatcacctccatcgatcagctcaaagatccgcagatcgccaaactgtttgataccaacaatgacggtaaagcggatctcaccggctgtaccccaggatggggctgcgaagcagtgattaaccatcagattgacgcctatggcctgagcaaaaccgtcacccataaccagggcaactacgcggcgatgatggccgacaccattgcccggtataaagaaggtaaaccggtgctctactatacctggacgccgtactgggttagcgacgtgctgaagcctggcaaggacgtcgtctggctgcaggtgccgttctcctccctgccgggcgagcagaaaaacatcgacaccaaactggccaacggcgccaactatggcttcccggtgaacaccatgcacatcgtcgctaacaaagcctgggcggagaaaaatccggccgccgccactctgtttagcgtcatgaagctgccgatcgccgacatcaacgccgagaatgcgatgatgcacgaaggccatgcttccgaagccgacattaacggccacgttgatggctggatcaaagcccaccagccgctgttcgacagctgggtgaaaaccgccctcgccgcgcagcagtaaacccgctcacggataaggcccagcgccttatccggcccccttgcccctttctcctggccaggtcatagaaaagcgattccaggaatttccatagtgttaaggcgcatcgcgctctgttaaggtggagacatcggtcaaattgccaccttcacatggatccagcgataagttattcatatggaaaaccccgcgcccttaacctgtgccttacctgaacgcgtcgccaccgtcggcgaaggcgtcaaagacagtctccccatcgtcatcagctaccttccggtggcattcgccttcggactcaatgccacccggctgggcttcaccccgctggaaagcctgttcttctcctgcattatttacgccggcgccagccagtttgtgatcaccgccatgttggccgccggcagttcgctgtgggtcgccgccctgacggtgatggcgatggatgtccgccacgtgctgtatggcccctcattgcgcagccgcattcgctcagcgctggataaaaagaaaaccgccctctgggccttcggcctgaccgatgaggttttcgccgccgctaccgccaggctggttcgcgataaccgccgctggagcgaaaactggatgcttggtctcgcttttacctcgtgggcatcgtgggtgtgcggcacgctggccggcgcctggtccggcaacggcctgctggtggattatccagcggtggaagccgccctcggctttatgctgccggcgctgtttatgagcttcctgctggcctctttccagcgtcagcagtcactctgcgtcacggcggcgctggcgggcgcgctgggcggcattctgttattttccattccggcggcgatcctcgccggaattgtctgcgggtgtctgacggcgctgcttcaggccatgctcaaggggatgccggatgaacagtgaagtccttctgctcggggtgatagtcggcggcgtcaactatctctttcgctatcttcctctgcgtttgcgcgtcggccacgcccgtcctgcccgccgcggcccggtcagcgtgctgctggataccattggcatcgcctcgatttgcgcgctgttggtggtctccagcgtgccggagatcctcgccgatgcccatcgcctggcgccgacgctgaccggcttcctggtgctgggggccgccttctggaaaacccgcagcatcattgtcccgaccctgctgtcggcgtttgcctatggtctggcatggaaaatcaccaacgggctctaagctttacgtatcaattttggtcaataattcatttgatttatttgtcacaatagttattatatcggctgtaattaatgaggtcatacccaaatggatagttcgtttactcccattgagcaaatgctcaagttccgcgccagccgccatgaagatttcccgtttcaggagatcctgttaactcgtctttgcatgcatatgcaaggtaagctgctggaaaatcgcaataaaatgctcaaagcgcagggaattaacgagacattatttatggcgctgattacgctggagtcacaggaaaaccacagcatccagccgtccgagctgagctgtgcgctgggctcgtcacgtaccaacgccacccgtatcgctgatgaactggaaaaacgcggctggattgagcgccgcgagagcgataacgatcgtcgctgtttgcatctgcaactgaccgaaaagggccatcagtttttgcgtgaagtcctgccgccgcagcataactgcctgcatcagctgtggtcttcacttagcaccagcgaaaaagatcagctcgaacacatcacccgcaaactcctgagccgccttgatcagatggaagaagaaggcgtgctagcggactctctacgctaagggcggcgtcgctcagcccatttttacgttgcaaggaaaacagccaggccagcagatctctgctggcctttctgataaacaggtcggctcagccgatgtgaaataataagatcgtggagaataacatgagtgcaaatgcggagagccaaaccccgcagcaaccaggcagcaaaaaaggaaagcgtaaaggcgcccttctgttgctgacattgctcttcattattattgccgtggcatatgggatttactggtttctggtactgcgtcactacgaagagaccgacgatgcctacgtggcagggaatcaggtacaaattatggctcaggtcgcgggcagcgtgaccaaagtctgggctgacaacacggactacgtgcagaaaggcgatccgctggtcactctcgatcggaccgatgcccaacaggcgtttgaaaaggctaagacccaactggccgccagcgtccgtcagacccgccagcagatgatcaacagcaagcagctgcaggcaaatatcgacgtcaaaaaaaccgccctcgcccaggcgcaggctgacctgaaccgccgcatcccgctgggcgccgcgaacctcattggccgcgaagagctgcagcacgcccgcgataccgtcgccagcgcacaggccgaactcgacgtggcaatccagcagtacaacgccaaccaggcgatcgtgctgggcaccaggctggaacagcagccggcggtgctccaggcggccactgaagtgcgtaacgcctggctggccctgcagcgtacgcagatcgtcagcccgattagcggctacgtttcccgtcgctcggtacagcctggcgcgcagatcggcaccaccacgccgctgatggcggtggtcccggcgaccaacctgtggatcgatgctaactttaaagagactcagctggcgcatatgcgtatcggccagccggccaccgtgatcagcgatatctatggcgatgacgtgaaatacaccggtaaagtggtcggtctggatatgggcaccggcagcgccttctctctgctgccggcgcagaatgctaccggcaactggatcaaagtggtacagcgtctgccggttcgtatcgagctggatgaaaaacaactagcggaacacccgctgcgcatcggcctctcgacgctggtggaagtcaacaccaccgatcgcgatggtgaaatgctggccagccaggtgcggagctccccggtttacgagagcaatgcccgtgaaatcgctctcgatccggttaataagctgatagacgagatcattcaggccaacgccggataattcggggtgagtgtaatgcaacagcaaaaaccgctggaaggcgcgcagctggtcattatgaccattgcgctgtcgctcgcgacgttcatgcaggtgctggattccactatcgccaacgtggcgatcccgaccattgccggcaaccttggctcgtcgctgagccaggggacctgggtcatcacctcgttcggggtcgctaacgccatctccatcccgatcaccggctggctggccaagcgcgtcggcgaggtgaagctgttcctgtggtcaaccaccgctttcgccattgcctcctgggcctgcggcgtctccaacagcctgacgatgctgattttcttccgcgtcattcaggggatcgtcgccggaccgctgatcccgctgtcgcaaagtctgctgctcagcaactatcccccggcgaagcgctctatcgctctggcgctgtggtcaatgacggtgattgtcgcgcccatctgcggtccgatcctcggcggctatatcagcgataactatcactggggctggatcttctttatcaacgtgcccattggcgtggcggtggtgctgatgaccctgcagaccctgcgcaaccgggaaaccaaaaccgaacagcggcggatcgacggtgtcggtctggcgctgctgatcatcggtatcggtagcctgcaggtgatgctggaccggggtaaagagctggactggttctcctccaatgagattatcattctgaccatcgtggcggtggtggcgataagcttcctgatcgtctgggagctaaccgacgataacccgattgtcgatctgtcgctatttaagtcgcgcaacttcaccatcggctgcctctgtatcagtctggcctatatgctctacttcggcgccatcgtactgctgccgcagctgttgcaggaggtctacggctacaccgcgacctgggccggcctggcgtcggcgccggtgggggtgatcccggtcattctgtcgccgattatcggccgcttcgcgcataagctcgacatgcggcggctggtcaccttcagctttattatgtacgcggtctgcttctactggcgcgcctggaccttcgaaccggggatggactttggcgcctcggcgtggccacagtttatccagggcttcgcggtggcctgcttcttcatgccgttgaccaccatcaccctctccggcctgccgccggagcggctggcggcggcgtcgagcctgtcgaacttcacccgtacccttgccggctccatcgggacctcgatcaccaccaccctgtggaccaaccgcgaggcgctgcatcatgcgcagctcaccgaatcggtgaccccctttaaccccaacgcgcagcagatatacgatcagctgcagggcatgggaatgacgcagcagcaggcgtccggctggatagcgcagcagataaccaaccaggggctgattatctccgccaacgaaatcttctggatttctgcggctattttcatcctgctgttggggctggtgtggttcgccagaccaccgttcagcgccggcggaggcggcggcggcgcgcactaagcctcacataaagggacctccgggtcccttttttacggcgtcaggttgtccagttctcgctagtttctgtctcgtttgcgaaagcccgtcaccctgcgctcgggcaggataaaggctgaccattaaggagaacactatgctgagccatcctgctgaaaagtaccgtccctatccgccgatcgccctgcctgaccgccgctggccagaccggcaaatcagtcacgccccgcgctggctctcgactgacctgcgcgacggcaaccaggcgctggcggagcccatggacagcgcccgcaaactgcagttctgggatctgctgctggagtgcggctttaaagagattgaagtcgccttcccttccgcctcacaaaccgatttcaactttgtccgccagctgattgacgaacagcgcatcccggaggatgtcaccatccaggtgctgacccaggcgcgagacccgctgatcctgcgcacctttgaggcgctgcgcggcgcccgccgggctaccgtccacctctacaatgccaccgcgccgctgttccgcgagctggttttcggcatggacaaggccgaggtgatcgccctcgcgacccgcgccacccggcttatccgtcagcagtgcgaacagcagccggagacccgctggcaatatgaatattcgcctgaaaccttctgcttcaccgagcccgagtttgcgcttgagatttgcgaagcggtggcggatgtctggcagccctgcgccgagcgaccgatgatcgtcaatctgccggcgacggtggaagtcaacacccccaacgtctatgccgatcagatcgagtatttttgccgccacttctcccgccgcagcgaggtctgcatcagcgtgcacccgcataacgatcgcggcaccggcgtcgccagcgccgagctggcggtgatggccggcgccgatcgggtagaaggctgcctgtttggcaacggcgaacgcaccggcaacgtctgtctggtgactttggcgatgaacctctacagccagggcatcgaccctgagcttcgcttcgagcagatgaaccgggtggtggaggtggtggaaaactgcaaccagatccccgttcacccgcgccacccgtgggcgggaagtctggcttacaccgccttctccggctcccatcaggatgcgatcaaaaaagggtttgatgcccgtcagcctggcgatccgtggcagatgccctacctgcccattgacccgcaggatataggctgcagctatgaggcggtgatccgcgtcaacagccagtcggggaagagcggcagcgcctggcttatcgaacaaaatcatggtctgaaactgccccgcgggctgcagcaggacttcagccagcacgttcagcaggccaccgatagcgacggcaaagagatgacccaccatgcgctgtggcagctgttccgcacgcgctacgggctgcaggcgcagccggcgctgacgctgctcgattatcagagcgccagccagcaggatggccagctttccctgcaggcaacgctgcgtcaccacggcgaaacccgacgcctgcagggccagggcaacggcctgctctccgccgcagccagcgggctcagcgcgctgtttcggcagccgtttatgatcaaggactatcatgagcatacgctcggcgcgcgcagcgacagccggtcggtggcctatatccgctgcgtttttccgcaaggagaaagctactggggcgtgggtatcgataatgacgtggcgcgcgcctcgctgcaggcgctgtgcaatgcgctcagcgccgccgatcaggccgggggacgaaaatagtcgctgggggcgacgcccatcacccgacgaaacatggcgctgaaggcgctgtggctaccgtagcccagctccagcgccacccgcagcacggagtagccctgcgccaggcgcaccagcgcttccattagcttcgcccggcgcacccactcgctccacgtcaggctagtctgctgctgaaaatggcggtttagggttcgctcgctcatgctgcacgccttcgccgcctggccgctgctccaggcctcgcccggcgcctcgcgtacctgctggcacagccgacgcagcgtttcgctttgcggctccggcaggccaaacggcaggatcgccatcccgcggatctcatcgaggatcagttcataaattctttcgtcgcggctggcgggggcatagcgttccgccagcgccagggatgacacgatcagttcccgcagcagcggcgtgatctgtacgatctggcagcccgccggaagatcggcgcgcgccagcggatcgataaacagggtgcgcgccgccacgttgccggtcatgcgcagcgcgtgcggcgttcccgccggcagccagacgccgcgcccgggcggcaccacccagtagcctaccggcgtcgcgactcgcaccacgccgcttagtatatgcagcagctgggcgcagtcatgctgatgccagtcttcctggtcaccgtgggcataatcatgggcaaagggcaccagtgggcggtgctgaaaggagaaggaaagcgtcgtcgtcatcgcggcgtcagaagagcggcccggcgacaggcgtcgggccgtggcggaagcactagatgtgcagttcctgcagtttttctttcggcaacgccagttcgtcgttgctgttgatgcgcacatcgcgctcaatgatatgacgagcgatgtcctgggcctcttccagcgagtgcatggtgtaagtcccgcactggtagacgttgagctccgggatctggttctgatctttcaccttcagcacatcggccatcgccgctttccaggcgtcagcgacgcgctgctcgtccggcgtaccaatcaggctcatatagaagccggtgcggcagcccattggcgaaatgtcgataatttccacgccattcccgttcagatgatcgcgcataaagcccgcgaacagatgctccagggtgtggataccgcgttccggcatcacttcctggttcggtacgcagaagcgcagatcgaaaacggtgatttcatcgccatgcggcgtgttcattttcttcgcgacacgcaccgctggggcttccattcgggtatggtcgactgtgaaactatctaacaacggcattcgtcacctccgggagtgaatttttttaaaataaaatgaactctttgttcagccgcgagtctcagtatatgaaagacgcgcatttattatcatcatcatccctgaatcagagatgaaagtttggccacagtgatgtggcctttttcttttccagcgctacgcgtgccgcgccagcagcgcctcaaacggctcgctgtcttcagcttccactttcttctgtcgcgccaccgacgcgtcgcgctcggcgataaaatcgtcttcgctcaggatctccagcggctcttcgcgcagctgcgtccggtaacgatcggcaagcgcacggccggtaccgccaatgccttcttcaatcatagaacgcagaatgcgggctgagaaggttaattccggatcgtcaaagcaggccagcagctcgtcgcagacctgctgatatgcctggccaccgtggatactgtccagggtctgcgccacgcggcgtaaatcgcggaacagatctttgcccacctgagccagcgggaactgcgcgctttcgcagccaatccccagcgttaagcccggcttacgcccttccagaataacccgattccagttggtgcgggtgcacagcagctcatcgctgctcatctccggcgcgtcggccagcgcgcaccagaccataaacaggtcgaggaaacgcacctgctgggcgtcaacgccgatcggcgagaacggattgatatccagcgaacgcacttcgatatactcaataccaccgcgcaacagcgcatcggacggggtttcgccccgacgggtgacgcgtttcgggcggatcggcgcataaagttcattttcaatctgcagaatgttgctgttgatctgcagatacttgccgtctttctgcagcccgattttggcgtactcttccgacggcgttttaatcgcccgcttcaatcctgccacatactcgtgcagatcgttaaacgtaattccgagattgctttgcgacttattggtataaccaaggtcgctgaggcgcagcgaggtggcatacggcaggtaatacatgccgttgcccgtttcctcaaagggcagcgttgtcggtttgccttgcaggaatgaggagcaaatcgccggcgaggcgccaaacagataggggatcacccagccaaagcgatagtagttacgaattgagcggaaatagcccgccgaaatggcctctttaccactctcggcatcttccacaccacattttgcctgccagaaggccatcggtagggagaagttatagtgcacgccggagatagtctgcatcagcgcgccatagcggttcttcagcccctcgcgatatagcgttttcaggcgccccacgttagaggtgccgtactgcgccagctcaatatcctgaccgggggcgatatagcatggcatgctcagcggccacatccgctcgtcgccaagctgacgcgcggtatagcgatggacatcgcgcataaaggtcagcatatgctcaatatcgccatctactggcgtaatgaactcaagtaaagcttcggcaaaatcggtggtaatccatttatgcgttagcgctgagcctaacgccggagggtgaccggtcgttgcaagggtgccgtctgcgttcacgcgcagcgtttcccgctccagaccacgttgaataccctgcagagcctgcggatgtttttccagccaggccagcgcctgtgatacgtccgggatcaatttgacctcccgcctgtcgaaatcgtttgaataagcataattgtaatggatgaactgtcagtccaattagtgccaccacgtcatgccctgaagcgtcgctgccgcaatagcgatatagcgcagcgccttaccaaggcataagaaaaagagtaccggtccccaggaaatgcgcatccatcccgccagcaaacacagtaaatcgccgacaaccggcgcccagctcagtaagagcgtgaccgcgccgtagcgcttaagccagccggccgcccgctcctgccagcgcgaggttttgcgcagcggaaacaagcgccccagaataacgttagttacccctccaaggctattgccgattgttgctattaatactaaccaccacggatgactgacccccgcaagtagcatagccaccagcacaacctccgaattgccggggagcagcgtggcgcttaaaaagctactggcaaacagcgaggtgagtgacagcgcgtcgctcacagcaaacgcacgtcaactgcgtccattcccgcgcgcttcgccgcctgcagaccaaagtcggcatcttcgaagacgacgcatttttccggcgcgacgcccatgcgctcggcgcacagcaggaaggtatcgggcgcgggtttatggttgaccacatgatcggccgccaccaccgcggagaagtaatgacgcagccccaggtgcgccagcagcgcttcggcgacggagctctcgctgccggttcccaccgacatcgggcgacggccgtgccatgccttaaccacctcaatcagcggcaacgggcgtacgctgtccagcagcatcgctttgacggcctgggttttttcctgcgccaggcgatgtggatcgagatcggcctggttgagttcgataatcgcctgggcgattcgccaggttggtgagccattgagcgcgaccatcgcctgttcgtcgaaacgcataccgtagcggcccaacacctcgttccatgcctgccgatgggtcggctcggtatcgagaatggtgccatccatatcaaagatcagtcctgcgtaaccttcgtacattgtcttctcaccaaccggtttgggaatgattactgtaacgcaaaagcccgccgttgtcgcggccagcggcgcagacgacaaaggcgccctcaggcgcccccaaaaattaggccggataaccagccttatttaatacgcagatcgttctcgaccattcgcacgccctgcactcggcgtgtgacttctacggctcgtttagcgctctccgcggaggagacaaatccgctcagctggacgcggcctttaaaggtctggacgctaatttctgaggacttaatgtctttatcgttaaagagcgccgttttcaccttggtggtcaccacggtatcgtcaatatagccgcccgtactctcctttgtagccgatcccgcacagccagcgagggccgtcgttaccagcagcgtcgcgcaaaaagcaggtattgctttgaaccatttcatggatttctctccttgcatttatctcagcctgataacgctgatatacaaggataaattatagtggaaagcgcgtcttgccaataaaaaagtcaggatgaagccagtgatggaaaacgaggtaatcgggatggtgagagaagagtgaagattatgcattcagaacgggtgctgcgataatttcgcagcctacgcaacaacatcgtcgttgttactgaggagaatatggtgcatccgggaggatgactcggctacgcctcgccctttgggccgttgcttacgcaacgttatcccccctggtgctggcgatgatttcgcagaccataaaacaacatcgtcgctgttactaaggagaatatggtgcatccgggaggattcgaacctccgaccgctcggttcgtagccgagtactctatccagctgagctacggatgcatcgggaaagctattttactgcggggttactctcctggcacttacgatggtttcgcaaaccagataacaacaatgttgctgttactaaggagaatatggtgcatccgggaggattactcggctgcgcctcgccctaagggccgttgcttacgcaacgttatcctccctggtgctggcgataatttcgcagaccataaaacaacatcgtcgctgttatcaaggagaatatggtgcatccgggaggattcgaacctccgaccgctcggttcgtagccgagtactctatccagctgagctacggatgcatcgggattactgctgtaattctgatatcaaatttcgcgatttgccattcttattaaagaatggtgcatccgggaggattcgaacctccgaccgctcggttcgtagccgagtactctatccagctgagctacggatgcatcgggaaacttgctttactacgcgtcagtgtcacaactaacacatgccacactgagtatgatggcctaatcggtagagtgactcgattatgcctcgcactgcgggccgctgctttcacagcgctcttctctcttaattcagaaagaagatggtgcatccgggaggattcgaacctccgaccgctcggttcgtagccgagtactctatccagctgagctacggatgcaaaatggcggtgaggcggggattcgaaccccggatgcagcttttgaccgcatactcccttagcaggggagcgccttcagcctctcggccacctcaccacacacgcctctttcgagtgcttcgaagaacttgtttctgctcttcgtcgctgcgatggcgcacatattactttctggtacttataagtcaaacactttttcgagaccttttttcgtttgcacacttcgcacgcaattcgcatgcaaaaacggcaaaaagggcaatttatcaacaggaaatcagccctgacgctggcataacgccaaacgaccaaagcggcaaagggtaatgaaaagcggtatggcgcagggggaaaaaacagaaaaagggaaaaagcggcggtaagtgatgcgcctcactgcacagcgaggcgcggaaaccttagtaactggactgctgggatttttcagcctgaatacgctggtagatctcttcacggtgaacagacacttctttaggggcgtttacgccaatacgaacctggttacccttcacccctaaaactgtcacagtgacctcatctccaatcatgagggtctcaccaactcgacgagtcagaatcagcattctttgctccttgaaagattaaaagagtcgggtctctcgtatcccggcattatccatcatataacgccaaaaagtaagcgatgacaaataccttagggtataagcagtcatggcatcacattctgttaaacctaagtttagccgatatacacaatttcaacccgactttatcgttatcagtgtttctgacgcaaggtgccgcaaccctctggttatggcacctatacccgtcatacttcaagttgcatgcgtgttggctttcctcgctcaccccagtcacttactagagtaagctcctggggattcgctgcgtcgccgccttcctgcaactcgaattatttagggtaaatgcgtttatagttattacagttttgcgctgacccagcctttcacactggctaacgctgcagggagagcagacgcatcggtaccaccggcctgcgccatatccggacgaccgccccctttaccgcccacctgctgagcgaccataccaaccagctcccctgctttcacgcggtctgtcacatccttagacacacctgcaatcagagaaaccttaccatccgctaccgtagctaatacaacgatcgtcgaaccgagctggttcttcagatcgtcaaccatggtacgcagcattttcggctcaacgccggtcagttcgctgaccagcagcttaacgccgttaatctcttccgctttgctggagaggtttgcgctctcctgcgccgcagcctgctctttcagctgctgcagctctttttccagctgacgggtacgctccagcgcggcgcgaaccttctcgccgagattgtggctgtcacccttcagcagctgagcgatatcattgagctgatcgctctgcgcatgcaggatggccatcgcgccttcgccagtcaccgcttcgatacggcgcacgccagcagcggtgccggactctgacgtgatgcggaacaggccgatatcgccggtacgcgccgcgtgagtcccgccgcacagctccgtggagaagtcgcccatccgcagaacgcgcacgcgatcgtcgtatttctcgccaaacagcgccatggcgccggatgcgcgcgcggcatcgatatccataatgttggtttcgatagccaggttacgacggatctgcgcgttgaccaggtcttccaccgcacgaatttcttccggcttcatcgcttcaaaatgcgagaagtcaaagcgcagcgctttatcattgaccagcgaacctttctgcgccacatgggtgccgagcacctggcgcagcgccgcgtgcatcaggtgcgtcgcggagtggttgagacggatacgctgacggcgagcctcatctacgtcggcctgcaccgcgtcacccactttcagtgtgccgctggcgactttaccgatatgaccaatagcctggccgtacttctgcgtgtcgctgactgcgaaggagaagcccgcgccttttaattcgcctttatcgcccacctggccgccggactccgcatagaacggggtctgatcaaggatcaccaccgcttcctggccagcgctaacgctatccaccgctttgccgtcgataaacagggcggtaaccttgccgttcagctccagatgatcgtagcctttaaattcagaggcgccgtcaacgcggatcatcgcattatagtcggcgccgaaaccactggactcgcgcgcgcggcggcgctgctcttccatcgcggcttcaaaaccagcttcatcaaccttgatgttgcgctcgcggcacacatcggcggtcaggtcgaccgggaagccgtaggtgtcgtacagacggaaggcggtttcgccgtccagggtgtcgcctttcagcttcgacagctcctcatccagcagcgccaggccgcgctcgagggtgcgggcaaactgctcttcttcggttttcagcacctgctcaacctgagcctgctgctgcttcagctcgtcgccggcggagcccatcacatcgatcagcggggcaaccagtttccagaagaaggtgtccttcgcgcccagcatgttgccgtgacggatcgcgcggcgaatgatacgacgcagcacgtagccgcggttttcattcgacgggatcacgccgtcggcaaccaggaaggcgcaggagcgaatgtggtcggcgataacgcgcagcgacttgttcgtcagatcggtcgcgccggtgactttcgccacgctggcgatcagatcgcggaacaggtcgatgtcatagttggagttaacgtgctgcagcaccgcggcaatacgctccagacccataccggtgtcgacggacggcttcggcagcggctccatggtaccgtcagcctgacggttgaactgcatgaagacgatgttccaaatctcaatgtaacggtcgccatcttcttccgggcttcccggagggccgccccagatgtgatcgccgtggtcaaagaagatttcggtgcacgggccgcacggaccggtgtcgcccatctgccagaagttgtcagaagcaaacggcgcgcctttgttgtcgccgatgcggataatacgctcgcgcggaacgcctacttcattggcccagatgtcgaaagcttcgtcatcggtctcgtaaacggtaacccacagtttttctttcggcagcgcgaaccagttctcaccggtcagcagttcccacgcgtatttgatggcatcctgcttgaagtaatcgccaaagctgaagttgcccagcatttcaaaaaaggtgtggtgacgcgcggtgtaaccgacgttttccagatcgttgtgtttaccacccgcacgcacgcaacgctgtgcggtggtcgcacgcgaataattacgtttgtcgagaccaaggaagacatccttgaactggttcatccctgcattggtaaacagcagggtcggatcgttgtgcggcaccagggagctgctggcaactacctgatgtcccttgctatggaaaaagtcgagaaacgcctgacggatctcagcggtgctcttgctcataattatcctgaaatcaagctacacgtcatccttcaagtcgcctctgtcctggctgcgcttgctcttccggcaccgaactgacgtacgttgcgaaagagagtctctcttgccgccctgatgcagcttgaatgattttgtgtaaaggaataatcgcccaggccgctgcctgcacagtcacaaccagcggcccgacggaataaagtgggaataagataagttttctttacggcgaagtaaaatcccggatgggtcaatctgcaaaatttcgccagatttcctggatatcttccatcaggtagccgcggtaaagcaggaatcgctgaactttcactttttcagtaaaggcggaaggtaacggttcgccgtatttacgctgtgcctgctccctggcaaggctcacccagtcgatatcgcattcgcgcatcgcctggtcaacgacctggcgcgcaatgcctttctggctgagctcctggcgaatgcgcgccggaccatagcccttgcgactccggctggcgatgaactggccgacgaagcggttgtcgtcaaggtagcggttttcgatacaccaggcgacaacctgctccagctcgtcgggggtggcgtccagcgcctcaggaccgtttttgctcatcaccggagcgaccagcttgcgtcgcagctcctgctcgctgtggtcgcgcatcgccagaatgcggatagcacggtccagcaggcgggcgtagccggagcggcgtgatgaaggttcagtcacaggcacctcgataatctcacaaagcaaaagggctgcctaagcagccctgtcagtcttgcagacgatatcagaaatcctgttcggtttcttctgcgtcgttgccgtcaacaacgaagtctggcttcgcatcctgattgttgagcagcagttcgcgcactttcttctcaatctctttcgccgccgccgggttctctttcagccaggtgatcgcgttcgctttaccctgaccgattttgtcgccgttgtagctataccaggcacccgctttctcaatcagcttctcttttacgccgaggtctaccagctcgccgtagaagttgatgccttcgccgtagaggatctggaattcggcctgtttaaacggcgcggcaatcttgtttttcaccactttgacgcgggtttcgctgccgacgacgttgtcgccctctttcaccgcgccgatgcggcgaatgtccagacgcacagaggcgtagaacttcagcgcgttaccaccggtagtggtttccgggttaccgaacatcacgccaattttcatacggatctggttgataaagatcagcagcgtgttggactgcttcaggttacccgccagcttacgcatcgcctggctcatcatacgcgccgcaaggcccatgtgagagtcgccgatttcgccttcgatttccgctttcggcgtcaacgccgcgacggagtcgacgacgataacatcaaccgcgccggagcgcgccagcgcgtcacagatctccagcgcctgctcgccggtgtccggctgagaacacagcaggttgtcgatatcgacgcccagtttgcgtgcatagaccggatccagcgcatgttcagcatcgatgaacgcacaggttttaccttcgcgctgcgctgcggcgataacctgcagcgtcagggtggttttaccggaggattccggaccgtagatctcgacgatacggcccattggcagaccgccggcgcccagcgcgatatccagagaaagcgagccggtggagatggtttccacatccatggtgcggtcttcacccaggcgcatgatggagcctttaccgaattgcttttcgatctggcccagtgcagccgccaacgctttctgtttgttttcgtcgatcgccattgttactcctaatcatgcagggtaaagcgtgttcgcttcgccgttaatatttgttcagttgaggcaattatactgtatggtcatacagtatcaagtgttttgtagaaattgttgccagagcagatttagcgcataggccgtcgcctgacgacgcaccgcttcgcggtctccggcaaagcattcccgccgcgtcaccccttgcccgctcacgctggcgacgccgaaccataccgtgccgaccggcttttcgacgctgccgccatccggcccggcgacgccgctaacggagatggcataatccgcacgcgccgcgcgcagcgcgccaatcgccatctccaccaccaccggttcgcttaccgcgccgttgtcgcgcagcgtcgcttcgctgacgccgatcatttgcgatttagcttcgttgctgtaggtgacaaagccgcgttcaaaccacgccgagctgccggcaatatcggtgatcgctttcgcaatccagccgccggtacaggattccgccgtggtcaccgtcgccccacgcgccttcagcgcccggccaatcttctcgcttagctgcattaattctgaatcggtcattatcgccccgctttgctctggataaagaggccatcaaagatagcactttcgacagagatatggggatgaagtggcgattttacgaggggggatccagaaatgggtcgtcctgtgataaccaggacgaccagacaacctgttacttcatgcttttagcgataagctcaacgttgtgacgcatcattttgacgtaactatcggcgacgccgcccggcttagacagcgcttccggatagagttcgccccccggctgcgcgccggtggcgctggcaatctgcttcaccagccgcgggtcaagctggttctccataaaccaggtatggacgccatccgctttgatttgcttaatcagcgccgccacctgcgccgtgctggcctcgctctctgaagagagcccctgtggcgcgaggaaggtcacgtggtaagcccggccaaaatagccgaaagcgtcatggctggtcaggaccttgcgcttggccagcggaatggcgctgaactgcgctttcgcccagccgtcgagagacgtcagctggtcgatatagcgcttgccgctgctggtcaacgccgctttatcttccgggtcggctttcaccagaccatcgaggatattctgcgcatacaatgcgccgttcgctgcgctgttccaggcgtggggatcggtcaccgttttaccctcttcatcaagggtatgggtcttgacgcctttcgatgccaccaccagctcgcccttaaaaccagaggccttaatcaggcgatccagccacccttccagccccaggccgttaaccaccaccacgtcggccttgctgagcagcgcgctatccttcggcgacggttcgaaggtgtgcggatcgccgtccgggccgaccagggtatccacatggacatgctccccgccgacctgctgcgctatatcacccaacaccgaaaaactgcttaccacattcagcgttttcgccatggccccctgcgccatcaggccgagggccagcgcgaccactattgcactacgtttcatcatttccttaccccatcaatgtgcgccaaccgaccagcagccggctgcgcgtgccaaaaaatagcgaaacaaaaaacagtgcgctggcggtcagcacaatagcgggcccggcgggaagactaatcgcccaggagaggcttaatcccagccaggcgcagagcgcgcccattcccgccgccagcagcagaatgcccggcagcgtgcgcgcccagcagcgtgcggcgaccgccgggagcatcattacccctaccgccatcagcgtgccgagcacctgaaacccggccaccagattaagcaccagcagcgccagaaaaagcccatgcagcagcgcaggcagccgccggtgattcacctgcagccaggcgctgtcgaacgcctcgcagaccagaccgcggtagcacagcgcaatgcacaatagcgtcaggctggcgacgccgctgacaaacagcgccgcatcgcggtcgaccgccagaatggagccaaacagcagatgcaggaggtccacgctggagccgcgcagcgacaccagggtgacgcccagggccagcgagcccagataaaatccggcaaaactggcgtcctcttttaacggtgtccgccggctcacccacccggccaccagggcaaccacgatgccggcgatgaagccgccgagggtcatggccagcagcgacatgccgctcagcagataccccaccgccacgccggggagaatggcgtgcgacagcgcatcgcccatcaggctcatgcgccgcagcagcaggaagacgcccagcatggtggtgctcagcgacagcgccagacacaccacgagggcccgacgcataaagccgaattcaatgaaaggctgaaagaaggtgtgccagatcatgccgacctcacatgactgaaggccgggagcaccgcccgggtagcgccccagcaggcgcgctggggagtcagcagcagcgtctcggggaaaaagtcggccacccgctggttatcatgcagcaccgccaggatggtctgtccctgccggtgcatctcgaggatcaaatccattagttcgcgactggtcgcttcgtcgataccggtgaagggctcgtcgagcatcaccagcggcgcctgctgcaccatcacccgggcaaatagcatgcgctgaaactggccgccggagagcgcttcgatcggcgttttcgccaggcccgccagcccgacccgctccagcaccgcgccgatgcgtcgccgggtgccgccccccagaccgcgcagcagcgacacgccgggccatgcgccctggcttaccacatcctgcacgttgagaggaaactgcgactcgagggcatggcgctgcgccagccagccgatcaccggccgtgttccctgccagcgcaggcggccactgaccggcggaagaaacccggcgagggttttcagcagcgttgattttccgcagccattgaggccaacaattgccgtcaggctgccggggcatatcatcccgctcagcggaggggtgatcgctaccccgtcatagccggcgaccagctgctccagttcaatcatggcagcgtcaccgcccaccaggttgctaaccatagcgccgccagcagcacgcctgcgatagccgcgcgcaccgcgccggatgccataaaaatcgatgtgaacatatccccgcctcaatttaatgttataacataacaataacgaagcgaagaaagaatgtaaatcagcgtcattcagcggaaatgtaacaaaggtcaacaagaggcatggagacgggaaaaaacgggaagataagcgcggcctccccggcgtcatcccccggtcgcgctgcgcttaccggggctagcaaccggataccagaccgtagcccggataaggcgctacgcgccgctatccggggaggctgggaaattgtcagccggatgaaaggattaataaccgccgcgggcctgcgcaaccgccaggcccagctgccagacagccatcgcgtagtgggtgctgtggttgtagcgggtgatggtgtagaagttcggcagcccgtaccagtactcatagccggtgccgacgtccagccgcagcaggctggcctgctgatggttacccagcggctgggtcggggtcagccctgcggccgccagctgcgaaacgctgtatttagtcttgaaaccattctccagccccggggcctgccccagcgcctgcaccgccaccagatcgccgctcacccagccatgctgtttgaagtagttggccacgctgccgatagcatccaccgggtcccacaggttgatatgtccgtcaccgttaaaatcgaccgcatactgcttataggaggacggcataaactgaccgtagcccatcgccccggcgaaagagcctttcagatccagcgggtcgtcgctttcgctgcgcgccattagcaggaaagtttccagctccgacgagaagtattcggcgcggcgcgggtagctaaacgacagcgtcgccagcgcgtcgaggatccgggttttgcccatcacccggccccagcgagtctccacgccgataatgccgacgatgatttccggcggcacgccgtaaacctgataagcgcggttaagcgcgtcctgatactgattccagaacaccacgccgttctgcacattatccggggtaatgaactgtttcttgtagcgcagccaggcgccggtcggcccggttggcggcaggccggtcggcgcctgacgatccatcagccgcaggacgtaatccaggcgctttgcctgcgacaggatctcctgcagctgctgcctgtcgaagccgtgcttcgccaccatcttatcgataaactgcgccgccgccgggttgttggcgaagtcgccgcccatctgcatcacgttatgctgcggttccagcaaaaagccgccggttccactcgccatctccgtttccgcgggggtcttgggtttgctgctgcaggcagcgaggagcacacaaaggggaagtaaagccagatagcgacgcttcaacatgggaattccgtttaacaaattcagcaagggataattatggtaaagcatgcgacgaccaacaagaaagcgacaatctgtttgtagacaaaatagtccttcaacggctcctcccctgcgtgctttcatgccctgcaatatttcatctcgcccgcatcatctttcaaaataaaatatttatctttcattttgcgatccatttaacacttttaaacctttcaaaatgattaaaatcagcctgcgattagcaagaaaaataacatgctgaaggagagaacaatgattgacgtcgtgacccacggcgcggagtggtttatcggcctgtttcagaaaggcggcgaggtatttaccggcatggtgaccgggatcctccccttgctgatcagcctgctggtgatcatgaacgcgctgatcaactttatcggccagcagcggatcgagaagctggcgcagcgctgcgccggaaacccaatctcccgttacctgctgctaccctgcatcggcaccttcgtgttttgtaacccaatgacgttaagcctcggtcggtttatgccagagaagtacaagcccagctattacgcggcggcgtcgtatagctgccactcaatgaacggactgtttccacatatcaaccccggcgagctgttcgtctatctcggcatcgccaacggcctcactaccctcggcctaccgctcggtccgctggcggtgagctacctgctggtcgggctggtgactaacttcttccgcggctgggtcaccgacctgaccacctcgattttcgagagaaaaatggcgattcagctttcccagaaagtgcatctgtcaggagcgacatcatgacccgtattcgtatagagaaaggcaccggcggctggggcggcccgcttgagctcgacgccgtcgaaggcaaaaagatcgtctatatcaccgccggcacccgcccggcgatcgttgaccgcatcgccagcctgaccggctggcagccggtggacgggtttaaagagggggaaccagcggaaagcgacatcggcgtggcgattatcgactgcgggggcaccctgcgctgcgggctctatcctaagcgccgcatcccgacggtgaatatccatgccaccggcaaatcagggccgctggcccagtacatcacggaagatatttatgtctccggcgtcaaagaggacaacatccagtgcatcgctcccgacagcgcaggggtttccgagccgccggcggaaaacaagagcgcgggtcgcgattacgacaccagcaagaagattactgaacagagcgatggcctgctggcgaaggtcgggatgggcatgggttcggtggtggcggtgctgttccaggccgggcgcgacaccattgatacggtgctgaaaaccattctgccgtttatggctttcgtctcggcgctgatcggcatcatcatggcctccggcatcggcgactggatcgcccacggcctggcgccgctcgccagccatccgctggggctggtaaccctggcgctgatttgctctttcccgctgctgtcgccgtttctcggccccggcgcggttattgcccaggtgatcggcgtgctgatcggcgttcaaatcggcctcggcaacattccgccgcacctcgccctgcccgccctattcgccattaacgcccaggccgcctgcgattttattccggtaggcctgtcgctagccgaagcccgccaggataccgtgcgcgtcggcgtgccgtcggtgctggtcagccgctttctgaccggcgcaccaacggtgctgatcgcgtggttcgtttccggatttatttaccagtaagaggttcctgcagatgactgtgatttaccagaccaccattacgcacatcggcgcctgcgcgacgatggcgctggaagagcaaatgctgatcaccttccgcgagggcgccccggcggatatcgaagagtactgctttattcacaaccacggcaagcttgctggcacgctgcagccgggggcagagctgcagcttggcgaacagcgctacccggtgaccgccgtcggcgaggtcgctgaacaaaacctgcgcgagctgggccacatcaccctgcgctttgacggccatcgtgaagcggagttcccaggtaccgtccatgtggcgggcccggtgccggacgccatcgcgcccggctgcgtactgaagtttgttgcttaaaaggagagagagatgaatcaggttgctgttgtcattggcggtggacaaaccttaggagagtttctgtgccgcgggctggccgccgagggctaccgcgtggcggtggtcgatattcagagcgaaaaagccagccgcgtcgcccaggagattaacgctgagtatggcgaaggtatggcgtacggcttcggcgccgacgccaccagcgaggccagcgtcaccgccctggcccacggggtggatgagattttttcgcgcgtcgacctgctggtgtacagcgccgggatcgccaaggcggcgtttattagcgacttcgcgctgggggatttcgaccgctcgctgcaggtcaatctggtgggctattttctctgcgcccgcgagttctcgcggttgatgatccgcgacggcattaaggggcggatcattcagatcaactcgaaatccggcaaagtcggcagtaagcacaactccggctacagcgcggcgaagttcggcggcgtcgggctgacccagtcgctggcgctggatctggcggaatatggcattaccgtgcattcgctgatgctcggcaatctgctgaagtcgccgatgttccagtcgctgctgccgcagtatgccaccaagctcggtatcgatgagagcgaagtcgagcagtactacatcgacaaggtgccgctgaagcgcggctgcgaatatcaggatgtgctgaacgtattgatgttttacgctagcccacaggcgtcgtactgcaccgggcagtcgatcaacgtcaccggcggccaggtgatgttttaacaggttcccggatggcgctgcgcttatccgggctacaaaactgtaggtcgggtaaggcgttagccgccacccgacaaaaaaacggcaccgcgggtcgctcgggttaggcgctcgcgccgtgacctgggctgttcccgccccccttaaggagagacctatggttactgcattaatcatcgtcgccgccatcgcctggcttacccagctggcctttggcggctggcagatccgccgcttcaatcgcgcctttgatagcctgtgccagcaggggcgggtgggcgtcggccgctccgccgggcgctttcaaccgcgcgccatcgtcgccatcgccgtcgatgataacgaccgcattagcgacacgctgctgatgaaaggcttcaccattttcgccagtccgcaaaagatcccggctctggcaggcaaacatattgcggaattgcagcctgatgtgatctttccccatgatccgcgctgtcagaatgcactatcattagcgcttaatccgaaacatggataatttcgttgtaaaagtaaatatcttgcgaaattatcacttcgaaacttaaacgcaggatagacgcctatgaaaccacgtcagcgccaggcagccattctcgagttcctgcagtcgcagggaaaatgctcggtcgaagagctggcgcaacacttcgataccactggcaccaccatccgcaaggatctggtcacgctggaaaacgccggcaccgtcattcgcacctacggtggcgtggtactcaacaaggatgaagccgatccgccgattgaccataaaacgctgatcaacacccataaaaaagcgcagattgccgaggctgccgtgcgatacatccacgatggcgattcaattatcctcgacgccggcagcaccgtgctgcagatggtgccattgctgagtcacttcaataacatcacggtgatgaccaacagcctgcatatcgtcaacgcgctatcagagttcgataacgagcagaccatcctgatgccgggcggcaccttccgtaaaaaatcggcctcttttcacggccagctggcggaaaacgccttcgaacagttcagcttcgacaagctgtttatgggcaccgacggtatcgatctgaacgccggagtcactacctttaatgaggtctataccgtcagcaaagcgatgtgcaacgccgcccgcgaagtgatcctgatggccgactcatccaagtttggtcgtaaaagccccaatattgtctgcggccttgaacgcgtggataaattgattaccgatgccgatattgacccggaattccagcgggcgctggaagccaaaggcattgaagtcattattactggagaacatcatgagtaactttttgttagaggccggacgccagaccctgatgcttgagctgcaggaggcgagccgcctgccggagcgcctgggcgacgacttcatccgcgcggcggaaaccattatccactgcgagggcaaactgattgtctccggtatcggtaaatccggccacatcggtaaaaagctggcggcaaccttcgccagcaccggcaccccggcctttttcgtccatccggcggaagccctgcacggcgatctcggcatgctcgatagccgcgacgtgatgctgtttatctcctactccggtagcgcgaaagagctggatctcatcgtgccgcggctggaagaaaaaggcattccgctgctggcgatgaccggcaaatccacctcgccgctggcgctggcggcgaaagcggtgctggatatcgccgtggagcgcgaggcctgcccgatgcatctggcgccaacctccagcaccgtcaacacgctgatgctgggcgacgcgttggcgatggcggtgatgcaggcgcgcggtttcaatgaagaggatttcgcccgttcccacccggcgggcgccctcggcgcgcggctgctgaacaaagtgcatcacctgatgcgccgcgacgaagaagtgccgcgggtcaatgccgaggccaacgtcatggacgccatgcttgaactaagccgaaccgggctcggcctggtggcggtctgcgatgaagccaaccgcgtgcagggcgttttcaccgacggcgacctgcgccgctggctggttgctggcggtacgctcaacgatggcgtcactcgggcgatgacccgcaatggcgtaacgctgcaggcggatagccgcgcggtggaagccaaagagcgactgatgaaacacaaaatcagcgccgcgccggtagtggatgagaacggccaactggtcggcgccattaacctgcagaacttttaccaggcggggatcctttaagacccagacgtttcgccagccgatgcaggttggcgacgtccagttccagcgctcgggcggtcgccgcccagttgccctggttagcctccagcgcgcggctaatggcttctcgctgaaaagagtcggtcgcctcgcgcagattgatgtttcccgtcgcgggcgccgctgccgccgtctcagtcggcaacatcggcgccgccaccgcaaactggaaatgctgcggctccaggaccacttcatcaccggcctgggtggcccgcgccagcaccaccgcccgatggatagcatgctccagttcgcgcacgttgcccggccaggaccacttctgcagccggtttcgcgccgcctcagccaaaatgacccgcgccagccccatccgcaggcggcactgctcgcagaaatagcccgccagcagcaccacgtcactttcccgctcgcgtagcggcggaaccgacagcgggaagacgctcagccgatggtacagatcggcgcgaaagcgcccttccaccacctcctggcgcagatcgcggttcgtcgccgccagcacccgcacatcgacccgcaggctgcggtcatcgccgacgcgctgaatatcgccatactgcagcacgcgcagcagtttggcctgcagcgccagcgacagttcgccgatttcgtcaagaaacagggtgccgttatccgccatctcaaatttaccgctgcggttgctgatagccccggtaaatgcccctttcacatggccgaacagctcgctctccgctacgctttccggcagcgccgcgcagttgaggtacaccagagggttggcggctcgcggcgatccctggtgcactgccttcgccaccagctctttgccggtgccggtttcgccgctgatcagcacgtttaaatccgaggcggcgacgatatcgatctcttttttcagctgcagcatgggccccgacaggccgatgatctcctggcgctccggcagcgggtaattcaccgcctgcgccggcaggacgttttgcgcttcaaggcgggcgataagcagcgcattattcagcgccccggccaccagcgcggcaatcagccgcagctcttcatcgctgaagctatcgaaacgatcggcatccatgccgtccagggtcagcgcgccaatcagcgtctgcccggcaaacagcggcagtcccacgcaggcatggactttgaggctctcatgaccggggatcagcccgtcataggggtcgggcaggtcgctatccgccgggaagcgcaccacatccccggcgcgcgcaatcgcctccagccgcgggtgtccttccagggcaaagcgccgaccgagcacatcctgcgccaggccatcgatcgccagcggcacaaactgatgcgcctcatagcgcagcagcgccgaggcatcgcagccaagaatttgccgcagggtagtaatcaggcgcgaaaagcggtcggtgtgaccaatatcgctttgtaaatctatggcgattctcgccagctcgtcgacggaaaaactcattgccgctccattgtcattttgacaatacgcattgtcatatcgactattttaaccattgtcattttgacaacaaccaaaatcagaaaaaattaaaaacagataattatcaattaattaaaaagttggcacgcaacttgatataagccagtcaactgagtttaaacacactgtattgattgaggttgctatgtctattgtggtgaaaaataacattctttgggttggccaacgtgactgggaagtgcgtgatttccacggcaccgaatataaaacgctgcgcggcagcagctacaacagctatctcatccgcgaagagaaaaacgtgctgatcgataccgtcgatcataaattcagccgcgagttcgtacagaacctgcgccgcgaaatcgacctcgccgacctcgactatatcgtcattaaccacgccgaagaggaccatgccggcgcgctgaccgaactgatgatgcagatcccggatacgccgatctactgcaccgccaacgccatcgactcgatcaacggccaccatcatcatccggagtggaacttccacgtggtgaaaaccggcgatactctcgacatcggtaacggtaaacagctgatcttcgtggaaacgccgatgctgcactggccggacagcatgatgacctacctgaccggcgacgcggtgctgttcagcaacgacgccttcggccagcactattgcgacgaacatctgttcaacgatgaagtggaccagactgaactgtacgaacagtgccagcgctactacgccaacatcctgacgcccttcagccgcctggtgacgccgaaaattactgaaatcctcggcttcaacctgccggtggagatgattgccacctcccacggcgtggtctggcgcgataacccgacgcaaatcgtcgagaaatacctcgagtgggcggcggattatcaggaagatcgcatcaccatcttttacgacaccatgtccaataatacccgcatgatggcggacgccattgcccaggggatcaccgaggttgacccacgggtagcggtgaaaatctttaacgtcgcccgcagcgacaaaaacgacatcctcaccaatgttttccgctcgaaaggcgtacttgtcggcacgtccaccatgaacaacgtgatgatgccgaaaatcgccgggctggtggaagagatgaccgggctgcgttttcgcaataaacgcgccagcgcctttggctcgcacggctggagcggcggcgcggtagaccgcctgtccacccgcctgcaggatgccggctttgagatgtcgctgagcctgaaagccaaatggcgcccggatatcgacgcgctggagctgtgccgccaacacggtcgcgacatcgctcgccaatgggccctctcgccgctgccggttgctgaagcagcgacaacgccggaaccacaggactgcgcctgtgccgcggccgcggccgccgatctcggtcccatgatgcagtgcagcgtgtgccagtgggtctatgacccggcgaaaggcgaacctaatcaggatgtacagccgggtacgccgtggagcgaagtgccggacaatttcctctgccctgagtgttctcttggcaaagatgtctttgacgtactggcgacggaggcaaaatgagtgatggcatcgtcatcatcggctcgggcttcgcggcccgccagctggtgaaaaatattcgtaagcaggatgcgcaaatcccgctgaccctcatcgccgccgatagcatggatgaatacaacaaaccggacctcagccatgtcatcagccgcggacagaaggccgacgatctgaccctgcaaagcgccggcgagttcgccgagcagtacactctgcgtctgtttccccatacctgggtaagcgatatcgacgccgaaaaccggttagtgaagagccacgataaccagtggcgctacgacaaactggtactggccaccggcgcgacgccgtttatcccgtcggtaccggggcgcgagctgatgctaacgctcaatagccagcgcgaatatggcgcggcgcagagccggctgcacgacgcgaagcgcgtgctgatcgtcggcggcggcctgattggctgcgaactggcgatggatttctgccgcgccggtaaagcggtaacggtagtcgataactccgccagcgtgctggcggcgctgatgccgccggaggccagcagccgcctgcagcatcggctcaccgagatgggcgtacatctgatgctgaaaacgcagctggaggggctggagcaaaccgccgacggcattcgcgtcagtctcgatcgccagcgcgcgataaccgtcgatgcggtggtggccgccgccggcctgcgcccggaaacgtcgctggcgcgccacgccggactgcagattaaccgcggtattgtggtcaatagccagctgcaaaccagcgacccggcgatttatgcgctcggcgactgtgcggaaatcaacggcgtggtactgccgttcctgcagccgattttactcagcgccatgtgcctgagtaaaaatctgctggcgcaggcgggagaactcaagctgccgccaatgctggtgaaggtgaaaaccccggatctgccgctgcatctggccggcgacacccgccgcgacgatctgacgtggaacatcgtggccgccaaagaggggctggtggcgaaaggcgtggatgccgaaaaccagctgcgcgcctttgtggtcagcgaagacaaaatgaaggaagcctttgcgctgctcaaacaactggtaagttgatggttttcccggcttgcggcgtaaacgccttagccgggctacggtattgtcctggtagcccggctaagcgcagcgcaagccgggaacatatccagcctagcgcgccagattgtcgtagccgcgccagcgatagttaagcaccgatagcgcccaacaggcgacaaacaacccgaccaccacaaatccggcgtcgccgaggttgtcgtttaacgcccctacccagcgccatattccgccgctgagcgcaaacttatccatcagcaggcccagcgcttccaggccgccgataaacagcgccaccaccaccgaggtgccggtgatggtcatgttgtaatagagcttgcgctgcggtttgctgaacgcccagccgtaggcgccgaccatcagcacgttatcgagggtatccaccagcgccataccactggcgaacagcgccgggaagaccataatcgaccagacggaaatcccgctcgacgcgccggcggcggagatacccagtacgccgatttcggtggcggtatcaaaaccgaggccaaacaggaaaccgaccaggtacatctgccagctgcggcttatcagacggaaggtcttgccaaacagccagctcatcatgccgccgccgctgacgatttcgtcgctgaccttttcaccgcgcttccatgcctggaagctgcgccacacgctgcgtaaaatcaccaggttgataaaggccatcgccagtaaaaacagggccgacacggcggtgccgataacgctgccggtatcatgcagccagctcatctgcgtgctgaaggcggtggcggtcgcggcaatcgccgccgaggccagcaccacaatcgatgagtggcccagcgaaaaccacgccccgacggcgaaaggccgccgcccctgctgcatcatcttgcgggtcacgttatcaatcgccgcaatatggtcggcgtccaccgcgtggcgcaggccgtagccccaggccagcaggctggcggccatcagcgcgccgctgtcgccaaaggcctgcagcgcccagcaccaggccagtaaattcgccgcgatcaaccccagcaccagacccgcggcgcgcggctgctggcgtaaaactgtcattatcatggttgtattccttgagcctgccagcgggcggcggcgatcaccgcctgaccataggcgattgcgccgtcgccggccggcaactgctgtgcaaacagcagagtaaaatccgccagataaaaggtcaatcgcgccgccagcaggcggttatgcagccccccgccgctgcagaccatcgtgtcgatgccgcggacggtggcgcagtcgcgggccatcgccgccagcccacaggccagggcgtcgtggaatgcccaggctttctgcgccggagtcgcctgccagctcagccattgccgccagaaggtcgctaaatccagcgcgtcgtcgcgccacggcagcgtaaccgggtggctgacgccggggcagctggcggccagcgcctccagccgacaggccgcttcgccttcatagctcagactctccggcgcgcaatccagggcgcaggcaacggcatcaaacagccgtccgcaggatgaggcgcgcggcgcgttaatcccgcgctcgatggcctgcgccagcagcggccagttgcgctggcgcagggtggcggcctgcggataatcctgccagtcagggacaaaggccagacagtgggccagcaaatttcgccacggctggcgtgccgccaggtccccccctggcagcgcgacggccggcagcccgccaagatgttcgcattcgcgatagttgacccgcaggcactccccgccccacagcgcgccgttctcccccataccaataccgtcgagtgtcagggcgataacgtccccgccgtcaagcggccagcggtgctccgccaggcatgccgcggcgtgggcatggtgatgcagcactgtctccagcggcaggggcagggaggccgcccactgcgttgagcgatagccgggatgggcatcaaccaccacccgctgcggcacaaacgcgtaaatgctctgcatcagctgcagggcgctgcgccactgctgttcaacaccttcctcgccaagatcgccaaagtgctggctcagcaccgcttcgctgccgcgcgccaggcagaaggtatttttcatatccgcgccgagagccagcagcggcgggatgtctcctagccctggcggcagcggcagcgcgtccgggacgtagccccgggcgcggcgcagcatttcaccgcttgagcgcaccagtgaatcatccatccgctgtacgatgtcgcgattatgcaagagaaagccgtcggcaatgtcggctaactcattgagcgcctgagcattacttaacgtcggcggacggccgctaaggttgccggaggtcattacgatggggcgcgccaggccctgcagaagcaaatgctgcagcggattagacggcagcatcaccccaacttccgcaagccctggcgctatttcgtcgcacaggccggagacctgcgctttggcaatcagtacgatgggcgccgccggggagcccatcagcgccgcagcggcggcgggtaagcccgttgccgtcggcagcattaccgccagcggttttgccgggcggtgttttcgcgcccgcagcgtggcaacggcagcggggttaccggcatcgcaggccagatgaaagccgccgatgccttttatcgccacgattttgcccgccgccagccgggcgatagccgcctgcagcgccgcctcgccgtccagcgtttccccctctgcccgccattccagtcgcggcccgcagtcggggcaggccaccggctgggcgtgaaaacggcgatcggcaggatcgcggaattccgcctcacaaggggaacagagcgggaacggcgccattgcggtgaagggccggtcgtagggcatggcgcgaataatggtcaaccgcgggccgcagtgggtgcagttgataaaggggtagcggtagcggcgtgcccggggatcgttcatctccgcgaggcacgccgggcaggtcgcggcatcgggcacaatctgagtccgcatccgtcccgccccgctctcgcggatggtgaaatcctgcggcgtggccgcccagcgatagggaatgcaggcggtactgtcgatccgcgccagcggcgggcagtggtcagccagagcggcagtaaaaccgtcgtcgcccccgaccagccgcaccagtacgccgtcgccgtcgttacagacatcgccgcagcgggcctgcgcccgggccagctgccagacaaaggggcggaaccccaccccctgcactttaccgcgaatgcggatttgcaccccgttcatgccttgacttaccaggccagcgccgtacggcgacgtttctcgatattcatctgctcaagtttgttgcggtcaacgcacaccagggcgtgcgtcgggcacacttccatgcaggccggaccgctctcgcggtggaagcagagatcgcacttgttggcttcggctttttccgccacgacgttcagtccggcgccgctatggcggatcaccgggcgcaccaccacctccatcgccccgtacgggcaggcgacgacgcaggttttgcagccgatgcaacgctcctgcatcacatggacaaagcctttatcacggctgatggcgccgttcgggcagacgttggcgcagggggcgtcttcacactgacggcaggcggtcgccgtggaaacattgacccctttgatcacgtgaatacgcggctgaaaggtgtgaggcgtcagggaggcgcagtcctgatgttcctgatgggataccacgcaggccacttcgcaagtgcgacagccgatacatttgctcgcatcggcgataatgaaacggttcatccatttctccagcagtaagaaggttacgcgccggagtatgcataatacgttccaagtttttaatatattgattataaagactattatagctgggctttgctgtcatcgtcagtagtgacgatgacagctgacgacgtcaggcacaggggcccgccaccagcgactcgcgttcaatcagcgctccgggaaagctttgctgaaagttgaattccccgccatccagcataaagatcagccgattgatgctctctttaatcatctccgtcaccggcacccggacgctggcgagcgacggcaccatatacggcgcaagagcaatatcgtcaaaccccaccaccgagacctgttctggcaccttaacgcccagctggtgaagctgcttcatcgccccgatggccatatcgtcattgctcgccaccagcgcgctgtaggtaaccccgcgcttacgcaggctctccacccccgccgccccggtttccggcgtccagcgcccttcggcgataagcgcctcgttcagggcgatgccgtggccagccagcgcgtctttgtagccggcgaggcgttcgacgccggtgggagagtcaagggagccggtaataaaggcgatattgcgatggccaagcgcaatcagccgctccactacccgcatcgccgaggctttttgatcggaccagacgcagtggctggcgtggcggcgcaggcggcgattaagcaccatgatcggctgcgagtggttctcaacgatctcgtccatctcatcgacggtgagaaagcgcgggtagatgatgatcgcatcgcagcgcagatccagcaggtactggatcgcctcccgctcctcttgcgcgctgtgcttgccgtcggccaggatcagctgccgccctttatcctccgtcatccgcgccacgtgatacagcagttcgctaaaatagacgccgtggtacagggtattggtcaccaccaggccgagggtttgcgtggttttggtcgccaggttgcgcgccagcagattaggccggtagccgctctccgccaccgccttaaacacccggtctttggtctcctggctgacatagccgttgcccgacagcacccgcgaaacggtcgccttcgatacccccgcgcgctttgcgacctccagcatcgttgccatgtgattcttcctgttgcaaaagttgcaggcagtgtactgcacgtttcccgcttttacagcactcccctgttcatcaccgcgatccggctcacggcgacgcttagcgatcaaaatcacaaaattgagatcatatttttttatttcttgtgaaattaaatgaaactcaccatgattttgtggaaccggtttcctataaaaacatggtatcgcccggcgatgcggggcggtggcagatcagtaccctattgataaacaggataaaatccgatgtcgaaaaattatgcagccctggcgcaacagatagtcgcggcaatcggcggggtcgacaacgtcgccgccgttacccactgcatgacccgtctgcgcttcgtggttaaagacgacgaacaggtcgatagctctaccctgaaagggctggccggggtgctcggcgttgtgcgcagcgataaccagtgccaggtgatcatcggcaacactgtctcccaggcctaccgcgaggtggtgaatctgctgcctggcgacctgcgcccggctgagccgcagggcaaagcgccgctaaccctgaaacgcatcggcgccgggatccttgacgcgctgatcggcaccatgtcgccgctgatcccggcgattatcggcggatcgatggtcaagctgctggcgatgatcctcgagatgagcggcgcgttgccgaaaggctcgccgacgctgaccctgctggcgcttatcggcgacggcgcatttttcttcctgccgctgatggtggccgcctccgcggcggtgaaattcaaaactaatatgtcgctggctatcgccatcgccggggtgctggtgcatcctgggtttatcgaattgatggccaaagccgcccagggagaacacgttgaattcgcctttattccggttaccgcggtgaaatacacctacacggtgatcccggcgctggtgatgacctggtgcctgtcgtatatcgagcgctgggtggatcgcattaccccggcggtgacgaaaaactttctgaagccgatgctgatcgtgttgatcgccgccccgctggcgatcctgctgattggcccgctgggcatctggatcggcagcgccatttccgcgctggtgtatacgatccacagctatctcggctggctgtcggtggcgatcatgggcgggctgtggccgctgttggtgatgaccggtatgcaccgcgtctttacgccgaccatcattcagaccatcgccgaaaccggcaaagagggtatggtgatgccatcggagatcggcgccaacctgtcgctcggcggctcttcgctggcggtagcgtggaaaaccaaaaacccggagctgcgccagacggcgctggccgccgcggcatcggcgattctggccgggatttccgaaccggcgctgtacggcgtggcggtgcgcctgaagcgcccgctgatcgccagcttaatcagcggctttatctgcggcgcggtggcaggtattgccggactggccagccattcgatggcggcgccggggctgtttaccagcgtgcagtttttcgatccggccaatccaatgaccatcgtctgggtgtttggcgtgatggcgctgtcggtggtgctgtcgtttgccctgacgctgatccttggctttgaggacattcccgttgagcaggccgctgccgacgccagagcgcgccaggccagggcccaggcatcccacgcctgaatacactattgataatgaggtaatgcatggcgagtttcccacagggatttttatggggcggcgcactggccgccaaccagtctgaaggcgcttatcttgaaggcggtaaggggctgaccaccgtggatacccttccccacggcgcccatcgcctgccggtaaaattaggcctggagaagcgctttacgctgcgtggagacgaattttaccccagccaccaggcgatcgatttttaccatcgctataaagaagatatcgccctgatggccgagatggggttcagcgtctttcgcacctccatcgcctggagccgcctgttcccacgcggcgacgaacagcagccgaatccgcagggcatcgccttctatcgctcactgttcgaggagtgcaaaaagcacggtatcgagccgctggtcaccctgtgccattttgacgtgccgatgcatctggtgatggagtacggctcctggcgcaaccgcaaaatggtggattttttcagccactacgcccgcacctgctttgaagcttttgacggcctggtgaaatactggctcaccttcaatgaaatcaacatcatgctgcacagcccctactccggcgccggtctggtgtttgaagagggtgaaaaccaggagcaggtgaagtatcaggccgcgcatcacgagctggtggccagcgcgctggcgacgaaaatcgcccatgagattaacccgcaaaatcaggtcggctgtatgctggccggcggtaatttctacccttactcctgcaagccggaagatgtatggatggcgctggagaaggaccgcgaaaacctgttctttatcgatgtccaggcccgcggcgcctatccggtgtgggccgcgcgggtgttccgggaaaaaggggtcacgattgcgaaacagccgggcgatgacgagatcctcaaaaacaccgtcgatttcgtctcctttagctactacgcgtcgcgctgcgcctcggcggagatgaacgccagcaacaccaatgccgccaacatcgtcaagtcgctgaagaacccgcacattccggccagcgaatggggctggggcatcgacccgctgggcctgcgcatcaccatgaacatgatgtacgaccgctatcagaaaccgctgttcctggtggaaaacgggcttggcgcccgcgatgagatcgatgccaatggggacatcaatgacgactatcgcatcagctacctgcgcgagcacatcagggcaatgcgtgacgctatcggcgacggcattccggtgctgggctacaccagctggggctgcatcgatctggtctcggcgtccaccggcgagatgagcaagcgctacggctttgtctatgtcgatcgcgacgatgccggcaacggcaccctggcgcgtaagcgtaaaaagtcattcttctggtaccagaaggtgatagccagtaacggcgccgatctcgactaagcaccctcgcccacgcgcgcccgttccccgcgatagccgggggacgggcgtcggctatctgttgcatccattacatgcttttttctcgagcctgattccagtttctggtttgccacctgtttacaataactggtattttatccagtacttttaccggggtatcttcagcaaggagcacatcatgagcgcacagcaccctaccgcagccagagggatagccagggccattcgccagttaaccgtgggatatgtcagaaaacgccatgaggaccgcaaaacgcgggagacgcggcgctacacccgccacgcggcattaagcttaaacggcgactggctggagcaggcggggtttccggtcggcacgcaggtcagagtctcggtgtcgcccggtaaattagtgatagagaatcttgagctggcagcgccgggaacggggctcccttccggccagtcgtgcgccggcggagagcccggttcgccgcagggctagtcgtccgcggcctccagctgagtaaagccgcccttgcccttccagcctgccaactgctgatacacccgggcaacggcctctttcaccggctgggtcatcggataataaaaaccgacgatatccggctgaatgccgaggaaaatcacctcgccgacgtcttctttcagctgatcgaccagatagttgagcggcatgttatgggtggtcatcataaacatctcggcgatgtcgtcgggatcgatgatgcgaatgtcgccggggtttaggcccatatcggtggcatcgacaatcagcaggcgttcggggcgtaattcgcggatcgccacgatgtcgttttccggcgcgctgccgccgtcgatgaccacccactggccggccgggttcgccgcgcacatctccgccagcagcgggccggcgccgtcgtcgcccatcatgctgttgccgacacagagtaaaacgtcagtcacgtaatctcctcaccatcaggtagatggcgctctcctggtgaatatcatgcagcatgctgagcagggttttgctccacgcctgctgctgcggggtctgcgcggactgcgctttatcaaaggcgttggccagcatcgccacatgactgctgtcgatgacgatttcgccatacttcggcacgccctccattttgcgccgcgcggcgcttccggcctcaagggtggcgatccatgccagatacgcgtcccacgggcagctcagcgccgcctccagacagtcgatgacgccgaggtggtggccaatcgccaggctgtaatagaccacctgctgcgcctgatccggcgtggcgtcgttctcatcaataaatttacggctcagctgactgaacaccaccgtctcgctcatcggatacgcgccccctcgaccacctggttgagatgggtgacgatctcggtcagacgcggatctttctccgcctccagccagcgcagcacctggctgtcgccctggccaagcagacgcatatagtcatcggcaatctgccgtccatagcgatagcccgccagacgccgcgcttcgcgatcgatgcgcacccgcagaggctgcaccatatcggcatgcagcagctcggtcggctgttcgtcgagctcacccggcagacgggcatgaattttctgctccagcaggccaagcgccatggcgaagccgtacagcgtggcggctggcgtcggcgggcagcccggaatatagacgtcgaccggtacgattttatcggtaccgccccagacgcagtacaggtcgtggaagatgccgccgctgttgccgcaggcgccgtaggagatacagatcttcggatccggcgccgactgccaggcgcgcagcgccggggagcgcatcgcgcgagtcactgccccggtaaacaacagaatatcggcatggcgcggcgaaggcaccaccttaatcccgaagcgttcagcgtcgaacagcggcgaaagggtggcgaaaatttcgatttcgcagccgttgcagccgccacagtcgacgcggtagacgtaggccgaacgtttaatcttcttcagtagcgaggccttcatgctggcgatggattcatccaccgtcatcggcacgggaatgccgttttcatcgcgcgggccaagtaaagtgctcatcagctggcctccctcatgtggcgggtcagttcaatacgatcggacggcaccaggcatttctggcgcttgcattccgggcaggtttcgaagctttcgcggtgcagctcggcgcgggtatcgccgttatgcttgagcagcgcgatggcgtagtcgatctccttctgcaccgcgaacggacgctggcactcccggcagtggcagatagcgaagcgcgactgctggaggaaatcctctttcttccacaccgccagctcatactccggcgacagcttaatcgccgccgtcgggcacacctcttcacagcgaccgcagaagatgcagcgcccgagattgaactgccacgccagctggttagtggccagatcgatctcgaccgtcagggcgttcgacgggcaggcgttcacgcaggccgcgcagccgatacactgctgtggcgtatgctccggcttgccgcgaaagtttttgtctaccggcatcggctccagcgggtaggcgtgcgtcgcggtgccggtcttaataacttttttaataaaggtaaacatggcgattccttatttcagcggcgagtttttacgctcgatgctgtagcgctccagctctttgtatggcaccactttgctcttcttcttgcgtacatcgaccacggtcatgcggtcagtacaggagtagcacgggtcgaggctgccgatgatcagcggcgcatcggaaacggtgttgccgcgcagcatatagcgcagggtcggccagttggcgtaagtcgccgcccggcagcgccagcggtacagtttctggttgtcgccggtcatgctccagtggatatcgtcgccgcgcggcgcctcggagaagcccagcgcgaagcggtgcggaatataggtgaacccctccaccatcagcgggccgcccggcaggttatcgagaccgaaatcaatcatattcagcgcggtgtaaacctcgttgatccgcaccttgaggcgagatatcacgtcgcagccctgctcgctgtggacttccatcggcagcaggccgtaaccgacaaacgggtggtcggcgcgggtgtcgcgggcgtggccgctggcgcgcaccatcgggcctacgttgctgaagtcgcgggcgatttccgggtccagacggccaataccgacggtacgctgttccatattcggcgtgctgagcagcatatccaccagctcctgcacgtcgcgacgcatctgctgcgccagctgacgggtctggatcatgtcctctttcagcaggtcgcggcggatcccgccgatcaggttcaggccgtaggttttacgcgcgccggtaaggatctctgccatcttcatcgaggtttcgcgcacgcggaagaactgcataaagccggagtcaaagccggtaaagtggcaggccagaccgaggttcagcaggtgcgagtgcaggcgttccacctccagcagaatggcgcggatcatctgcgcccgctccggcaccacgatgcccatcgcgttctccaccgaggtggtgtaagcggtgctgtgggcgaagccgcagatgccgcacacccggtccgacaggaaggtcacttcgttataacccatgcgggtttccgccagcttttccatcccgcgatggacgtagaacaggcggtagtcggcgtcgataatgttctcgccgtcaacgaacaggcggaagtggccaggttcatcagaggtgacgtgcagcgggccaatcggcaccacgttgtttttcttgctgccgagctcgttaataaactcgtaggtttcggcgtcggtggtcggcgccggacgctggcgataatccatgctgtctttgcgcagcggatagagttcgtccggccagtcgtccggcagcaccagccggcgttcgtccggcaggccgaccggcaccaggccgtacatatcacgcacttcgcgctcgccccataccgccgccgggacgcgcggcgtcaccgacgggtattccggtttgttggcgtccacttccacgcgcacggtgatccagcatttggtgccctgctccatcgacagcacgtaatagaccgcgtagtggccgttgagcttacgttcatcgttgccgaacagcaccgacagccagccgccctgctggtagtagagaaactccaccacttccggcaggtagttgaccttcacggtgatggttaactggtctttggtctgccaggcttcgtccagcaccacgccgggaaaggcctggtgcagcgccgcaaggtagtgttgacctattttttcttcagacatgctcaaactctcttaatcacgccaccagcaaggagacgaaagctaaaaaggcgaaaccaaacccggcccaggtgacgcgggaggtggcacaaaaacgcagacgcgccatgctgttttcaaacagcgcgataattagcaccccaaccaccagcttaacgatggcgaccaccagcgccagcagcaggccgccgacgctgaagctggtcatctggccccacggaaagaagaccccgacaaacatctgcagcaccaccagctgtttgaggctgatgccccacttcaggatgccaaagccgctgccgctgtattccgacagcggcccttcctgcagctcctgctccgcttccgccagatcgaacggcagtttgcccatctcgataaaggtggcgaaggcgcaggcgcataacgccagaatcagtggaatgctgcgcgccgccggccagtggtaaagggtatcggtgatggcgctgatatgggtcgagccggcgacctgcgccgccacccacaggcccaacagcaggatcggctccaccagcacgccgagcatcgcttcgcgactgctgcccagcgcggtaaacgggctgccggtgtccagaccggaaatggcaaagaagaaacgggcgatggcgaacaggtagatcagggtgatgagatcccccagcaccggcagcggggagtctaccgtcaccaccggcagcgcggtggcgatggtcagcatcacgcccaccatgacgtacggcgtcaggcgaaacacccagcccgaggcgtcaggaccgacgatctggcggcccagcagtttcaggatatcgcgatactcctgcagtacccccggtccacggcggttatgcagccgcgcgcgggcgacgcgaacgattccggacaacagcggcgcgacggcaaacagcaccagcgcctgtagcaatgcaattaacagactcattctcaggctcctcgcgaaatgacaatcaccaccagcaccgccagctcaaccagcgcgatcccgcgcagcagcgccggcgccgaggccgattgccagcccggcaccagacgcaccgggttcagccagtgacgcagcttcagcaacggcgcaaaggcctctttcaccggcatggcaaagccgtgggccgttaccaccatcgactgctcgtggtcgtaaccgcagacccacgccgcgccgcgcgagcgcgccgccaggcgatcgcctttaaagaagatcatcagcaggaacggcagcagcgggcaggcgataagcagcagcgcgatcatcggctgcgacaccacgctcgatacctgagcctgcaccgggaaggcgccgctcaccagcggcagcagccacggcgcggcgatgccgccaacgaggcagaacacagccgccagcaccacgctcagggtcatcagccagggggcgcaggtggcgtattccgcctctttcgtccgcggcgcgccgaggaaggtcacgccgtagactttcgccatacacatcaccgccagtgcgccagtgatcgccaggccaacggccagtagcggccccagcaaacggccgataaacaggtcgccagtgctcattttgaagaaggattgatagataacccactcgccggcgaagccgttcagcggcggcagggcagccattgccatcagccccaccagcatggcgagggagatcagcggcatttttttaccgatgccgcccagcttctcgatatcgcgatgaccggtgcggaaccacaccgctccggcaccgaggaacagcgtggttttgaacaggctgtggttaatcaggtgatacatgccgccgataaagcccagcaccatcagcgtgctgttgcgggtcgccacgccggtgacgaaggcgcccagccccagcaggataatgccgatattctccagggtgtgataggccagcaggcgctgaatgttatgctccatcagcgcatacagtccgccgataaaggcggtgatcatccccagcgccagcagcatcacgccccaccacagcggcggcacgccgccggccagcgaaacggtcagcatgccgtacagaccaaccttcattaccaccgtggaaaacagcgcggcggccggcgcgctggccccggcgtgagcctgcggcgcccagccgtgcagcgggatcgccccggccagcagggcgaaccccaccagacccggcagccagagcagcgggttctgcatcatatccaccgcctgaaggttgatctgcgccagctcgagggtgccgtaggttgaccacaccagccagcaggtccaggccatcagcagagtaccgagacgccccagggcaaaccacagcttaccggaggcggcgcagccggtgagaaacgccgcgcagagcgccatgatctccgccatcaccaccagtgaaccgatattggtcaccaccaccgcgcaggtcgcggcggccagcagcaggttgaccagcgggccgttggccttcacctgcgggtggcgatgccagctaatattgaacaatgacaccggcagcgccgacaggccgatggccagcagccacagcgcgttgacgccccccacccgtatcgtcaggtggagaaactgcagcatgccgccgtggatccgctccggcatcagcagcgcggcgccgccggcgaccaccagcatggcgctggccaccgcgccgccgatcccggcaatggcgccgctgagcggtttgcgcatggcaaacagaaaggccagtacggcgctggcggcataccacgccaccgcctgattcactaatccaattacactcattccctctccccctgttgcgcctggaacagcgacaagtcgccaaggtcggtattaaaggtcagctggcgtttacgcttgctggcctgggcgatatcacggctatccaccagcatcagcgcgttggtcggacaggtccgcacgcaggccgggccctggtcatcgaagtggcagaggtcgcatttcacggcaatagcgcgcacgcccggtacccagtcgagcagcgagctgacgcgcgccggcgccggcggcgcggggggcgccagccgggtattggcattcgccgggatatccagcgggcggctgccggaaaattcaatggcgccgaacgggcaggcaatgccgcacagtttgcagcttacgcacaggctctcgttgagctggaccgcgccatcgacgcgctggatggcgttaaccgggcagacggtggcgcagggagcatcttcacagtggtggcacatttgcggtgccgattctttttcattacgcatcacctgcagccgcggcatagcctgcaggccgtgctggcgatgcgtctcagagcaggcggcttcgcaggtgcggcagccgatacagacagtggagtcagcaattacaaaacggttcaccgggtcatcctcgggtgaaagtcatttttgacgaaatcaggttgcgcaggtgtcattttcgacacgtgtcgacaccttacgatcagtgggtcagcgccagatggcttaaatccaccggttggtcttgttccatggcgtcatacagacggtcatagacggtggcgataatcgccagatagtgctccagcacctggtcgcgggagcggttgctgatgcggccgtccaccgtgccatccattgcgagggtggcctgagcaatcagatacttatcaccgccgtttttgttttcgacgtagtactcgatggtgtggctgttgaagccttccgcgagggcgacgaacacctgaaaatggccgaacagcacgaagcacagctctttgtccggcgcgcagctcatcgcgtgatgcaggcgggccttcgacaaggtgatcccctgaaccagcgagttacagtagatgtgccactgctcctgctgctgccggtgacggtcggcgatgtaatccgccttttcacttatttcccaaatagtcatatcggtttctccgtagcatgagatgcaccctctaagcatttttcatgccagattttatttaattgatttaactatgtttttatatcgccctctgccgatacgacatgtcgatgacagccccggggcgtcgacatcgacattgactgccacgacgatttcattctggcatcgttattgcatagaaggcgcatcgcgatacggaggcgactatgcacgaaatcaccctcagccagcgggcgctggaaattattgaacaacaggcgcagcaggccggcgcgcggcgggttaccggcgtgtggctcaaggtcggcgcattttcctgcgtggaagccagcgccctgaccttctgctttgagctggtctgccgcggcacgctggcggaggggtgcgaactgcatatcgccgaacaacaggctgaatgctggtgcgatcgctgtcagcagtacgtccatcttgtctcgcagcacgttcgccgctgcccgcactgcaataacgaccagctgcagatcgtggcggatgatggcttacagattcagcgtttagaattggagtaaattatgtgtacaacatgcggctgtggcgaaggcaacctctatattgaaggagacgaacgaaacccgcattccgcgttccgcagcgcccccttcgcgcccgccccacgccagacgatgaccatcaccggtgtcaaaatcgaccacttcacccccacccgcacgccagagggcgacctgcattacggccacggcgaagcgggtacccacgccccggggcagagccagcggcggatgctggaagtggagatcgacgtgctggataaaaacaaccgcctggcggcacgcaaccgcgcacgcttcgcagcaaaacagcagctggtgctgaatctggtttccagccccggctccggcaaaaccaccctgctcaccgaaaccctcacccggctgaaaggacgcgccgactgcgcggtgattgaaggcgatcagcaaacggtcaatgacgccgcccgcattcgcgccaccggcaccccggcgattcaggtcaataccgggaaaggctgccatctcgacgcccagatgatcgccgacgccgccccgcgcctgccgctggctgaccgcggcattctgtttatcgaaaacgtcggcaacctggtctgcccggccagctttgatctcggcgagcgccataaggtggcggtgctgtcggtcaccgaaggcgaagacaaaccgctgaagtatccgcatatgttcgccgccgccagcctgatgctgctcaacaaagtcgacctgctgccgtatctcaatttcgacgttgagcggtgcctggcctgcgcccgcgaggtcaatccgcatattgaaattattcttgtctccgccaccagcggcgaaggcatggagcagtggcttacctggctggagacgcagcgatgtgcataggcattccgggacaaatttgcgccatcgacggcgtgctggcgaaggtggaagtttgcggtattcagcgcgacgtcgacctgacgctggtcggcgccgttgatgagcagggccagccgcggctcggccagtgggtgctggtgcatgtcggcttcgccatgagcgtcattaatgaagccgaagcccgcgacaccctcgaggtgctgcaaaatatgtttgacgtggagccggacgtcggcgcgctgctgtacggcgaggagcgataatgcgttacgtagatgaataccgcgcccccgaacaggtgatgcagctggtggcccatcttcagcagcgtgctcgtctgctgccgcacaccgccgcgcgaccgctgcgcatcatggaggtctgcggcggccatacccatgccatttttaaattcgggctcgaccaactgttgccggagaacatcgaatttattcatggtcccggctgcccggtgtgcgtcctgccgatggggcgcatcgatgcctgcattgagattgccagccgcccgggagtgatcttctgcaccttcggcgacgccatgcgcgtgccgggtaaaaacggctcgcttctgcaggcgaaagcccgcggcgccgatgtccgcatcgtttactcgccgatggacgctctgcggctggcgcagcaaaatccgcagcgcgaggtggtcttttttggtctcggtttcgaaaccaccatgcccgctaccgccctgaccctgcgtcaggcgcgagagcgcaacgtcgataacttctactttttctgccagcacatcaccctgctgccgaccctgcgcagcctgctggaccagccggagaacggaatcgacgcctttctcgccccgggccacgtcagtatggtgatcggcaccgaggcctacggctttatcgccagcgactatcaccgtcctttagtggtcgccggtttcgaaccgcttgatctactgcaaggcgcggtgatgctggttgagcagacaatagcgcagcgcagcgatgtggaaaatcagtaccgtcgcgtggtgccggatgagggcaacccgctggcgcaggcggcgatggccgacgtcttccgcctggatggcgacagcgaatggcgcggcctgggggtcatcagcgactccggcgtgcagcttacgccagcctatcagcgcttcgatgccgaggcgcattttcgcccggcgccgcagcgcgtgtgcgacgacccgcgcgcccgctgcggcgaggtgctgaccggccgctgtaaaccgcaccagtgcccgctcttcgccagcacctgcaatccgcaaagcgcctttggcgcgctaatggtctcctctgaaggggcctgcgccgcctggtatcaatatcgcagtcaggaaaatgaagtatgaaaagcgtccagttagcccacggtagcgggggacaggcaatgcagcagctgatcggcgacctgtttatgcaggccttcgccaacccctggctggcggagcaggaggatcaggcgcgcctcgatctggcggcgctcgccgcccagggggaccgcctcgccttctccaccgacagctacgtgattgacccgctgttctttcccggcggcaatatcggcaagctggccgtctgcggtaccgccaacgatgtggcggtcagcggcgccatcccgcgctatctttcctgcggctttattctcgaagaggggctggagatggccaccctggaagcggtggtcgccagcatggccgacaccgcccgggcggcagggatcgccatcgtcaccggcgacactaaagtggtgccgcgcggcgcggcggataagctgtttattaacaccgccggcatcggcgccatcccggcggacgttcactgggggacgcagcagattagcgccggtgatgtgctgctggtcagcggcacgctgggggatcatggcgccaccatccttaacctgcgcgagcagatggggctggacggcgcgctgtccagcgactgcgcggtgctgacgccgcttatccagaccctgcgcccgctgagcggagtgaaagccctgcgcgacgccacccgcggcggggttaacgcggtcgcccatgagttcgccgccgccagcggctgcggcatcgaactgcaggaggcaacgctgccggtcaacgacacggtgcgcggcgtctgcgagctgcttggtctggacgccctgaacttcgccaatgaaggcaagctggtgctcgccgtcgcccgcgacgaggcggaaaacgtgctggcgcatttgcggtctcacgcgttaggacgcgatgcggcgataatcggcgaagtggtcgcccgcccgggcgtacgttccgttgggctgtacggcgtgaagcggacgctcgatcttccccacgccgaaccgctgccgagaatttgttaacgacggcgtcgggtcccggatagcggctggcgccttatccgggctacaaaactgcgcgcacatgtagcccggctaagcgcagcgcgagccgggaaaaagccagcgtaattattttgcccaaaccagcgggcgcccatggatgggttaaagcggcaataaccgctttattaacatactattatttgtaccatcattttcttatgcgccgcgttgtcggcgcgttttggacgtaagcaatgtcgtatacaccgatgagcgatctcggccagcaggggctgttcgatatcacccggcttttattacagcagcccgacctggccgcgctaagcgaaaccctgacccgtctggtgcaacagtccgcgctggccgatgaggcggccatcatcctgtggaacgcgggtaatcaccgcgcggccaggtacgcctgcgatgaggccggccatccggtaagctacgaggatgaaaccgtcctggcccacggtccggtgcgtcgcttactctcccggccggatgccctgcattgcgatcatgaaacctttgccgatacctggccgcagcttatccgcagcggactgtatcatccgttcggttactactcgctgctgccgctggcggcggacgggcggatcttcggcggttgcgaattcctccgccgtgacaaccggccgtggagcgagaaagagttccagcggctgcataccttcgcgcagatcgtcgccgtcgtcaccgaacagattcagaaccgggtcagcaataacgtcgattacgatctgctgtgccacgagcgcgacaactttcgcatcctggtggcgatcaccaacgcggtgctctcgcgactggatatcgacgagctggtcagcgaggtggcgaaagagatccatcgctacttccggatcgacgccatcagcgtggtgctgcgcagcgaccgcaaggggaagctcaacatctattccacgcattatcttgacgccagccacccggttcacgaccagagcgaggtggatgaagccggcaccctcaccgagcgcgtgttcaaaagcaaagagatgctgctgcttaatctgcacgaacatgacactctcgcgccgtatgagaaaatgctcttcgagatgtggggcaataagatccagaccctgtgcctgctgccgctgatgtccggcaataccctgctcggggtgcttaagctggcgcagtgcgacgaacaggtcttcaccaccaccaatctcaagctgctgcggcagatcgccgagcgggtgtcgatcgctatcgataacgccctcgcctaccgcgaaattcagcgcctgaaagagcggctggtggatgagaacctcgccctcaccgagcagctcaataatgtcgagagcgaattcggggagattatcggccgcagcgaggcgatgaacaatgtgctcaagcaggtagagatggtggcgcagagcgacagcaccgtgctgatcctcggcgaaaccggcaccggcaaagagcttatcgcccgcgctatccacaacctcagcggacgcaacggtcggcggatggtgaagatgaactgcgcggcgatgcccgccgggctgctggagagcgatctgttcggccacgaacgcggcgcgttcaccggggccagcgcccagcgtatcggccgcttcgaactggcggacaaaagctccctgttcctcgatgaagtgggcgatatgccgctggaactgcagcccaaactgctgcgcgtcctccaggagcaggagttcgaacgtctggggagcaataagctgattcagaccgacgttcgattgatcgccgccaccaaccgcgatctcaagcagatggttatcgacagggaattccgtagcgatctctactaccggctcaacgtgttcccgatccatctgccgccgctgcgtgaacgtcccgacgatatcccgctgctggtgaaggcgtttacctttaaaatcgcccgccgcatggggcgcaatatcgacagcattccggcggaaaccctgcgcactctgacgcgtatggagtggccgggcaacgtgcgcgagctggaaaacgttatcgaacgggcggtattgctcacccgcggcaacgtactgcagctctccctgccggagcgggatatcgtggaagccccgcggacgccggcggtcctgcctgaggaaggtgaggatgaatatcagctgatcgtccgggtgctgaaggagagcaacggcgtggtggccgggccgaaaggcgccgcccagcggctggggctcaagcgcaccacgctcctgtcacgcatgaagcggctgggtattaataaagacgaactggtgtaacctcgcgcgctccccctttccgcgccggtgagagggagcgctggcgcagcgcgctatttatcgctggtaaaaccgttgctggtcgccagttcggcaaaccacagcgcattgcgttttatctgtcgctcgccggtctccagatccagtcgccagaagccgtagcgccgtttgaaggcattgatccacgaccagttgtcgataaacgtccactggtgcacgccaaagcagttcgcgccgtcggctatcgcccgatgcaactgcaccagatgctcctccatcagctggatgcggaaagtatcgtctatcaccccgtccgccccgggctcgccctctgattgtcgatccatcgcgatgccgatttccgcgagataccacttaatattgccgtagttatcgcgaatattggcggcaatgtcatagatcgcctgcggcaggatctcgttgttatcacgataaggattaaagcggccctgcgggttcaccgcgttttcgaaatagtattccggggtgaaataatcgaggtcatattcgctctcacgcgcttttacccgccgcggcacgtaatagtttaccccaagaaaatcgatatccgcgctgaggatcaacgccgcgtcgtctttgctggtcgtcggcaggcagtcgtgggcggcaaggatctcgcacagcgctttggggaattcatgttttaccagcgggtcaaggaagctgcggttaaaaaacaggtcggcatacccggcggcttttttatccgcgtcgctgtcggtgagggtatagctcggggtcaggttgagcaccacgccgatctcgcccgccagcgccagttcacgataagccgttaccgctttggcgtgcgccagcataatgttaaacgccacctgcgccgccagccggccatctttcttacatggatagtggaagtcgtacaggtagcctccctcaaccggcacaatcggctcgttgaaggttatccagtatttaaccttatggccaaacaggctaaaggcggtgcgggcaaagcgggcaaacagctcggctacgtgcgccgattcaaagccgccgtactgtttctgcagcgcttccggcatatcaaagtggtagagattgatcatcggctcaatgccgttagcgatcatctcatccagataggcgtgataaaaacgcaccgcgtccgggtccggcgcgccggtttccaaatcagcgatcagtcgtgaccactgtatcgaggtacgaaatgagttgaagccggtctgtttcatcagcgctacgtcctgcggatactgatgataagtatcacacacggtctgcggccctacctgctgataaaatcgctccggctgttcggcaaaccaactgtcccaaatggaacgatggcgcttattggtgaccccttccgtttgcgggccggacgccgccgccccccacaggaacccttgcggaaactgatactgctgcataacctctccttcgaaaaaaggctgcgcccgtctggcgcagcctgaacgtactactcagcgaccacttcgatcgatttaatgaacatatagccccagtcgccggcgaagcggccgaagtcaatctgattgctcccggctttaagcgtcaccggtatccgcaactgctggccctgctcatccgtctgcgggaaggccaccgcctgcggagcgaccccgttgacgacaaacgagttctgcttaccgccccatttgccgttgaaggttacattgagcaggaactgaccgctccacggcgcctgcacctgccagctgaccttatccccctcgttggcaaatgggccgaggaagccgtcctcaccaactgtcagcgcgtctttatcactcttcatcaccgtcagccgcccctcagccacgccataaacttcgccgtgataacgacaaaaatccgctggcgctttccccgtcgcctcgcccaccgtcacggtcacggttttgctgcttttcaacagcccatcgtccgccgtgaacgtcagcgcataggtgcctggcgccgtaaaccaggcccgggtttgagcccgatcggcatggcagaaatgcacctggccatcgccggcgtgctgccagcccaccttaacctctcgcgacggcaggccatcgtcctgccagttggccgtaagctcgacgccctggtcctgcgtggtggttagggccggttccagcgtgacaaccggcggctgattctcctcgctatgctgcacgctaatcacattggaaggggccgaacgaccgctctcgtttttcgccgtcacccggtagtaatacgtgtgcccgagctgaagctgacgataatcgtcgcggaacagaaccatggtttccggattccattcgttaacgccatcggagatatcccggcccaccaccgtccacggcccggtcggtgaggcggcgcgttcgacatcgtagctgcgtcccaccgcagcgcccatccagttgatcgcgaagggcgaggtggtttcgcgcagcaaaggcgcctccggcttcggtagcggcgccatcgtctgctgcccggccatctgcgccgcggcggtgcgcaccagatcgaccaccgcctgctcctggttcgcttcgccttctttggcaaaccccggcaggtggtagctatagtgctcggtcgactccttatgccagtagaagccgccgtcgtgacgatggccgcggaagccccagataagcccgccggcggcttgcgccccgttgacctcgctgtgaacaatcgactgcataatggcgttcagttgatccgccggcagcaggccaaactcgccgacgagatagactttttgtccgccgacggcgcgcagatcctgcgtcacctgcccgggatggttattatcggcattggtgtaatagtgattgctgacgatatccacattggggtcggtcaacgcaaacggattaattttcttataggtgccatccaccaccagctgatgaggggcccactttttaatccacgccgcggtctgatgcaggaaatcggcgttggtatcctccagctcgttaccggtttcccaggccatgatcgccttttcatcataataggcgcggccggtgacggtatttgtccgggtgatgacctggcggatcacatccagataggctttgaaggtcttgctatcggtccgataaaagtcttccgctttttcatgatagaacgccgccagctgctcgcgcccgccccaccaccaccagtggtcgataaacggcaggatcagacgcaatccctgtttatccgcttcggcaatcatgttgtcatacacccgcatggctttctcattcagccgcggcatgccgtccgccgtttccggcgccagaatatgggtctcgcgcccgcaggccttatcaaattcctgctgcaccgacagcacgtagacgcgctgggctttcgccccggtttgcaccatcgcctggatccagttttgctgctcctgggccgttggccatttaaagtattgcccccagccgcgcgggtctgccctgcaggggccgcgggcgtcgtcttcaatgcggtgcagctccggcgcgtggatcccggcgaaacgaaacaccttgtcgccgtccttgagggtggcgccgtcgcgagtgataaagtgcgtaaagtgcgagcgctcggcggccagcgccccgccggccgccagcgcggacagcagccccatcagcagcaggtttttcatcggcttcatcgttctctctccttagaaccagacctcggcctgtacgccgaagttaacggtgtcggtagagccactgcgggaatacccgccggcggtgatggtattggtatcccagttgtagttaccgtctaatgcatcggagacacctttatcccacttcgcgtaggtgacgaagaagcgcagctgcggacgcgcccagaaaccggagtcaaaggtcagcgttggcgcaacggtgactttggtcaggccgcctttgcctttgccgtttactcctttgtagtttttgtcatccaggtattcgtagcccagctcgtactgcatggcaaagttgcgggtgatctgatgataagggcggataccagcgacccacatcgagcgtccccagccattttcatcttctgtccaccagcggtagtttttatctttctgccagaaagcgaaggtcgagatctccaggtcgcccatcgaggccacgctatccagcaccactcgccaggactgggtgttttccaggttggcccagccccagccgtttttacccagcgagtcacccgccgccagccctttcccgtactgcaatgcgaggcgggagtatcctccggtcagaccatagaagccgtcaaagttataaataccggtcacgccatagcccttctcggcggaagttggatggttttcgttacggttcatgtggtggccgatcagctccagatcgaagcctgtccccgcgatctttttcagccacaggttgagagaatagtcatccgggtagccctgatctcccttatccaccgggtaggctttggtttcatcggtgggtgaaaaggcgtacaccccggcgtcgaagcgggcgaagccgagatccatgttgtcgaagccgccgccggtgccgttgtactgaatgtactcccagtcgaactgatggctggaggtgttggagctgctgtagcgcttaccggcccagaaggtcatctccggcgcaaaatccagattgctcagctcggcgaacccttcacgaaactgtacgtcatggccatcgtcatcctgacagttccagtcggaggtgcatttcgactggtgagtgaggttggcctgcactttcgccaccacgccgctgtccgccgtcagcgtcacggtggggatcagttcgatcttggtgtcttcttcgttgcccagtcgccacttaccgtccggcatcaggccgacggagtccgcgcggttgccatcggagttcgccaggatcccggagcggatatagccatgcagcgcaaaatcatacttcggatcggcgcaggccgggctgctggcccctgccagcgagaggagagccagaggtattgagtgtttcagctttatcattatttttttcccacgttatgtttgttaacacgaaccgataacggaggggaaatttacggatcaaaaacggaaatgtacatccacttacggaaagcgctttccataattgcctatctggttcacaaaattagctctgcggcgaatatattcgtgagactgatcacataaaatgacaagaatgccgccgggcgctggcagtggagcggaaggaggaggagatgagcaggtgccgccgggggataagccgccgacggcgagaggatcagcgttcggtttccgcgagctgacgttcgtacactttgaagaaggggcgatagagcatccaggcgttaaacatcgcgaacaggctcatgcacaaatttttccagctgccgttcgccgaccatgccgcccccagcggggaaggcatcgaccatggcagcatcgccaccgcgcggtcgaggatacccagctgagttaaataccatgcgatacaggcatttatcagcggaacaaagagaaacggcagtaaaaaaaccgggttcatgatcaccggaaaaccaaacagtatcggctcgttgatattaaacagcgacggcagcaggccaatcttggccacgcttttcagctgccgcgagcggctgcgcatcgccatcagcaccagaggcaaagtggagccaataccgccgatcagcaggtaaaaatcccagaacccctgcagataaatatgcggcagcgttggcgaacccgccgccagcgcctgctgattttcaaacagataggtcatccagaaggggttcatgatcccggtgatgatcagcgcgccgtggataccgataaaccagagtaagttacagataaataaagagataagtaccgccatcagcgtgtcggacgccagcaccagcggccgcaccgcttcgctgatcaactccggtacgatgcgtccggtggtctgcagcagtatggcattcatcacgcttatcgacagcatcaccaccagcagcgggatcagcagttgaaagccattgcgggtcatcagcggcacttcatcaggcaagcgaatacaccagccttttttgtaaaaaaagggaattatctcaatggaataggtgctggatatcagggcggtaaatatccccataccgccgagataaacattgctcaccgcagtctcgcgaaagccgataaacagcagaaaagccagacacccggttaaaccgcagagccgttccggcagacggtactgcttggcgagactggcgctggcgccgaaggcaacaatcagcgccaccaggccaatggttagctgaaaggtcggcagcaggataggccgcagcagcaaatagacctggccgaaacgcgaggcgccgtcgatggaaacgggcggaaacaaaatgggaactaacaggctgccaacaatcacaaagggcatagccagcgcaaagctatcgcgcatcgccgtaatgtggttgttgcgcgtcagaacgttcgccagcggcgccagccgctgctcgatgatgtccacggccacattcattaactgaatgttcatactcctacctttgcgaatggttgtctcgccgggatgatcgcccacaacaccggaaagtgaaagcctgccataggtgatcatggtcacaattaataaatccacaaacggaaagcgctttccgtaatgcatccattttgactatagtccgctcatccaacctcatcaggagcggtaattatgaaaaaaattatgttgtgttgttcagcaggcatgtccaccagcctgctgatgaaaaaaatgattgcggaagccgaacagcggggcctgccggtagagatcaacgcctatggcgtagcggagttcgccgaacaggttggccattatcaggtggtgctgctggggccgcaggtgaaatacatgcagcaggacctgcaaaaacaggcggataaatacggtatccgcgtcgaacccatcaatatgatggactacggcatgcaaaaaggcgccgcggtccttgatttcgccctttcccttatcgaaaacaagaactaaggaaagatcatgagctctctgtacgctaaactgatcgacgtgatcgaacggcagatcacgcctatggccggcgcgatcggccagcaaaaatatgtcacctcgatccgcgatggctttatcactgccctgccctttatgatcgtcggctcgttcctgttggtgtttatcttcccgccgttttctccggatacgacgtgggggtttgcccgcgcctggctgcaattttcgctcgatcatcgcgatgcgctgatgctgccgttcaacttcagcatgggggtgatgaccctgtttatcgccgtcgggatcgccgccagcctcgccaaacaccatcatctggactcgctgaccgccgggatgctgtcgctgatgtcgtttctgctggtagccgcgccgctgaaagatggccagatctctactgcctacttctccggtcaggggatctttaccgccattctggtggccatctattccaccgagctgtacgccttcctcaaacggcataacatcaccattcgcctgccgccggaagtgcctgccggggtggcgcgctcgtttgaaatcctgatcccggtgctggcgatcattctgacgctgcatccgctgaacctgtttatcgaagcccagctggggatgatcattccggaagcgatcatgtcgctggtgaagccgctggtcgcggcttccgatacgctgccggcgatcctgctgtcggtgctggtctgtcaggtgctgtggttcgccgggatccacggcgcgctgatcgtcaccgggatcatgaacccgttctggatggccaacctgtcggtcaatcaggcggccatggccgctggcaccgctatcccgcacatctatgtccagggcttctgggatcactatctgctgatcggcggcgtcggctccaccctgccgctggcgctgatgctgctgcgcagcaaggccgtgcatctgcggacgatcggccggatgggggtcgtgccgggcgtatttaacatcaacgaaccgatcctcttcggcgcgccaatcatcatgaacccgctatttttcctgccgttcgtgctggtgccgatggtgaacgcgaccctggcgtacttcgcgctgaagctggacctggtcagccgcgtagtgtcgatgacgccatggacaacgccggcgcctatcggcgcctcgtgggcggcgaactggagctttagcccggtgatcctgtgcctcatttgtatggccaccgccatggtgatgtacctgccatttctcaaagcttacgaaaaacagctgctggcccaggagcgtgaaaacgccgtcggccaggctgacaacgcggcgcagaccgcttaacgctaacgattcagaggataatcatggaattagaagaacaggtgatggggattatcatcaatgccggccagtcacgtagcctgtgctacgaagcgctgcacgccgctaaagcgggtgatttcgccaccgccgacgccaaaatgcaggaagcggcgcactattcccgcgaagctcaccttgtacagacccagcttatcgaagctgacgaaggcgagggaaaaaccaaaatgacgctggtaatggtccatgctcaggatcacctgatgacatccattctggcgaaagagctgattgccgaactgattgcgatttaccgcgcgcagccgcttcacgcctagcgccttgcccggccagacgcgctggccgggcctgattccccgaggtcactatgttacatcttggaatagatattggcggcaccaaaatggaagccgtactgctggacccggcgggcgaatgcgtccagcgcctgcgccggccgacccacaaagagagctatgacgcctttatgcgtcagctgctgaccctgattgccgatattcgcgcggtcagcccgcagccgttcaccctggggatcggcctgccaggggctatcgatccgcaaagcggacgcattaaaaactgcaactgcctggtgctcaacggtcacgatctgcgccgggatatcatgcagcagcttggccagccggtgtggatggcaaacgatgccgactgcttcaccctttcggaggcggtggatggcgccggcgccggagctaccaccgtcttcggggtgattatcggtaccggctgcggcggcgggatcgccgttcatcaacagctgctcagcggccccaacgctatcgccggggagtgggggcataatccgctgccgggctatactcctgagcgcgatggcccgccgcagccctgctactgcggcaaaacgaactgcatcgaaagctttctctccggtaccggcttcgcccgccgctatggggaacaagcccgtgcggaagccattgtcgccgcggcgcaaaacggcgatccgcgcgcgctggcccactggcgacactttatcgatgcctttgcccgcagcctggcgtcggtgatcaatattctcgacccgcaggtgattgtgctgggcggcggtctgtccaacgtcagccagatctatcgcgatctgcctgccgccatcgtgccgtggatcttctccgacacctgccgcacgcagatcaaaccggcccgtttcggcgacgccagcggcgtgcgcggcgcggcctggctgccccggcttcccggcgccgcgcaagggccgcggtagacacttttttcagcaggtatgttaagctaggcgaaaatgttcagacagaaaaagccatgccaacgattgatgatgtttcaagattagcgaatgtctcaagagcgacggtatcccgcgtgctgaccggcacccggggcgtgcgcgaagagagccgggaagctgtgctgcgggccgttgaagaactcaactatcgcccgagctttgccgcgcaaaacctcgccagtcagacatccagccacgttggtctggtgatttccgcgcaggacgaaagccacggcgcacgtctgctgccgctgctctctcaggcgctgaaagggctgaataaaagcctgctggtccagtacgtcagcgacccggtagagcaggcggcggtaatcgacgatctgcagcgccagtgcgtggcggtggtggtgctgggcgccgttgccgccgacgcgccgcgcaacgttatcgcctttgaccgcttcggcgtcgccgggagcaacagccagggctatgacttcgcctttgccaccgaaagcgcctgccgctatgtgattggcaagggacaccgcaacatcgccctgctggtggacagcgatagcgacgatgccagccgtcagatgctggaaggctaccgcaacgtcctgcagaactactccattccttttaaccgtcagctggtgctgacggccaacgatgacgtcgagcaggcgctgctgaccttaattaacagcttcagtaaatactcagtcattatcgttaaacgcgaccgctacgcggctgaggcgatgcgtctgctgcgcgaattcaccatcgccgtcccgcaggaggtctccctgctgagccttgaggattccccgctcgcctcgctgctctacccgccgctgacctgcatctcctggccactggaggcgctgctggataactgtattcagcgtattcgcagcctgattgacgaccggccaaccttcaccgccgagggccgctcgctggctggccgcctgatcccgcgccagtcggtcgccgatatctcttgatcttcgcccggttggcgccgggccagacttacctccccttttcgcgctttcgtttccgggctcattattacccacgcatgtaaataagaattattttcatttataaatagcttgtgctatataacatagcaatggctataaacgctgggaaattaaccacaccattgcgagggatcctatgctacacctgacaccgctgaaatcattgctgctggccagcgcgctggctctgctggccgcgacgccggcctcggcgcaggagaaattcagggttatcaccaccttcacggttatcgccgatatggcgcagaacgtggccggcgacgccgccgtcgtcagctccattactaaaccgggcgcggagatccatgattaccagcccacgcccggcgatatcaaacgcgcgcagggggcgcagctgatcctcagcaatgggcttaatctcgaacggtggtttgcccgtttttatcagcacttacagggcgttccggaggtggtggtcagcgaggggatccagccgatgggcatcagcgcgggcccctatagcgggaagcccaatccccatgcctggatgtcggcagataacgccctgatctatgtcgataacattcgcgatgcgctggtgaagtacgatccgcctcacgccgacacctatcgccgtaacgccgaggcctacaaagagaagatccgtcagacgatggcgccgctgcaggccagactggcgcagctgccggcggataagcgctggctggtcaccagcgagggagccttctcctatctggcccgcgactatggcctgcgcgaactgtatctgtggccgatcaatgccgaccagcagggcaccccgcaacaggtgcgcaaggttatcgacaccatgaagaaagaacgcatcccgaccatcttcagcgaaagcaccatctccgataaaccggcgcgtcaggtggcgcgggaagccggggcccactacggcggcgtgctgtatgtcgattcgctgagcgccgccgacggcccggtgccgacctggctcgacctgctgcgcgtcaccaccgaaaccatcgtcaacggtatccaggacgggatgaggaagcagccatgaatgcagcgcaagcgggactgtatgtcgaccagctcaccgtcacctggcgcaacggccacactgccctgcgcgacgcctcgttcagcgtgccgcgcggctccattgccgcgctggtgggggttaacggctcgggtaaatccacgctgtttaaagcgctgatgggctttgtccgcgttggtcacggcgagatcgccatactcggccagccggtcaaccgcgcactgcgccaaaacctggtcgcctatgtcccgcagtcggaagaggtggactggtccttcccggtgctggtggaggatgtggtgatgatgggccgctacggccatatgggctggctgcggcgggcaaagccgcgcgatcgcgagattgtcgatgccgcgctggcccgcgtgggcatgagcgagttccgccatcggcagattggcgagctctccggcgggcagaaaaagcgcgtctttctggcccgcgccatcgctcagcagggtcaggtgatcctgctggatgaacctttcaccggcgtcgatgtgcagaccgaagcgcggatcatcagcctgctgcgcgagctccgcgatgagggctgtaccatgctggtctccacccataacctcgggtcagtgagtgaattttgtgattatacggtgatggtgaaaggcaccgtgctggccagcggcccgacagaaaccaccttcactgccgagaatctggagcgggctttcagcggcgtgctgcgccacgtcgcgctgaccggcgcggaagcgcaaattatcaccgatgacgagcggccgtttatcagccggcgcgcggcgggaggcccacgatgagctggctgctggagccgtttggctattactatatgctcaatgcgatgtgggtgtcggcgctggtgggcggcgtctgcgcctttctctcctgctacctgatgctcaaaggctggtcgctgattggcgacgccctctcccactcgattgtacccggcgtcgccggggcctatatgctcggcctgcccttcgcgctcggcgcgtttctctccggcggcctggcggcgggcagcatgctgtttttgcaacagcgctcgcggctaaaagaggatgccattatcgggctgatcttctcctccttcttcgggatcgggctgtttatggtgtcgctgaatccgacgtcggtgaatatccagaccatcatcctcggcaatattctggccatcgccccggaggatattatccagctggcggcgatcggctttatctcaatggcgattctgctgctgaagtggaaagacctgatggtgaccttctttgatgaacaccacgcccgctcgattggcctgaacacccgcggcctgaagctgctgttctttaccctgctggccgcctgcaccgtggcggcgctgcagaccgtcggcgcctttctggtcatctgcctggtggtcactcccggggccaccgcgtggctgttaaccgatcgcttcccgcgcctgctggccatcgccgtggctatcggcagcctgaccagtttcttcggcgcctggctcagctactatctcgacggcgccaccggcggcattatcgtggtcgcgcaaacgctgctgttcctcatcacctttatcttcgcgccgaagcacggcctgctggccagccgccgccgcgccagggaggccgcatgctgaacctgttcctggccccgttccagtttccttttatggtcaatgcgatagcgatatcgatcgtcgtcgccattccctgcgcgctgctgtcggtgtttctggtgctcaaaggctgggcgctgatgggcgacgccatgagccacgcggtctttccgggcgtggtgctggcctacattatcggcatccccttcgccatcggcgcgtttatcgccggtctgctgtgcgccgtgacgaccggttttctcgacgataacagccgactcaagcgcgataccatcatggggattgtcttctccggcatgtttggcgccggactggtgctgtacgtagcgatccagtccgatgttcatctcgaccatattctgttcggcgatatgctgggaatatccctccgcgatattgggcaaacgacggcgatcgcgctggtgattgcgttgattatcggtctcaaatggcgggattttttgctgcacgccttcgatccaacgcaggctaaagccagcggcctgcgcggcggactgctgcactacggcctgctgtgcatgatcgccctgaccatcgtcgcgacgctgcagtcggtggggattattctgtcgatttcgctgctgattgcccccggggcgatcgcgcttctgctggtgagacgctttatccacgccctgctgctggcggtagcggtggccatcggctgctcggcgggaggggtgtggctggcgttttatctcgacagcgcgccagcgccgactatcgtggtgctgtttaccgcgctgtttgtggtcgcctttgtcgcaagcacgatccgcgatagtcagaaacagaaaacttcagcaattatccccggtggcggctaacgccttgccggggctacaagagcacgacttgtcgcccggctgcgcagcgctgaccagggaaagccgctattttttcggtcgatatttttccggcagcggcggcaccgggcgcctgtcgtccagcagatggcgaatagtgaggatcgggtggcgccagagcatccgcggcccggcccagcgcataatctgcttcatctcctcgcgcttcgccggctggtagcagtgcaccggacactgcttgcaggccggtttattctcgccaaacacgcacttatcaaggcgcttgtcagcgtaggcgttcagcgcctgatagtgcgcatcatcggcctgcgcctcgggactgcgccgctggtagagggcaatcatccgctgaatcgtcattttttcccgttcgatacgcttccccatctccccgcctttcgtctgctcttaaggtgcatttatcatacaccttaatatccatacccgaccagactcactgcttcagatgctgaatcaactgcagggctgccccggacagaaccccgaaatggctgtaggcatagaaatcccggataaaaacgctgccctcgagctcaaacgggcgcagcaggccaagcgcttcttcgtgtcggtaaaccggggccggcatcgacgttaacagatcgctctcgcacagaaaggccttaatggccgaggatgaggcgcactcaataaccggctgcggacagggcaactgccgggcgcgaaagatatcagccaggatgttcattggcgtactagacggcggcggcatgatccacggatagtccaacatcgcctccagggtgacgtccgccgcctgatgcagcgggtggtgctgcctggcgacgatgcagatccggtcctgccagttaattttgccccgcaccacgattttctcatcatgcggtaagggaccgcagagggcgatatcgatgtcgtgcatcagcaacagcttatacagctcggagtcaatgcggtcgacgatccgcagatggatctggggatggcgctgatggaaagccgccagcttatcgatgaaatggctggtcagcagactggaaacgcagccaatccgcagaatgcctttcccggcgccacggatgagctcaatttcctcgcgcgccttttgttcggtattcagcatcgtcagcgcgtagggtaaaaaggcgctgccatattcgctcaacgccatgccgtgcttatgtcgttcgaataaggatgcgctcaggtccgcttccaggctcaatagcagtcggctcagtcccgactgggtgatccccattttctctgcggccagggtcatattgccttcgcgggcgacggtaataaatgcctgaatctgcttaaatttcattggcatgatatttactcattgaataaacggtttttgcatttcccctgcgcccttttttagcgaataaatatcgctatcaatacgctcaaaaatcaccggaacgcatacttcaaaagggtttatttatctcaccacccacggcaaaacacatttctgaaccgaagataatttataatgagaatatatcaccatgacacagaacaatattctattaatttcaggcgctatattaccggtcatcattaccgtcatcatcggctatattagcggtaaacgaaaagactttaactggcagcaggcgggagacatcaataaaattgtgatgctctacgcattgccgctaagtattttcagcaatatggtgatgacgccgcgacacatcgtcatgaccatgggcccggtcgccgtggctatcatcctggcgctgattctcagcttcgtcattcccttactggtcgcccgctatctgtttcgacgcgacctcgccctcagtacgctgcaggcgttggccatcggctcgccggcagtcccgtttatcggcacctcagtgctggcctttttatttggcaccgtcagcgcgtcgctgatcaccgtgtccagcatcacgcaaaacgtcttccagctgccgctggtgatgatactgatgtcggtcgccaccggcgataagagccagcatatttcctttggcgcacgggtggtgaacgccattaaacaacccgtggtctggtcgccggtaatcgccctgatcatcgtgctggcggatatccatattccgcagactatctcgatgtcgctgggtctgctgggcaaagcctctggcgggctggcgctgtttgccgccgggatcgtgctctatacgcgcagcattgttatcaccaccgctaccattatcaccgttatcgcccgcaatattctggtccccggcgcctgctatctcattttattaaaaatgggcttcagcatggagcaaataaaggaagtcgtattgacgatggctatcccggtaggctccatcgcgataattattgctatgcagtataaaaccggcgagcaggaaatggcctcgacgatggcgctgagtattattgcctccatcattacgatgggcggatttattttcttaaccttttaattaccgcgattacaccgcgtgaatacggagagaatatggcctctatcacattatcggctgctgaattgttactgcatcggctgcaggcgctggacgtggcgtatatttttatcaactcgggcaccgattatcctccagtcattgaagcctgggcaaaggcccgggcgaccgggcaaaaggtaccggagttagtgatctgcccgcatgaaaacgccgccatcggcatggcccatggctattacctcggcaccggcaaggtgcaggcggtgatggttcacaccaacgtcgggctagccaacgccgcctgcggcgtcatcaatctggcgaacagcaatatcccggtgctgatttttggcggccgcacgccgataagcgaacattcccacttcggctgccgcaatacgccgattggctacggccaggagatgcgcgaccaggcggcgctgatccgtgaatccgtgaagtgggattttgaactgcggctggccgatcagatcggcgagcatgttgaccgggcctgggcgattgccagctccctgccgaaagggccggtctacctgagcttaccgcgtgagccactgtgcgaaacctttgccgtcgatgaggccgcgctgcaggctggcccttcgcagcagccggtccgctatgcgccagtccgggaagatatcgcccgcgcagccgaggcaatcgcctgcgccagacacccggtcatcttcgcccagcgcggcgcccgaacggcggaaggctttgcgcgcctcgatagtctggtgcgcgaatgggcgatccctctggtggaatactggggcaccgaggttaccctgagcgccgataatcccctgctcgccggggctgatcccagcgtctggctcgctgacgccgatgtgattctggtggtcgactcgcaggcaccatggatgatcgccgagggcgactgtcgccaggactgcaccgtgatccagatggggcccgatccgctcttctcccgctacccggtgcgcggctatcgcgcggacatcaacctggcgggcgagaccgatgaagtcttcagcctgctggaagaggcgctgcgcccgctgcaggccgcccgccagcagcatgtggcggagcgggcggcatatacgcagagccgcatccagcaacagaaaaaccagcgcgacgcgcttctccatgccagccagaccggggccattaccaaaccctggctcagctactgcctcggccatctggctaatcaacaccgcggccggatcgtttctgaactgaccacgctgccgcagtttgccggactgacccaagccgagagctattaccaggaagcgctggccggcggcctgggcgaagccctgcccatcgcgctggggctgcagcttgcgcgccgggaagaactgattattgccgccgtcggcgacgggtcgtacctgttcgccaaccctgcggtctgccaccatattgcggaggtaatgaagctccctgtcctcgtcgtggtcggaaataacggcgggtggggcgccgtcgcgggcggcaccaaagcgctctacccggatggctacgcggcccgcgcggaaaccattccagccaccgcctttaccacctcgccggatttcgccgcgatcgccgcctccagccgcgcggcggccctgtcggtttcccgggccgaagatctccccggcgtgctggaagaagcggtatccctcatacgcacccgccgacaaagcgtgctggttgacgtgcagttagcccgctaacggtttatcctccgggcgcttgtcgtccggagggggttgtcaccccttctggtcacctttatccacatggcccagcggcttctccgggaagcagacatcgcgcacccggcgtttcagctcggccgcatccggaaaaccgccatcctgcttgcgctcccagatctgctgaccgtcgacatcgatcgtgaagatcccgccggtccccggcaccagcgtcaccgaggcgatgtcggtgctgaaggtatgtaacagctcctgcgccatccagctggcgcgcagcatccagttgcactgggaacagtaggtgatggtgatggccgcttttgagttcatcgtcgtctcgctaagtctgaaagggcaaattgtaaacaaagtgcagtttaaatgaagaacacatgattattttgttgcaaacgataatacctatcattaccattcgcaatcaacaaatggagtaagaccctatccgcaacggaaaagacggagcaacctgcaactctggaagtaacgcgtgagccgatactaataacgatcaaggcgtggcgactatgtacaaatcgactccgtcagcagcatggtgtaaaaaacgcctgctggtgacctctttgtttgcagcaatttatcagacttctgccatcgcagcagatacttccgccgttagcggcgaggcggtggatgacacctcggaacaaatgaccgtcaccgcccccgcgccggtgcagaaagccggtagcgaacacagcatcagcgcccgggagctggagaataaaggcgctaacgatttcggctcaatcatgcgctatgagccgctcatcagcgccaccgggggcagcggcggctccggcaacggcaaaagcggcttcgaccgcggaggttacaccggctacaacattcgcggtatggagagcaaccgcgtcggtatcgacgtggacggtatcgcgcaacccaacgccaccggccgcggctacgtcggccgcgccgggctcaacaccttcggcatcggccgcgattatatcgacccgtatatgtacggcagcgtggatatccagtccggcgccacctcgacggaaacggccaacagcgctatcggggggaatgtctccttccgcccgaaatcagcggatgattacctgcgcccgggcaagaccagcgccttcggctaccgcagcggttacgactctgcggatcgcagctggcacaacggggtgaccgtcgccggcggcgatgagttcctgcgcgggattttggtctatagccgccgtgacggccaggaaaccgaaaacaacagcggcaccgtcgacgcctacccggcgaactggcactccgatgcttttctggcctccgggatctggcagcctaacgatgagcacaagctgaccagcaccttcgactattaccataaaaccaaccacacccactacgatacctgggactccagcggcaacagcaccatcggcaccgccaaccagaccagccagacccggcgctggggcctgagcctgaaggatgactggacgccgatgaacgactacctcgacagcgtctccacaaaaatctactaccagcataccgaagcccatgactggacttatatgccggacagcgtcacccgcagaatgcagacggtgaactctaactacgataccgacacctggggcctgcaggccgcgctggcgaaaaccctgggccgccacgatctgagcgccggtttcaacgccagcaccagcaaaacccagcggccgttcagccagtcgccgatccccagcgtttacagcgagatcatgcagccggaggcagacagccgcagctacaccctcggcggctttgtccaggataagatcaacttcgatctcgacagccacaacttcgccgttattcccggcgtgcgcgtggtgcatcaatcgactaagccggaaaatctgtccgatctcgccgccaacagcagcgtgctgagcgaatcgtcggtggcgaatctgtacggcaaaaacagcgatacccaggttctgccgtcgttgaccttccagtacgacctcaccccgcgcctgatgacctacctgcagtaccagcgcggggcgcagttccccaacgccagccagctgtatggctcctggaacctcggctccagctacgccggcagccagcagtatgccctgatcggcaataccgatctgaagacggaaaccagcgataatctcgagtgggggctgaaaggggaagttaccgaaggcatcaccctgcgcacggcgctgttctacaacagctataagaactttatcgcctatacccgctatacccgcgccaacaatccgggccagttcacgaatgtgccgtcgaacatctacaccatttatcaggcggaaaaccgcgataaagcctatatctacggcggtgagattagcaccaaatttaactttggcacctggtttgagcaggtggacggcctgagcgccaccctcgccctcggctatagcgaagggaaatcgaaatccagctacagcggcgataaatacgtcgacctcgacagcgtggcgccgatgaaagccatcgtcggcgtggcgtgggacgatccggcgaaacgctacggcaccgccctgacggcgacctttgtcaaagggaaacaggcgaccgccaccaaccgcgaaagctacagcaacagcggatccgccatcaccgatgccagcagcgactatatgcgcgtgccgggctacggcatgctggactggaccgcgtactggcaggtggcgaaaaacgtgcgcctcaatggcggggtctacaacctcaccgatcgtaaatactgggattacctgagcagccgcaatatcgagaccggcaccaaccaggacgccaacgataaagcgctggcggtgatgccgggccgcacctggcagctgggcgtcaacgtcgacttctgattgcccgaataataacgcacctgcccccggcccgccggccggggatattcatcgtcgagaaggatatgattatgccaaatgcacaccctgacctgtggcagcgctaccaggccaccaaagcggccagtaccgcgaaatatgcccgcgatatcgccgcggaaatggggatcagcgaagccgagctgaccgccgcccgcctcggccatgatgccgtgcgcctgagcgatgacgcccgggcgctgattgccgccctggagcgcgtcggcgaaaccaaatgcatctgccgcaacgagtatgccgtgcatgagcaggtgggccagttcacgcaccatcacctcagcggccacgccgggctggtgctgaacccgcgtgcgctcgacctgcgtctgttcctcagccagtgggccagcgccttccatctgaacgataatggccgtcagagcatccagtttttcgaccaccacggcgacgccctgctgaaagtctatgcgaccacgcagaccgacatggcggcctgggagaccctgatcgcggaatatcgggtggcggcgccggcaccgctgaccctgcgcccgctggagccggtgaaatatgccgataccgccgacggcgccgccctggagaacgactggcgcgcgatgaccgacgttcaccagttcttcggtctgctgcgtaaatatcagctttcccgccagcaggccttccgtctggtgagcgacgacctcgcctgccgcgtggatcgccatgcgctgccgtcgctgctggagacggtgcgccaggagggcaatgaaatcatgattttcgtcggcaatcgcggctgcgtgcagatctttaccggcgccctggaaaagctggcccccatgcgcggctggctgaatatcttcaatactacttttaccctgcatctgcgcgaagagagcgtcgatgaagtgtgggtgacccgcaagccgacttcggacggacacgtcaccagcgtcgaactgttcgctaaagacggcacccagattgcccagctctacggccagcgcagcgaggggcaccccgagcagacgcaatggcgccagcaggtagaccgcctgacccgtgaagggcagcccgcatgatgcgctggttactgctcttgatcgctttcccgctgctgagtcacgccgccgttgagcggctcgtcacactcggcggagatgtcactgagatcgtttatgcccttcacgcggaggagagcctggtggcgcgggacagcaccagcagctggcccccggcggcgcaaaagctgccggacgtcggctacctgcgacagctgaacgccgaggggatcctcgcgttacgcccgcagctggtgttagcgagcgcccaggcgcagccctcgctggtcttacacaaggtacaggcgagcggggtgaaggtggttaacgtgccgggcggcgaaagtctgtccgcgatcgataacaaagttgctgtcattgccgaagcgttaggcaaaacggcggcaggcgacgcgctgcgccagcagcttcagcagcagatcgccgccattccaacgcagccggttgctaagcgggtgctgtttattctcagccacggcggaatgaataccctggtggccggacagcataccgcggccgatagcgccattcgcgccgccggattgcagaacgcgatgcagggcttcgaccactatcgcgccatgtcgcaggaaggggtcgccgccagccaggcggatctggtggtgatctccgccgatggtctcaaagggatgggcggcgaagccgggctgtggaaactgcccggtctggcgcagaccccggcggggcgtcataaacagctgctgacgatcgacgatatggccctgctgggcttcgggccgcgcacaccgcaggcgataatcgcgctgcgaaacaaagcggagcagttgccctgatgcgccctgccctcactcgccgtttgctgctgatgacgctgctgctggtctccctggcgttgtttgccaccaccctcggcgccatgcgcttgccgctggtcaacctgctgccttccggggatgacatgctgcgccacatctggctgaccatccgtctgccgcgggtgctgctggccctgctggtgggcgcggcgctggccctctccggctgcgtgatgcaggggctgtttcgcaacccgcttgccgacccgggcctgctgggcatcagcagcggcgccgcgctggcggtggccagctggctggtgctcccgttctccgctgcggggctgatcgctctgtatatgccgatgctggcggcgtttattggcagcctggcggtgatggtggtgattttcatcctcagtcgggcggaggagggttcgctgtcgcgcctgctgctggtggggatcgccatcaacgcgctgtgcggcgcgctggtcggcgtcctgtcctggctgagcaatgacgcccagctgcgccagctgtcgctgtggggaatgggcagtctgggccaggccgaatggccgacgctgctggtggccgcgaccttgattatcccggcggcgctggcggtgtggtggatggcgtcccgcctcaatctgctgcagcttggcgatgaagaggcgcactatctcggggttaatgtgcaggcgctgcagcgctggctgctgctgtgcagcgcggtgctggtggccgtcgcggtggccatcagcggagtcatcggctttatcggcctggtggtgccgcacctgatgcgcctgtggctgggacctgaccatcgcggactgatccccggctcgctgctggccggcgcgatcctgcttctgctggccgacaccctggcccgcaccgtggcggcgccggcggagataccggtcggtctgctcaccagcctgctgggcgccccctggtttctgtggctggtctttcgtcgggagaactccagacatggttaatgaatacagcgcccaggggctgtcacttcaccttggtaaacgacagattatcgacaacgtctccgtcgcgctgcgcggcggcgagatgacggcgcttatcgggccgaacggcgccgggaaatccactctgctgcgcctgttgaccggctatctgactccggacagcggcacccgccatcttgcaggcaagccgctggaagcctggtcgcccgaggcgctgtcgcgccggcgggcggtcatgctgcagcgaacggccctgcaggccgactggacggtggaaacggtcattgccatgggacgctcaccgtggggcgcgacggcggatccggcggtgctggcggcggtgatggccgtcaccggctgcgatggccttgccggtcgccgctatcccggcctctccggcggcgagcagcagcgggtacagctggcccgctgtctggcacagctatggcgcgacggcgcgccgcagggctggctgtttctcgatgagcctacctcggcgctggacctttactatcagcagcacctgctgcgtttgctcaaacggctcaccgccggcgggcaactgcacgtctgcgtggtgctgcatgaccttaacctcgccgccctgtgggccgaccgcatcctgctgcttcaccagggacatctggtcgcccagggcacgccgcaggaggtgatccagcagccggttatccatcgctggtacggggcggatgtccgcctcgtccagcacccggacaacgcggtcccccaggtttatctggcgccataatccccgcgcggcgcaactggaatccggatcgcgccgcgcttacgctttctggcaataattgcctgcattatattattgagggtcatttatatttaaaatctataccaatggcgtaataacccaatgaaatatttacgacagctatttttaaatataaaccatcattacagagaagatatttcccgtattaatccaaaaacgacacattgattatttactgcgcttaatcaactcgatacactgttttcttactaatgataatagagggaagaagaagcatggctattccaggtaatatgtggatatacgacgacggtggggcactaatcaaaggtggttgtgatgttgcagacagggagttcagcatcgaatttaaagggtttcatcacaatctctccattcccactgataatgccactggcaagcctaccggcactcgtcagcactcaccaatgatcatcgttaaagaattcgactattccagtccatacctctacaaagcagtagctactggtcagaacctgaaatctgctgaaatcaaatggtataaaatcagcgatgctggtcaagaagtggaatacttcaatatgctacttgaaggcgtccgaatcgtatcaatatctcctacaatggcttccccagaagacaagaacaacaaccatcttgaatctgtcgaacttagatatgagaagatcacctggaaacattgtgacggaaatataattttcaccgatgcctggaatgaaagacaaacagcataatagatgagcaaatggatacgacagaagaactaaatggaacctatttctatcacggacaatccaatctttcggctggtgaactttttgatgtcatttttcttgaacaattttgtgacgaacttggcattggtattgaatctggtgccgctatcctcgccgggcaaccttggctaaaaaccagaacaaagccaggagaggcaataaaaggaacaagtgttgtttctaaatatggaaggatgcttctgagaaatgcaaaaactccatttggtattagggttcctacacccgttggtgtaagaatgagaaaaacgaatagtcttgctgctgttatcgcccgttatgttccgtggttaggttggataggacttgtaaactcaatttatcaagtttcaagaaaaactcaggaaaaatacaacctaatagctcgccccaaagaccgtatacaatggacatccttttaatgaaaagcattcaagatcaggttttagacttgtttaaagatgagatctcaacccgtttagataaaaattggaaagaaatcccattggaacttgattatgacttatttgatgctcccggcgacgatctgcttgacgctttaaataaatttgaacaaaaatttaatgttgatctttccagtgttaaatggtcgtgttatttcccttgggagaatactccaatgctaactcggtggtttaaagtaaaacgagaagatgtagaaaaaacgcgtaaacctttaactatcaaaatgtttgccgaatcagcaaaagcaggtaaatggctttacgactagcaaccacaagccgttgtcgtaacgaggtctacggccagaaggcagaacaacatcgacggcgaacgtaatgtatgaagacgatcgcgtggcggcggttcaattactgtgacggtaccccgccccctctgcaactggaatccggatcgcgccgcgtgctttcatcggtttccctcacctgcccatctccgttattatgtctcatccatgtgataacgacgaaaactacaaaatcgcagccatttaaaatcagggatctggataacaccccatgagcacaattgacaatctcgacgcccacacgccgatgatgcagcagtatctcaagctaaaggcgcaacatcctgacattctgctgttttaccggatgggggatttttacgagctattttatgacgatgcgaaacgcgcctcgcagctgctcgatatctcgctgaccaagcgcggcgcctccgcgggcgaaccgatacccatggccggcatcccccaccacgccgtagagaactacctcgccaaactggtcaatcagggcgagtcggtggccatttgcgagcagattggcgacccggccaccaccaaggggccggtcgagcgtaaagtggtgcgtatcgtcaccccaggcaccattagcgatgaagcgctgctgcaggagcgccaggacaacctgctggccgccatctggcaggacagcaagggcttcggctacgcgacgctggatatcagctccgggcgctttcgcctgagcgaaccggccgaccgcgaaaccatggcggcagagctgcaacgcaccaacccggcggaactgctgtatgcggaagattttgccgaatcgtcgctgatcgagggccgccgcggtctgcgccgtcgcccgctgtgggaatttgaaatcgacaccgcgcgccagcagctaaacctgcagttcggcacccgcgatctggtcggcttcggcgtcgaaaacgccccgcgcggcctgtgcgccgccggctgcctgctgcagtatgtcaaagacacccagcgtacctcgctgccgcacatccgctccatcaccatggaacgccagcaggacagcatcattatggatgccgccacccgccgtaacctcgagatcacccagaatctggccggcggcaccgacaacaccctggcctcggtactcgactgtacggtgacgccgatgggcagccggatgctcaagcgctggctgcatatgccggtccgcgataccgccgtgctggtggagcgccagcagaccatcggcgcgctgcaggagcgctataccgagctgcagccggtgctgcgccaggtcggcgatctggagcgtattctggcgcgtctggcgctgcgtaccgcccggccgcgcgatcttgcccgcatgcgtcatgccctgcagcaactgcctctgctgcgtgagctgctggccgacgttgacagtcagccggtgcaaaaattgcgcgagaaaatgggcgagttcaccgaactgcgcgaactgctggagcgcgcggtgatcgacgccccgccggtgttggtccgcgacggcggggtcatcgccccgggctatagcgaagagctggacgagtggcgggcgctggccgatggcgccaccgattatctcgataagctggagatccgcgagcgcgagcggctgggcctcgataccctgaaagtcggctacaacgccgtccacggctactacatccagatcagccgcggccagagccacctcgcgccgatccactacgtgcgccgccagacgctgaaaaacgccgaacgctacattattcctgagctgaaggaatacgaagataaggtgctgacctccaagggcaaagcgctggcgctggaaaaacagctttatgacgaactgttcgacctgctgctgccgcatctcgccgatctgcaaaccagcgccagcgcgctggccgagctggacgtgctggtcaacctggcggaacgcgcggaaaccctgaactactgctgcccgacctttagcgataagccaggcattcgcatcagcgaaggccgccatccggtggtcgagcaggtgctgaaagagccgtttatcgctaacccgctgcagctggcgccgcagcggcggatgctgatcattaccgggccgaacatgggcggtaaaagtacctatatgcgccagaccgcgctgattgcgctgctggcctatatcggcagttacgtcccggcgcagaaggtggagatcgggcccatcgatcgcatctttacccgcgtcggcgcggcggatgacctggccagcggccgctcgacctttatggtggagatgactgaaaccgccaatatcctgcacaacgctaccgaacacagcctggtgctgatggatgagattggccgcggcacgtccacctacgacgggctatcgctggcgtgggcctgtgcggaaaatctggccaacaaaatcaaggcgctgaccctgttcgccacccactacttcgagctcacccagctgccggagaaaatggaaggcgtcgccaacgtccacctcgacgcgctggagcacggcgataccatcgcctttatgcacagcgtgcaggacggcgcggccagcaagagctatggcctggcggtcgccgcgctggcgggggtgccgaaagaggtgatcaagcgcgcgcggcagaaactgcgcgagctggagagtatctcgcccaacgcggcggcgacccaggtcgacggcacgcagatgtcgctactcgccgccccggaagagacctcgcctgcggttgaggcgctggagaatcttgatccggactccctgaccccgcgtcaggcgctggagtggatctaccgtctgaaaagcctggtctagccccccattaaggtgaaaaacggcagcgctgtgaagcgctgccgttttagtaaacaaaaaaatgggtgctagaggatgcgtcctgacaacccatacgcggggttgccctcgcgcggatgctacttcttcgattcgtaagcgagaacagctttaaactcaatattacgctctttaatactcagctcgcatagtgagctgtgcaccaacagcgtaaatcccagtaccgtaatacagagtacgatgattgccacaagggcatattttgtcagcatatcttgcctccctgcaaagaagagactaacatctgaattgtctatgttcattcgctagcctcagttgatagaaatatctcctggggctttcgtctgtctgggggcctggtaatgctcaaggccagacagcctcaagcacccgccgcaattctacactcgtcagggcgtgaaatttatctgcaaggaattaatcagacgaattttataataatctggatgcaggctcgcaaagtcatcccggtatattaacccttcacgtaattttttaatttaatgaaaaaaaataatttccataattgtactaaatataaaaaaggcccgacttagcgggcccctttcattaacgcttatcttccggcaatagcggcggtacgtgcggcacctgcggcgcctcatcgatatctttctgcgtcatgcggaacgcttccggatagtgttcgcggctggtgcggcgcagcggctcggtatctcgccaggtgtaaagacagtgctggcactgatacacggtccagacccctttcaccggcgaggtcgccatgacttcaatcttttcatcggcgcaacgtggacaaatcatcttcttctccttatttacggttggccagcatagcggtcagtttttcagcccaggctttggtttccggcagatcctgcaccggctggctgtagtgaccgcgaaggtccggcgcaaccggggtggtggcgtcgataatcagtttgtcggtaatgcctgccgggctggagcctgggtcaagttcaaggaccgacatgttcggcaactgcaccaggtctcccgccgggttaaccttcgaggagagcgcccacatcacctgcggcaggttgaacgggtcgacgtcttcatcaaccatgatcaccatcttcacatagccgaggccgtggggagtggtcatcgcccgcaggcccaccgcgcgggcaaaaccgccgtagcgttttttggtggagatgatcgccagcagaccatgggtgtacatggcgttgaccgcctgcacttccggaaattcggccttcagctgctgatacagcggtacgcaggtcgccgggcccatcagatagtcaatctcggtccacggcataccgaggtagagcgattcaaaaatcggtttgctgcgataagagactttgtcgatacgcactaccgtcatgttacgaccgccggagtagtgaccggtaaattcaccgaacggcccctcaatctcacgcttacgcccttcaatgaccccttcgaggatcacttccgaaccccagggcacgtcaaagccggtcagcggcgcggtagcgatgggatacgggctctcgcgcagcgcgccagccatctcatattcagactgatcgtatttcagcggcgtggcgcccatcagggtaataatcgggtcgttaccgagggtaatggcgatcggcagatcttccccacgctcttccgctttgtgcagatgcagcgcgatatcgtgcatcggtaccggctgcaggccgagcttgcgcttgcctttcacttccatgcggtagataccgacgttttgcttaccgaagttatctttatccagcggatcgcgtgaaacgacacaggctttatcgaggtagaaaccgccgtcaccatcattgaggcggaacagcggcagaatatcgaacaggttgatatcatcgccatcaacagtattttctgcccacgccgggttggcgcggcgctctggcgtcaccgggaagttatcccagcggcgaatgaactcatcaatctgctttttcaccggcgtgttaggcggcaggcccagcgagatggcatggttctgccacgagccgatggtgttcatcgtcacgcgagcgtcgttaaagccgcgaatattatcgaaccacagcgccggggcaccgtcgccgatgcgtccggtcgcattggcggccgccgccagatcgggctcagcgttcacctcttcactgattttcagcagttgtccctggtcatccagcgcctgcaaaaagctgcgcaaatcatcaaaagccattattcgatctcctgtgcaaattgttctgccgtgcgtaagccgttccagcggcgcgctttgtgatagtcgaggccaaactgatccagcacccgggtgacgatatgattggtgatatcgtcaaccgtctccgggtggttgtagtaagctggcatgggcgggaccatcgccacgcccatgcgggacagcgccagcatgttctccagatggatcgtgctgagcggcatttcccgcgggaccaacaccagcttgcgcccctctttgagcaccacgtccgccgcgcggcccaccagcccttcggcataacccgcgcgaatgcctgcaagcgttttcatactgcagggaataacgatcatgccgtcggtacgaaatgaaccggatgagatggtggcggcctggtctgccgggctgtgggaaaagtccgccagcgcggccacttcgcgcgccgtccagggcgtttccagctcgatggtggttttggcccatttcgacatcaccagatgggtttccacctccggcatatcgcgcagcgcctgcagcaatgccaccccaagcggtgccccggtggcccccgtcatcccaataatcagtttcattccagacctcattacttttgttcgtgtacgaactttatatttaaactaccccctccagcccttattggcaagatcgttcgtatacgtgcgcatttttaatcaaaacgcagaaagggtataaaaaggcgtacgaacggctatcatagaggtgacagttttgttacggagtattcatggagttacgaaacgaagcattccacctgctgcgccagctttttcaacagcataccgcccgctggcagcaggcgttgccggacctgactaaacctcagtatgcggtgatgcgctcggtagcggagcaccccgggatcgaacaggtggcgctgattgaagcggcggtcagcaccaaggctacgctggcggagatgctcagccgaatggaagcgcgcggcctggtgcgccgggagcacgatccggccgataaacgccgccgttttgtctatctgaccgacgaaggcgaggcgttgcttaaccgttccattccgcagggcaatgaggtcgatgacgagtttctcggccgcctgagcgatgacgagcgcgagcagttctcccggctggtgcacaaaatgatggcgccctgaacgggcgcttaaccgaccttctcgcgcaggaagtcaataaatgcccgcacccgggtcggcaaatgctgcgagtcgggataaagggcatacacgccctgctgtgggaaatggtattccggcaggagcggcaccagctcccgctgcgccacctttttggctaccagccatgcgggcagcaaggcgacgccgcatcccgccagagcaaagctcatcagcgccgtagcgctatcagcagaaaaccgcggcgcgctggctatcgagaaatccacctctgtctggtgatccgtgcgcagctgccagcgcagcggcgtcggcaggcgctcgtgaataatccactcagcttgcgccagatctgacagcgtctgcaccggatggcttgccagccaggccggagaggcgacgggcaggatcgcgaaactggctatccgcgtcgcccgatagcgggaatcggccagcgtaccgaggcgtatcgccacatcaaatcgttctgaaatgaggtcggcatgatgggaggaggagacgtggcgcacccgcagcgccggatgacgacgggcgaacgcggccagcgctggaatgataacctgcgcgccatactccggcgtggtggtgatccgtagctccccgcttaagccgctatggctggcccgcacttcatcctggagattttccgccgcgttcaggagcgccaccccgcgctgatagaacagcaccccggcgtcagtgagccgcaaacgccgcgtcgaacgcagcagcagcgtcacccccagctcattttccagctgccgtacgttaaagctgaccactgccttggtctgccccagcgccgctgcggccagggtgaaactgccggcatctaccacggcgataaacatggtcacgcgctgaagattaagcatcgtcgtccggatgattgtcaaaaatattcagacagtatatcccgattagtcccgtttatccctcgctgcggcaggtttacagtagccgcctgtctgagggagtgaaccatgacctaccgccaccgcgttgccaccgtttttctgttcggcttttttctcgatttgatcaatatgtttatcgccagcatcgcctttccggcaatcagccgcgcgctggcggtttccgtctcgcaactggcgtgggtcagtaatgcctatattctcggtctgacggtcgttgtgccgttcagcgcctggctcagcgagcgctggggggcgaaacggctgtttttactctcgctggggctgttcagcctcggcgcgctggcggcaggacttgccaacagcctgagcgaactaattttatggcggacgctgcaggggatgggcggcgggctgttaatccccctcggccaggcgctgacgtggccgctgtttcagccgcatgagcgggcgaagctgtcggcggcggtgatgctggtcggcctgctggcccccgcctgctcgccggcgatcggcggcctgttagtcgaggcgttcagctggcgctgggtctttttcgccagcctgcctgtggctctgctaacctttgtgctggcggtgcgatggctgaacgacacccccggtccggttcgcccgactcgctttcttccactgtcgctgctggccgatcccctgctgcgcttcgcgatgctgatctacctctgcgtgccggggatgtttattggcgtcaacgtggtggggatgtactacctgcaacgcgtcaccgggatggcgccgggggcaatcggtgccctgatggtgccctggtcgctggcctcgtttgccgccatcacctttaccggcagatatttcaaccgcttcgggccccggccgctggtcatcatcggctgcctgcttcaggcgatggggatcatgctgctgctgaagatcgatgcggacagcccgctggcgctgttgattctggcctttacgctgatgggcggcggaggcagcttatgcagcagcaccgcgcaaagcagcgctttcctgcatacgcctgccgaagagatgcctgacgccagcgcgatatggaatcttaaccgccagctcagcttctttgccggcagcgccctgctcgccctgctgctgagggtattcccgccggcctacgcctggcagggggtatttatcagcgccgccgtcattaccctgttgccgctgctgttttgcctgcggctgaataatcgggcgattatccatcgcctgcacaccactctggagaagtcatgaatccttatctgcaggaagtcctcgatgcccatgtccttatcgaacgctggttaagccatggcgaaggaagcgctgaggcgctgatgaagcgttttgccgccgattttaccatgatccccttgagcggtgagaagatggactacccaacggtgagccgttttttccaccacgccggcggcagccgtccggggttagatatcgtagtggatcagatggaaatcatcagcgagtggcacgacggcgccgcagtgctatatcgtgaaagccaaacgctggcggatagcagtcagaacgttcgctggtcgacggcgatttttcaacaagcggaagggaaaattgtctggcgccatctgcaggaaacccgcctcggctagcccaaagaaaaaggccccgactttcgagggggcctttttgacagaaaacgtcttattcgcggaagagcgcttcgatattcagcccctgtccctgcagaatttcccgcaggcgacgcagaccttccacctggatctgccgcacgcgttcgcgggtcaggccaatttcacggcccacatcctccagcgtggcagcttcataacccagcagaccaaaacgacgtgccagaacttcacgctgcttggcgttcagttcgaacagccatttgacgatactttgcttcatatcatcgtcctgcgtggtgtcttccgggccgttctctttctcatcggccagaatatccagcagcgctttttctgaatcgccacccagcggagtatccacggaggtgatgcgctcgttcagacgcagcatacggctgacgtcatcgaccggtttgtccagctgttcggcgatctcttccgcgctaggctcgtggtccagcttatgggacaactcgcgcgcggtacgcagatagacgttcagctctttaacaatatggatcggcaaacggatcgtacgggtttggttcatgatcgcccgttcaatagtctggcggatccaccaggtcgcgtaggtcgaaaaacggaacccacgttccgggtcaaacttctcaacggcgcggatcaggccgaggttaccttcttcaatcagatccagcaacgccagaccacgattgctgtaacgacgggcaatcttcaccaccagacgcaagttactttcaatcatgcgacggcgtgaagcgacatcaccacgcagtgcgcgacgcgcgaaatagacttcctcttccgcggtcagcagtggggaataaccaatctctccaagataaagctgagtggcgtcaagtacgcgctgggttgcgccttgcgacagcagctcttcctcagccagatcgctatcactgggttcctcttctactaaggctttctcgtcgaaaacctcaattccgttctcatcaaattccgcgtcttcatttaaatcatgaactttcagcgtattctgactcataaaggtggctcctacccgtgatccctgagcaaagcaccttccacggcacatcaacaaacgacgcctggacgatttcccctgccctctctgcgagaggaacgtagacaccgccctggcgcctgttagctgatgcttcgcttatccgtactttgccaaattatcgctgcggtaagtactgcagcgggttgacggatttccccttgtaacgaatttcaaaatgtaatcttgttgagctggttccggtgctacccatggtagcgattttctgccccgctttgacttcctgttgctcccgaaccagcatggtatcgttatgagcgtaggcactcaggtaatcatcgttgtgtttgatgataataagattaccgtagccgcgcagtgcgttaccggcatagacgacgcgcccatcggcggtcgcgacaatagcctgtcccttactgcctgcaatatcgatacctttattgccgccttccgcgccgctaaagttctcgataaccttgccatcagtcggccagcgccatgttgagatcggcgaactggttgacgtactgcttgcagtcggctgggttgtgctcaccgttgttggtgccgtcaccggcgcgacaaccgttgtggttgtagtcgctggtttattattaggcaacatcttggtagcactctgttcacctgaagattcagaatacgtaatagtcggttgtgaagcaaccaccgcggtcgatttttgtgcagaagttgtgctggtcgtcgcaccgccgctcgctcttgcgctggcctgagaaacggcgttttcgccggtgatcggctggcctgaggcgttaccgacctgcagtacctgccccacgttcagcgcgtacggggccgggatattgttgcgttgcgccaggtcgcggaaatcgttgccggtgacccaggcgatatagaatagcgtgtcgccgcgttttaccgtataggtactgccgccggtatagctacctttcggaatatcgccatatttgcggttgtaaacgatccggccatttaccgtctgtaccggctcctgcgccaccggcgccggctgcggctgaatggtctgggtctgcatcggctgaatcggctgcgcctgaggagcggacttgacgccggagggtggcggcgtaatcagcatgccggagttggtgctggaagaggcggcgccgccggcagagctaaccggcgcaggcggattattggtgttggtacacccggccagccagagtgaaaccagtgaaagagccgcaatacggctgacggtaaatttggtgcttcccgcgctcatttatcccccaggaatatgttaactgccaatatcttgcttaccgggcggcgcccggccaggacactgaaaaatgtgtccaccctacgcctaaagtcaggcaaaaaaaacctggaataatccgggtctcaggccagctcccccttcaccaggggaacaaagcgaacggcctcgacggtatcaatgataaattcgttgccccgacgacggatccgtttgagaaactgatgctcttcgccgaccggcagcaccagcacgccgtcatcatccagctgcgccagcagcgcggtcggtatttccggcggcgccgccgtcacaataatggcatcaaacggcgcccgcgcctgccaaccttgccacccatcgccatgacgggttgaaacattatgtaaatcaagttgtttcaggcgacgacgcgcctgccactgtaaactcttaattcgctctaccgagcatacgtgatgcaccagatgcgccaggatggccgtctggtagccggaaccggtgccgatctccagcacccgcgactccggcgtcagcgtcagcagctcggtcatccgcgccaccatatacggctgggagatggtctgcccctggccaatcggcagcgcggtgttttcccacgctttatgttcaaaggcttcatcaacaaacttttcgcgcgggaccagcgcgatcgcctcgaggacacgttcatcgacgatgccctgcgtgcgcagttgattcaacaaactttcaacacgtttacttaccattgcctgtcaaccccgacacgttccagccaatcggtgaccacctcatgcgcctgatgggcggttaaatcgacgtgcaatggcgtcacggaaacatagccttcatccactgccgcaaaatcggtgcccggcccggcatcgcgcttatcgcccggcggaccaatccagtacaggatgttgccgcgcggatctttttgcgggatcacctggtcggccggatggcgattgccgcagcgggtcacgcgaatgcccttgatttgatcaagcgggagatccggtacgttgatgttaaggatccgcccggtacgcagcggctcgcggcttaaggcgcgcagaatggtgcaggttaccgccgcggcggtatcgtaatgctgatagccgttcagcgacacggccagcgcggggaaccccagatgacggccttccatcgccgcggccacggtgccggaatagatgacgtcgtcgcccaggttggggccggcattaatgccggaaaccacgatgtccggacgcgggcgcatcagcgcgttcacgccgagatagacacagtcggtcggggtgcccatctggacggcgatgtcgccattttcaaaggtaaacgtacgcagggacgattccagcgtcagcgaatttgaggccccgctgcggttacgatcgggtgcaaccacctggacctcggcaaactcccttaaggccttcgccagggtctgtatccccggcgcatggatcccgtcatcgttactcagcaatattcgcatagtcacccgttgtattgataagctccctgaccacgctggtggcgaagctgcccgccggcagccagaaacgcagttcaacggttacgtcatcccaccagttccagctgagctgctgtggatagagaagcatcgcccggcgcgccgcctcgactttctcccgtaccagcagcgcctgcaacgcggtttcctcggcgatcgcggcctgctcgaaagccagggcgtcgcgctggcttccccagtcgccgctgcccggcagcgtggccgtaatcatcagttcgcggttatgcacccgcgcctgcgaaacctcgagttcttccggtgtgacgacaaaccagctcccgcgccccgctaattgtagcgcatcgccatcaacgacctgattaaattccgttttttttaatctaatactcacttgctgattaaacaacgcgctgcgggctgccgacaaccaaaaactgcgcttattgcgatcgcgcactggcgcgccgctctccgcccagcgcagggcgccctgcaggttactgccgccaatgccaaagcgctgcgcgccgaaatagttcggcactccccgttcagcgatggcctgcagacgcgtctccacgtcctggcgatcgctaatctcgcgcaggatcacggtaaactggttgcctttcagcgcgcctaaacgcagcttacgcttatggcgagcatattccagtacctggcagccctcgagctgaaatttgctcaggtccggcatctctttgccgggcacccgggcgcacagccactgctcggtgaccgcgtgcttatccttttgcccggcgaagctcacttcacgggcgtggatcttaaggaatttcgccagcgcgtcggcgacaaagcgcgtattgcagccgtttttcaggatccgcaccagcacgtgttcgccttcgccgtccggggcaaagcccagatcttccaccaccagaaaatcttccggattggctttcagtagcccactgctctgcggtttgccgtgcagccaggtcagttggtcaaaggcgatcatttgtcggccttacgcagcagcgcaaccgcttcgcaggcgatcccttccccgcggccggtgaagccgagcttctcggtggtggtcgctttcacgttgacgtcgtccatatggcagccgagatcctcagcgataaagacgcgcatctgcggaatatgcggcagcattttcggcgcctgggcaataatcgtgacgtcgacgttgccgagcgtatagcccctggcctgaatgcggcgccatgcttcgcgcagcagttcgcggctatcggcgcctttaaacgccggatcggtatcggggaacagcttgccgatatcgcccagcgccgcggcgccaagcagcgcgtcggtcagcgcatgcagcgcgacgtcgccgtcggagtgggccagcagccctttttcataaggaatgcgtaccccgccaatgatgattgggccttcaccgccaaaagcgtgtacgtcaaaaccatgtccaattcgcattaagctttctcctggtgtcgggaacgggtgaggtaaaattcagccagcgccaggtcttccgggcgcgtcactttaatattatccgcgcgtccggcgaccagctgcggatggaagccgcagtactccagcgccgaggcttcatcggtgatagtggctccctcgtttagcgcgcgagtgaggcaatccaccagcagctcgcgagggaaaaattgcggggtgagcgcatgccacaggtcattgcggtcgacggtatgggcaatagcggttttgtccggctcggcgcgcttcatggtgtcgcgcactggcgccgcaaggatcccgccgacgcggctggtttcgcagagcgacagcaggcggctgaggtcgtcctgatgcaggcaggggcgcgcggcgtcatgcaccagcacccactgcgcctccggcaacgcctgcaggccggcgagcaccgaatcggcacgctcggcgccgccatccaccacggtaatctgcggatgctgcgccagcggcagctggctgaagcggcgatcgccggggctgacggcaatcaccactcgctggacgcgcgcatccgccagcagcgcggcgaccgcgtgttcgagaatcgttttgttaccgattgagagatattgtttcgggcattccgtttgcatgcggcggccgaaaccggctgccggcaccacggcgcaaacgcccggaaaagtggctgccatgttgtaatcctgggcctggttatcgattgttctgctgttgccccgatgcctgattgcgtttagacgcatccggtaccagacgatagaaggtttcgcccgggcgggtcatgctgagttcattgcgcgcacgctcctcaatcgcttcctgcccgccgttgaggtcgtcaatttcggcaaacagctgatcgttgcgtgcttttaatttggcgttagtcgcctgctgggcggtgacgtcgtcgttaacccgcgtgtagtcatgcaggccgtttttaccgaaccacagcgaatactgtagccagaccagcaaagctaataatagcagcgttagtttacccatcctgccccctgaaaaacggcatcatcatcccaaaactcgcccgggtacgctaccggggcgcgcggacgatgccgcgtaacgcggggactgtaccatatttttgctgtcgatacccatgcttgattcataccagcaacgggttatcccaacagccagaggaagagtagcgcaaacatcagcccaacggtcaggatggtcgcgctgacgctatagagcagtttgccattgagcagagagtgcagcgcaataccgaccaccaccgccaccggcatcaacgcaaggaagaatggccaggtgtagaggagaaagaagagtgtattactgccatagagaaggaagggaatacccagcgccagcagccacgaaataaagcccacggcagcgcccgacaaagaccaggtggtctcgtcgccgatcgccggaggcggttctgaacgaataatactgaggttctgggtattgcgcatatcgaatcctgtagaccgggcaaccggcacccctcgatgccgctgccgtttcaggatctgataatatcgctctgttgcagcaggtctaatagttggtgcaccaaatttgttaccaattgttcaccatccagatgaatttccgccttttccggcgcctcatagaccgagtctataccggtgaaattgcgtaattcccctgcccgcgctttcttatacaatcctttcggatcccgcgcctcgcagatggccagcggggtatcgacgaacacttcgataaagcgtccttccccgaggcgctcgcgcaccatctgccgttccgcacggtgcggagatataaatgccgtcaataccaccagcccggcatcgaccatcagcctggccacttccccgacgcggcgaatgttctctttgcgatcctcatcgctgaatcccaggtcgctgcacaggccatggcgcacgttatcgccgtccagcagataggtgctgacgccgcgctcatgcagggcctcctccagcgccccggcgacggtggatttacccgaccccgaaaggccggtaaaccacagcaccacgccgcgatggccgtgatgctgttcccgctgctgttgggtcacagggtgggcatgccagacgacgttttcgtcatgctgggccattatttgcctcccagcaggtcgcgggcgtcccagtgcgggaaatgtttacggatcagctggttcagctccagctcgaaggcgctgtactgtgatgccgaagtcgatgcctgcaggtgcggctcgttgaccatcccggcgccgacggtgacgttggtcaggcgatcgataaagataagcccgccggtcaccgggttttgctgatacggatccagcactaaaggttcgtcaaaggtcagctccaccaggccgatgccgttcagcggcagagactcgacttcacgctgggtcaggttgttaatatcgacctggtagcggatagcgtcgacgcgagcgcgggtcttcttgccggcgattttgatgtcgtagctctggcccggggtcagcggctgttcggccatccacaccacgtcgatgctggcgctttgtaccgccggcagcgaggcttgcgcgtcaaccagcaggtcgccgcgactgatgtcgatttcatctttcagcacaagggtaatggcttcgccggcggcggcttcctgcaggtcgccgtcgaaggtgacgatacgcgccacgctcgattcgacgcccgacggcagcaccttcagacgctggccaacctgcacggtaccggaggcgaccgtgccggagaagccgcggaaatcaaggttcggacggttaacatactgcaccgggaagcgcagcggctggctctcgaccacccgctggatctctacggtttcgaggacttccagcagcgtcgggccactgtaccacggcatattcgcgctctggctggcgacattatcgccttccagcgccgacaacggcacaaagcggatatcaaggttgcccggcagctgctcggcaaaggtcagataatcttcccggatctcgttgaagcgcgcttcgctaaactcgacgagatccattttgttgatcgccactaccaggtgtttaatgcccagcagcgtcgagatgaagctgtgacggcgggtctggtcgagcacgcccttgcgcgcatcgatcagcaggatcgccaggtcgcaggtggacgcgccggtggccatattgcgcgtgtactgctcgtgccccggggtgtcggcgatgataaatttgcgtttttcggttgagaagtagcgataggccacgtcgatggtgatgccctgctcgcgctcggcctgcaggccgtccaccagcagcgccaggtccagcttttcgccctgggtgccgtgacgcttgctgtcgttgtgcagcgaagagagctggtcttcatagatctggcgcgtatcgtgcagcaggcggccaattaaggtgcttttgccgtcatcgacgctgccgcaggtcaaaaaacgcagcaggctcttgtgctgttgcgcgtgcaggtaagcttctacgccgccttcgttggcaatttgttgggcaatggtcgtgttcatggcggctccttagaaatacccctgacgtttcttcagctccatcgagccggcctggtcgcggtcaatgacgcgcccctgacgttcgctggtggtcgataccagcatctcttcaataatttccggcagcgtctgcgcttcagactccaccgcgccggtcagcggccagcagccgagggtacggaaacgcaccatccgtttttcaatcacctcgcccggctgcagatcgatacggtcgtcatcgatcatcatcagcataccgtcgcgctccagcaccggacgctcagcggccagatacagcggcacgatttcaatattttccagatagatgtactgccagatatccagctcggtccagttggagagcgggaagacgcggatgctttcgcctttgttaatctggccgttgtagttgtgccacagctccggacgctgatttttcgggtcccagcggtggaaacggtcgcggaaggagtagatgcgctctttcgcgcgggatttctcttcgtcgcgacgcgcgccgccgaacgcggcgtcaaagccgtatttgttcagcgcctgcttcaggccttcggttttcatgatatcggtatgcttggcgctgccgtggacaaacgggttgatgcccatcgccaccccttccgggtttttatgcaccagcagctcacagccgtaggctttggcggtccggtcgcggaactcatacatctcacggaatttccagccggtatcgacgtgcagcagcgggaacggcagggttcccggataaaacgctttgcgcgccagatgcagcattacgctggaatctttcccgattgagtacatcattaccgggttagaaaattcggcggccacctcacgaataatatggatgctttccgcctccagttgccgcaggtgagtgagtcgtttttggtccataaccgttccttaagccagattgaccaccgaagcgttaaacccctcggcggatgatgtatgttgaaaccaggcgagctgctgatgcagctgcaccacttcgcctaccaccagcagggcgggcatcggggcgtctttcgccaggtgttcgagttgttgcaatgtgccggttatcgtctgctgatcgtcacgggtgccacgggaaattaccgccaccggcgtgtcgctgtcgcgaccgtgggcgatcagctgcgcgctgatttccgctgccttcatggtgcccatgtagatcgccagcgtctgttggctcttcgccagcagcgaccagtcgaagggggcgctgtccggcttatagtggccggtgacaaagacggcgctttgcgcataatcgcgatgggtcagcggaataccggcgtaggccgtcgccccggcggctgcggtgacgcccggcaccacctggaacgggatccccgcctcggcggcagcctgcagctcttctgcgccgcggccaaaaataaacggatcgccgcccttcaggcgcacgacggttttccccgccttcgccgcctccaccagcagctgattggtttcatgctgcggcaccgagtgctcgccggcgcgtttgccgacgcaaataagttcggcatcgcggcgcaccagctcgagaaccggctgagtcaccagatgatcgtggaaaaccacgtccgcctgctggatcgcctgcagaccgcgaagggtcagcagcccggcatcgcccggcccggcgccaaccagaataatttctcccgtctcacgttcgggcttatccagctcatcctgcagcgccttttccgcctccgcagagttgcccgccaccatcaggctggcgaagcggccggtaaagacgcgctcccagaagcggcgacgcgcttcggtagtcgtcaggcgggttttcagatggttgcgccagtagcttgctgattccgccagccgaccgagattcgtcggcagcagcgcttcgattttttcacgcagaatgcgcgacagcaccggcgctttaccgctggaggagatcgccaccagcagcggcgaacggtcgacgatagaagggaaaacaaacgagcacagcgcctggttatccaccacgttgaccaaccggtagcgcgcgttagctgccgcaaatacccgctggttaagcgcctcatcctcggtggccgcaatcaccagaaagacatcatccaccagcgagtcgctgaattccgtcgcccgccagctgagtgcctggcgcgcagccagatcggccagcgccggtgacagcgtttcagcgaccacctgcacctgcgcctgggcgcgcagcaagaacttgatcttacgttcagcaatctcgccgccgccgatcaccagcacgggcctttgtttcagttcggcaaaaaggggcaagtaatccacggtgcaacaactctcttacattcagcgatactgcgactatagggtgcgccttagagcaaatgaaattacgaaatggaatgagttgtgacgcaaaggaataacgcggcggaaatacaaatatcaaaaagtgcttaacgcgctatttttccgctatttaagagcaattgaaattgtttaaccgcggtcacagtttcatactgtacgcgtcaaattgtcttgttcgtgtaaggaccccttatgttttccgcgttgtgccgccgtctgcttccgctggcgctcggcaccggttttgtttttgccgccgcccccgcattcagcgcgctgggcgacaccgccagtagccaggcccgccatatcgccaccgtcttcccgggacgaatgaccggaacgccgccggaaatgctctcagctgactatctgcgccagcagttcgccctgatggggtatcagagcgacgtgcgaagcttcaatacccgctatatctttaccgacagcaatcagcgcaagaactggcataacgccaccggcagtacggtgatcgccgcccatgaaggtaaagtgcgccagcagattattatcatggcacacctcgacacctatgcgccgcagagcgataaagacgtggagaacaacctcggcggcctgacgctgcagggcatcgacgacaacgcgatgggacttggcgtattgctggagctggcggagcatttaaagaacgtccctacccgctatggcatccgctttatcgccaccagcggtgaagaggaaggccgtctcggcgcgcaaaacctgctgcagcggatgagcgaagcggaaaagaaaaataccctgctggtgatcaatctcgataatctggtggtgggcgataagctttacttcaacagcggccgcagcacgccggcctcggtgcgcaagctgacccgcgatcgcgcgctggctatcgctcgcagcaagggcatcgccgcctacaccaacccgggactcaacccggcttatccgaaaggcaccagctgctgcaatgacgccagcgtcttcgacaacgccgggatcccggtgctgtcggtcgaggcgactaactggtcactcggcaaaaaagatggctatcagcagcggagcaaatcggccagtttcccgcagggaaccagttggcatgacgtccagctggataatcagcagtatatcgaccacgcgctgcccgggcgcatcgaacaccgcggacgcgaggtagtgaaagtcatgctgccgctggtgaaagagctggcgaaggtggagaagaaaagctaatacgcacaaaagaacgcgcggtatcgcccgcgtgttctttttgaattatcactcagaggaagagctaacagcttaaccctcgtgcaatccgcactcgcgtttaagcccgaagaaccgggtctcttcttctgccatgcccggctcccatttgcgggtggtgtgggtatcgcctaccgacagatagccctgatcccacagcgggtggtacttcagcccgtgcttttgcaggtactgatacaccgtgcggttatcccagtcgataatcggtagcaccttgaacaccccgcgctgaaccgccagcaccggaagcgtagcccggctgcccgactgctcgcggcgcagaccggcaaaccacgtctgcgcgttgagctctttcagcgcccggttcatcggctcaaccttgttgatctcattgtatttctcaatgccctcaacgccctgctcccacagcttgccgtagcgcgcctcctgccaggccgcgctttcagccgcgcggtagaccttcaggttcagcttgagcttgtccgtcagctcgtcaataaactgataggtttccgggaacaggtagccggtatcggtgaggatcaccggaatatccgggcggatctgattcaccagatgcaaactgaccgccgcctgaatgccaaagctcgacgacagcacatagtttcccggcagattttccagcgcccacgccacacgcccttcggcgtcaagcttttccagttgagcgttggtttccgcgagtgccagaatgcgttccactttcggcaatgcattaagcgcgtttagatcgagtacggacatatgaacctcgtttgcctgttttgccggacgacactgcgttcgtccggcctacgggtttcgctggcccggatcgctacgcgccaccgggcaccaggatgttattcccagaaatcgcgggctgggtcgagcaccgggcgaatgatgcccgcacgcaccgtaaaatcgccgaagccttcacccgcttcgcgctctttcgcccagcgccctaccagttcgtctagcgagtcgagaatttccgactcggtaatattctcccggtacatccgcgggatgcgggtgccgttgcggttaccgccgatgtgcaggttatagcggcccggcgctttgcccaccagtcccacttccgccagcatcgcgcggccgcagccgttcgggcagccggtgacgcgggtgacgatatgctcatcgctcacgccgtgcttgctcatcaccccttccaccttgtcgataaacgacggcaggaaacgctcggcttccgccatcgccagcggacaggtcgggaaggagacgcaggccatcgagttttcgcgctgcggggtgacggcattcatcaggccatgatcccgcgcgagcttctcgatccgcgccttctgatcttccggtacgctggcgacaatcaggttctggttagcggtgatgcggaattcgccttgatggaccttagcaatctccagcaggccagtcttcagcggacgacccggataatcgagaatgcggccgttttcaataaacagcgtcaggtgccacttatcatcaatccccttcacccagccgatgcgatcgccgcggccggtaaattcgtacgggcggatcggctcaaacttaatgcctgcccggcgctccacttccgctttgaaggtttcgacaccgacgcgctcaagggtgtacttggttttcgcattcttacggtcggtacggttgccccagtcgcgctgggtggtcacaaccgcttccgccaccgccagagtatgctccagcggcagataaccgaattcgctcgccgtgcgggcgtaggtttttttgttaccatgttcgatagagagaccgccgcccaccagcaggttaaagcccaccagcttgccgttttcggcgatcgccacgaagttcatgtcgttggcgtgcagatcgatatcgttctgcggcgggatcaccaccgtggttttaaacttacgcggcagataggtctggccgaggatcggctcttcgtcggtagtggcgacctttttctgatccagccagatctcggcataagcgcgggtacgcggcagcagatgctcggagatctttttcgcccactcgtaggcctcagcgtgcagctgcgactcgtacgggttggaggtgcacagcacgttacggttcatatcgttggcggtggccagcgcgtccagccccaccgagtgcagcatctgatgcaccggcttgacgttctttttcagaatgccgtggaactgaaaggtctgccggttggtcaggcgaatactgccgtaaatggtgttctcagcggcaaacttatcgatcgccttccactgggtggtggtgatcaccccgcccggcagacggcagcggagcagcatcgcatgacgcggctccagcttctgggcggcgcgctccgcgcggatatcgcgatcgtcctgctggtacatgccgtggaaacggatcagcaggaagttatcgcctttaaaaccgccggtcagaccgtcgtttaaatcttccgcaatggtgccgcgcaggtagttgctctcaagcttcatgcgctcggcatcgctcagtttaccttcgaccactaaaggccccggatgtttttcgctcattagtagacatctcgctgataacggcgctcaacgcgcagctcacttaaaaattcgtccgccgcttcggcgtccatcgcgccgtattcggcaatcacttccagtaaggtgttttccacgtccttcgccatacgattggcgtcgccgcagacataaatgtgggcgccgtcattgatccagcgccacagctcggccccctgctcgcgcagtttgtcctgcacatagattttttgttgttgatcgcgggaccaggccagatcgatacgggtcagcagaccttccttcacatagctctgccactccacctgatagaggaaatcttcggtgaagtgcgggttgccgaagaacaaccagttcttgccttgcgctccgtccgcagcgcgctgctgcataaaggcgcggaacggcgcaataccggtgcccgggccaatcataatcaccggggtctccgggttgactggcagacggaagttgtcgttgtgttcgataaagacacggacttcgccatcctcttccacgcggtcggcgaggaagctggaggcgccgccagcccgggcgcggccttcaatttcatagcgcaccacgcccacggtgacatgcacctcgctctccacttccgcctgtgaggaagcaatggagtacaggcgcggcgtcagcggacgcagcagaccgattaacgcctcggcgtccagctgcgctggagagaaacggaccatatcgacgatcggcgtcgcggcggcatactgctgcaactgagctttatcgcccaccagcggcagcagcgattcgctgcgcgtcagggtggcgtaattttcaacgatagtcgcggtgttaaccgtcagctcaaaatgccactgcagggcttccgacagcggcagagttttgccctcaacggtcaccggctcgtcgcctttcagccacagcagctccaccagctctttcaccagctgaggatcgttatggtaccagacgcccagggcgtcgcccggctgatagcgcagaccggaatcaccgaggtctatttcgatatggcgcacatctttttctgaattgcggccggtgattttctgattgaccgacagggtcgccgtcaggggcgcttctttggtatatgggctggtgtgaatatcgttcaccgcgccgctggtggccagctgagcgggcgcagcgaccggcgcacgggccttcagcgcctcaaccacgcgcgcgcgccattcagcggccgcggcctgatattcaacgtcggcatcaacgcgatcgagcagacgttccgcgccgagctcggccagcttgttgtcgaaatctttgccggactgacagaaaaattcataagaggtatcgccgagaccaaagacggcgaacgcggtcccgtccagcttcggcgctttcttagagaacaggaacttatgcaatgcgaccgcttcttccggcggctctccttccccctgggtggacgttacaaccaccagcagtttttccgcagcaatttgtttgaatttataatcgcctgcattcaccagcttcacgttcagcttcgccgccagcagatcgtcacgcagcgcttcggcgacgcggcgggcgttgccggtttgcgaggcggaaatcagcgtgatcgtcggtacctcggcggccggggcgggggcggctaccgccgcaccggactgctgattcagcacgccccagaaatagccagatacccaggcgagctgagtgggcgtgaagtcagtggtggccgcctgaaggcgcgccagttgctccgggttgagcggcagaaagttggaaggtggggcctgtgtcgtcatgcgtcgtttgttccagtaagcaaagctgttattcgcaccctgtcagcgcgacaaaaacagaagagaatagaaggttaacggcgggcatagtaacaattaaagaagggatagaaataataaataaccaaatggactaacctgttttagttgtagttattaacaacaaaatcgattaaataagtaattgaaatataatagattaaatcaaataaagcagataaacatgtccattttctgttcacggccgttttagttaatgcgaaaaaatgtactttccggtaccctacggcggtttttttcgtcctgttgagagtcaatgatgtccaccacgctgtttaaagatttcaccttcgaagccgcccaccacctgccgcacgtcccggaaggacacaaatgcggtcgcctgcatggccactcctttatggtgcgtctggagatcaccggtgaagtcgatccccataccgggtggatcatggattttgccgagctgaaggccgcctttaagccgacatacgatcgcctcgaccactattatctgaacgatattcctggtctggaaaaccccaccagcgaagtgctggccaaatggatctgggatgagatgaaaccgcgggtgccgctgctcagcgccgtgatggtcaaagagacctgcaccgccggctgcgtctatcgcggcgagtaagcgaaaaaaagcccggtcagtacgctgccgggcttttttatcaggcaatattcagatacttgtgcgtctgcatagacaggcgccagttgcgggcgatgcaggtgtcgatacacaggcgcgtcgcatcttctttctgactgatcggctgcagggcgatgatccgcggtttgtcatcgctcagcgtttccagcagttcgtccagcgcttctatgtcgcggacgcgccctaccggatgcttgatctcatccgcccgctgcagggcctgagacagcacgtcatagccaccgcgcatgttgaccttcggggaaaccgtcacccaggtattggggctgcagcgtacttcatgggtgccgctggtttcaatctgacagctaaagccgttttgttccagaagcgaggttaacggcgttaaatcatgaatgcagggctcaccgccggtaataaccacgtggcgggctgtccacccctgccgcccaataatcgccagcagatcctcgctgcttgccgggccccacttgtcgctctctttggttttcgccaggatgctgaacaacgacacttcccgatcggccagcttgtcccaggtatgcttggtgtcacaccacgcgcatcctaccgggcatccctgcagacgaataaagatggcaggcacgccggtgaagtaaccctcgccttgcagggtctggaacatctcgttaatcgggtactgcatagtcatctctgtttagggtgataaacgttcattatcgcagatttcgctgcccaggtcttgtcctgcgctgcgatcgcttttttacccctccgtcaatatccgtgtcgggaataatattattgattaaaaaagcaatcttttcttttggcttagtttattagcatggtaagaattaaaataaatagcattctgacgcgcggggggaaatatgtaacagaaaatgttattcctgtcattcaggataaaataaaaggtccaagaaccaaaacaaaaaaaccttaaaatacagtaatgtacaaactgatacatgaaagagtgaattatctggccgatctgcgagtccaattctatcccccggtaataataaccttaaactggtcttaataaagccctgaacgggccccttttttatttaattgtcgtttacttttgcccgcctagaatcccgcagaccaaccataatgagatagcgtttatgaccacattattaattaccggcgttacggggtttctgggcggtgccgcgttagagaaaatactccatcaggaaacccggttagatctgctgctgctggtacgtgctgatagccccgaggctggcctcgaacgggttaaagagaacatgcgtaagttcaacatcgccgaggagaagctggcgatgttgcgccagcagcatatcctgctgggcgatctcgcctctccggagcattttcttaacgatccgcgcctcgatcaggtcacgcacatcctcaactgcgccgctgtcgcctcatttggcagcaacccgcttatctggaaggttaacgttgagggcacgctgcgcctggcgcaacgtatggcgcaggtgacgggtctgcagcgctttctgcacgtcggtacggcgatgtcatgttcgcctgaaccggattcactggtcgccgaaagcgcggagtttcgggaacgcgctgagcacctggtggaatatacccactcgaagtcgaccatcgagcagctgatgcagcagcagtgccctacgctaccgctggtaattgcccgcccctctatcgtggtgggtcatacccatcacggctgccggccttccagcagtattttctgggtgttcagcatggggctgatgctgcagaaattcatgtgctccatggaggaccgaattgacgttatcccggtggactactgcgccgacgccctgctaatgctgcttaaccagcctctggctcacggcgaggtggtgcatatctctgctggcgaagagaacagcgtgaagtttgccgaaatcgaccgggcgatggctcaggccctggagcaggcgccggtgggggataagtacgcccaggtgagctatgaaacgctggtcaaaatgagacgcgaactgaaagggatatttgggccatgcaatgagcggctgatgctgaaagccatgcgcttatacggcgcattcgccacactgaacgtgcgctttagtaacgacaagctgctgagcatggggatgccaaaaccgccgcgctttaccgattacatcgaccgctgcgtggaaaccacccgcgggttgtcgatccctcagcaaatggccgtcgactttaaataatggccgcaggcgtaaaaaaaatgccagcccgaaggctggcatgattatttcacaaggacaggattaagcctgacctttgatctctttacgaccgttgaacggcgcttgctcacccagcgcttcttcgatacgaatcagctggttgtatttagcaacgcggtcagaacggctcatagaaccagttttgatctggcctgcagcggtaccaacagccaggtcggcaatggtagcgtcttcagtttcgccagaacggtgagagataacagcggtgtagccagcgtctttcgccatcttgatagcagccagagtttcggtcagagaaccgatctggttgaacttgatcaggatggagttagcgatgcctttttcgatgccttctttcaggatcttggtgttggttacgaacaggtcgtcaccaaccagctggattttgtcgcccagtactttggtctggtaagcgaaaccttcccagtcagattcgtccagaccatcttcgatggagacgatcgggtactgtttggtcagctcttccaggaagtgagtgaactcttcagaggtgaatgctttgttgccttcgccagccagaacgtatttaccgtctttgtagaattcagacgccgcgcagtccatcgccagggtgatgtctttgcccagctcgtagcctgcagctttaaccgcttcagcgataacagccagcgcttcggcgttggaacccaggttcggcgcgtagccgccttcgtcaccaacggcagtgttcatgcctttggacttcagcactttcgccaggtgatggaacacttcagaacccatgcgtactgcttctttcagggtcggcgcgccaaccggctgaatcatgaattcctggatgtcgacgttgttgtcagcgtgctcaccgccgttgatgatgttcatcatcggaaccggcatggagtatttgcccggagtgccgttcagttcagcgatgtgcgcgtacagcggcaggcctttggacgcagcagctgctttggcgttcgccagagaaacggccaggatagcgttcgcaccgaagttagatttgttttcagtaccgtccaggtcgatcatgatcttgtcgatgccagcctgatctttagcatctttgcccaggattgcctgagcgatcgggccgtttaccgcagcaacagctttggttacgcctttacccaggaaacgggatttgtcgccatcgcgcagttccagcgcttcgcgggaaccagtagaagcacctgacggagcagctgccataccgacgaaaccaccttccaggtgtacttcggcttcaacagtcgggttaccacgggagtcgatgatttcacgaccgatgactttaacgattttggacattaggttttcctcagtacaagttaaactaaaactccagacaaacaatgcacccggatgggtgcattgccgttcaaactctttttacttcgcctggcgtttctggtactcgctcgcggctttcacaaagccggcaaacagcgggtgtccatcacgcggcgtcgaagtaaactccgggtggaactggcaggccacaaaccacggatggttcggcacttcgatgatctcgaccaactgatcatccccggaacggcccgcaacgcgcagaccggcagcttcaatcgatttcaacaacatgttgttgacttcgtagcggtgacgatgacgctcggtgatggtcggctcgccgtaaagctggcgtaccagagaatcatcactcagctggcactgctgcgcgcccaggcgcatggtgccgcccagatcgctcttctcagagcggacttcaacgttgccatcttcgtcacgccattcggtaatcagggccacgaccgggtatttacagtctggcacaaattccgtcgagttggcgttttccatacccgctacgttacgcgcgaactcaatcagcgcaacctgcatacccaggcagatgcccagataaggaatattgttttcacgcgcatagcgcgcggtggcgatcttgccttcaacgccgcggtagccgaagccgcccgggatcaggatagcgtctaaatccttgaggatttcgacgccgcgcgtttccacatcctgcgaatcgatcagcttgatgttgacggtaacgcgatttttcagaccgccgtgtttcagcgcttcaatcaccgacttgtaggcatccggcagttcaatgtacttaccgaccataccgatggtgacttcgcctgccggattagcttcttcatagattacctgttcccattcggccaggtttgcttccggacaagttaagctgaatcgtttacaaatataatcgtccagcccctgagatttcaacaggcccggaattttataaatggaatcgacatctttcagagaaatcacagccttttccggaacgttacagaacaaagcaattttggctcgttcgttggccggaaccgcgcgatcggagcggcagatcagaatatcaggctgaataccgatggagagcagctctttcacggagtgctgggtcggcttggttttgacttcgcccgcggcggccatgtacggcaccagagtcaggtgcatgaacagggtatgctcgcggccgatctctaccgccatctgacgaatcgcttcgaggaacggcagggattcgatatcgcctacggtaccgccgatttccaccagcacgacgtcatggccttcgccgcccgccagtacgcgctctttgatagcgttggtgatgtgcgggataacctgaacggtcgcgcccaggtagtcgccacggcgctctttgcgcagcacgtcggagtagatacggccggtggtgaagttattgcggcgcgtcatcttggtgcggataaaacgctcatagtggcccaggtccagatcggtttctgcgccgtcttcagtaacgaacacttccccatgctggattgggctcatggtgcccggatcgacgttgatatacggatccagtttcatgatggtcacgttgagaccacgggcttcaagaatggctgccagggaggctgcggcaatgcctttacccagagaggatacgaccccgccggtcacaaaaatatagttcgttgtcatgctgaacctgagaagttagggtaaaacgatggaataaccaggacgggaaagtagtatacccgaacatgcgtgacgccacaaactttcattcttcccctccccttcgttcttcaagttgcacctgtgttgcgactcgaacaactcgaagaggcaggctacatggtgtttcaacgacataacggaaagagaaaatagacgcttttggcgaaatgtttttgacgtaaatcaagcgcttgttatttataaaatcacacaaatcgcgcttgatcacgaaaatccgttagagatcagtttcctggcgttttacttcctgccacacttcttccatggtatcgaggtcgacgccggtcatttccaggcctcgggcggcgacaatacgctcgacctcgcggaagcgacgctcaaatttgaggtttgctttctgcagcgccacctcggctttgacgcccaaatgacgggataagttcaccgtggcaaacagcagatcgcccacttcctcttccagttttgcttcatccaccaccgcctgctgcgcttcatgcatcacttcatcaatttcttcatgcactttgtcgagcaccgggcccagcgaggtccagtcgaaacccactgccgagcagcggcgctggattttatgcgcgcgcatcagcgccggcaggctatggggaatatcgtccagtgccgaatgctgggctttttccgcccgctccgcgcttttgatttgctcccagcgggccaggacttccgtgctattgcccgccgatgcctcgccgaagatatgcgggtggcgacgctccagcttgtcgctgatggcggcgcagatatcgtcaaagttaaagcgtccctcttcctgcgccatttgcgcatagaacaccacctggaacagcagatcgcccagttcaccgcgcagatcgtcaaaatcttcccgctggatagcatcgaggacctcgtaggtctcctcaagggtgtaaggggcgatagtggcaaaggtctgctctttatcccatgggcagccgttttccgggtcgcgcaggcggcgcatgatgccgagcaagcggtcaatttgagtcatgtgacaatcctggaaatttaaaaaatagtcggccggataaggcgtttagaccttatccgacgttgcgaaattgccggatggcggcttcgccttatccggcctacagacgaattaaccgccgtgtagacggcgcgcgtcgatcacatccggcacctggttgagcttaccgagcacccggcccagcacctgcaggttgtaaatctcgatggtcatatcgatggttgccagctgctgacgggtatcgctgcggctggcgacgcccagcacattcaccttctcattggcgaggatggtagtgatatcgcgcagtaaaccgctgcgatcgttcgcctccactctgaccaccagcgagtagcccgccgagtagctttcgccccataccgcatcgacgatgcgctccggggcatgcgactgcagttcagccagctgatcgcagtccgcgcgatgcacggagatcccgcgcccctgggtgataaagccgacgatctcgtcgcccgggattggctggcagcagcgggcaatatggtgcatcaggttgcctaccccttccaccactacccggccattgtccttggtgcgattttgcggcgtgtaggttttctgctgcagttgcttcagcgcggccgcatcctgctcggcggcgctaggtttattgaactgcgcctgcaggaagttgaccatctggttgagacggatatcgccaccgccgatggcggccagcagttcatcgagctcgttgaagttatagcgcggcagcaggtgcttttccgcatccttcaggctgatgcccaaatgctccagctcgtcgtcgaggatctgccgaccggcgagaatgttcttgtcgcgatcctgcttacggaaccaggcgtggatcttcgaacgtccgcggctggtggtcacatagccgaggttagggttcagccagtcacggctcgggttcggctgcttctgggtaataatttcgatctgatcgcccatctgcagctggtaggtgaatggcacgatgcggccgccaattttggcgccgatgcagcgatggccgacatcgctgtgaatatgataggcaaagtcgagcggcgtcgaccccgcaggcaggtccaccacgtcgcctttcggcgtaaagacatacacccggtcgtcgaagacctggctgcgcacttcatcgagcatctcgccggagtcggccatctcttcctgccaggcaatcagcttacgcagccaggcgatacggtcttcatagccgcggccgccgctggtgccggctcccgcgccctctttgtacttccagtgcgcggccacgcccagctcggcgtcttcatgcatctgccgggtgcggatctgaatctccaccgtcttgccgctcggccccagcaccacggtatgaatagactggtaaccgttgggtttcgggttggccacgtagtcgtcgaattcatccggcagatggcggtagtgagtatggacgatccccagcgcggcatagcaatcctgcaaacgctcagccacaatacgcaccgcgcgaacgtcaaacagctcgtcgaaagcgaggtgttttttctgcattttgcgccagatactgtagatatgcttcggccggccatagacttccgccttgacgccttcggctttcatctctgagcgcaggtggccgacaaactcttcgatgtaatgctcgcggtcgatacggcgctcgtggagcagtttggcaatgcgcttgtattccgccggatgcagatagcggaagcagtaatcttccagctcccacttcagctggccgatacctaagcggttcgccaggggagcatagatattggtgcactctttcgccgcaagaacgcgctcatcttccggcgcgtccttgacctcgcgcagatgcgcgatccgctcagcaagtttgatgaccacgcagcggaaatcgtcaaccatcgccagcagcatacggcgaatgttatccacctgctcggaagagaccgagtcggtatgggtagccttcagctggcggatagcggccatgtcccgcaccccgtgaatcagggtcacgaccgatttacctacgctctcctgcatcacctcttcgctgacaacttcgccgtcggccagcgggaacagcagcgccgcgcgcagcgtatcgatgtccatacttagggtggagaggatctccaccatttcgacgccccgccacagcagcaggtccgcctgcgggtgtccttgcgttttttcgcgacaataatcccaggtttcggctaagcgctcacacgactgctggctggaaattcccagactcgcgatccatttcttcgggtcaaattcaccagctttattaagatgtgcacttcttaccgcaaccattgtcctctccttaagggaccggcctgccgaagtcggcaagcctcaactttctacatgtcatcctgcaggtcgcgtcagcattcatggccagggtggctcttctgcgacgttgtgaatgaccttatgtaagcctgcgctcaaacaacaccattgattccagatggccggtatgcgggaacatatccagcatcgccaggcgttgaatctgatatccagcctgcaacagggtttcgctgtctcgcgccagcgtcgccgggttgcaggaaacatacaccacccgccgcggtgccagttttattatatgcggcatcacgcccggcgcgccggcgcgggccgggtccagcagcactttatcaaagccgtgcttcgcccaggcctgacgggtgacgtcttcttccagattttcatggaagaaagtgacatttgataaaccattgcgggcggcgttttcccgccccttctccaccagcgccggcaccccttccacgcccaccacatgggcggcgcgtgtcgccagcggcagggtaaagttgcccatcccgcagaatagatccagcacccggtcctctggccgcagatccagccactccagtgcggtacgcaccatctgctgatttacgccgtcgttgacctggataaaatcccgcgggctgaacactaagcgtagtccgtctgaggtataccatggcgcttcgccatgaatatgctccagtatctcgctttgtggcgcgaggtacagggaaagaccgtgagtttgcgaaaagcgttccagtttttccctgtctgtcgccggcagggctgcggtatggcgcagcaccatcagcgggccattgtccgcctgcaccagctcgacgtggccgagatggcgtaatgcgctcagcgcgcttaagcactcgcgtacggcgggcagcaatgcctcaagttggggcgccaaaacagggcactgcaccacatcgacgatcgctttggcgttggcctggcgaaaacccatctgcaattgttgggtcttcggctgataattcaagctcaagcgtgcgcgacggcggtagccccacggcgcgccggcgatgacgtcatctacctcgcgcttcatcagtcgccccagcgcggcgcgtttactttgctgctgaagcggaacgctggcatgttgttgttggcatccgccgcagacgccaaaatgggggcagcgcggcgcctggcgctgcgggctgtcggtcagtcggcgtttcacctcggcgcgggcgtactgttttttatcttccaccagcaccacctcggcctgctcgtggggcagcacgccgctcacgaacaacgccttcccctgatggcgggcaacaccctgaccaaagggatcgaggtcgttgactgtaacggttatgatctggcgcgtcgtcacacgccgttttgcagagtagaattgcgccatcgtagagagttgtctcaatcaaataaaacgagctcgttcagagcggcagcgccgcgaggcgcagcgacgctgcacagaacgatgatgtctatattctcccataatggaaccgcatgaccaactacagcctgcgtgctcgcatgatgattctgattctggcgccaaccgtcctgataggactgttgctcagtattttctttgtcgctcatcgttataacgacctgcaacgccagctggaggacgctggcgccagtattatcgaaccgctggcggtctccagcgaatatggcatgaacttgcaaaaccgcgaatccatcggccagctgatcagcgttctgcatcgtcgccactcggagatcgtgcgggccatctcggtgtacgattcgcataaccgcttatttgtcacctccaattaccagctcaatcccagcgaactgcagatcccgaaaggcgaggcattcccccgtcacctcagcgtcatccgcgatggcgacatgatgatcctgcgcacgcctattgtctcggaaagctattctccggatgaatcacccgaatctgacgctaaaatgccgggcaatatgctgggctacgtcgccctggagctggatctaaaatcggttcgcctccagcagtacaaagagatttttatctccagcgtaatgatgctgttctgtatcggcatcgcgttaatcttcggctggaggctgatgcgcgacgtcaccgggccaatccgcaatatggttaacactgtcgaccgcatccgccgcggacagctggacagccgggtcgaaggctttatgctcggcgaactggatatgctgaaaaatggcattaactcgatggccatgtcgctggcggcataccacgaagagatgcaacacaacgtcgaccaggcgacctccgatctacgggaaacgcttgagcagatggagatccagaacgtcgagctggacctggcgaaaaagcgcgcccaggaggcggcgcgcattaagtctgagttcctggccaatatgtctcacgagctgcgcactccgctcaatggggtgatcggctttacccgcctgacgctgaaaaccgatctcaacgctacgcagcgcgaccacctgaccaccatcgaacgttcggccaacaatctgctggcgatcatcaatgacgtgctcgacttttccaagctggaagccgggaagctgatcctggagagtattccgttcctgctgcgcacttcgcttgatgaagtggtcaccctgctggcgcattccgcgcacgataaagggctggagctgacgctgaatattaagaacaatgtaccggacaacgttatcggcgacccgctgcgtctgcagcagattgtgaccaacctcgtgggcaacgccatcaaatttaccgagcacggcaatatcgacgtactggtggagcagcgggccatcagtaattcccgggtacagatcgaaattcagatccacgataccggcatcggcatccccgagcgcgaccagtcccggctattccaggccttccgtcaggccgatgccagtatttcacgccgccacggcggcaccgggctcgggctggtgatcactcagcgtctggtcaaagagatgggcggggatatttcgttccacagccagccgaaccgcggctccaccttctggttccatatcagcctcgatctcaacccgaacgccattccggatacgctgaacaccgacgggcttgtcggcaaacgtctggcctatgtggaagccaacgcgacggcggcgcagtgtaccctggagatgctggccgctacgccgctggaggttatctacagccctaccttctcctcgctggcggaagcgcagtatgacattctgctggtcggtatcccggtttcaatgcgcgatttgtcgccgcatcgggaaaaattagccaaagcctgcgcgatgtccgataacgtactgctggccctgccgtgccatgcccaggtcagcgccgaagccctgaagcgcgacggcgttgccgcctgcctgttaaagccgctcaccaccacccgtctgctaccggcgctggtggctaccagccacgcgcttgcctccgcgccgctgatgcagatcgacagtcataagttgccaatgacggtaatggccgtcgacgacaacccggctaacctgaagctgattggcgccctgctggatgatcttgtgcagcaggtgatcctctgcgacagcggccagcaggcggtggacaaggccaagcagctgcagatggatctgatcctgatggatattcagatgccggatatggacggcatccgcgcctgtgagcttatccatcacctgtcccatcatcagcaaaccccggttattgcggtcaccgcgcacgccctggagggccagcgtgagaaattactgagcgccggcatgaacgactatctggcgaagccaatcgaagaagagaaactgcacgcactgctgttgcgctatcagcccggcctgcacagcgtcgttccggcgtcgctaccgcccgcagagccgatcgtcgatcataatcaaacgctcgactggcagctggcgctgcgccaggcggccatgaagccggacctggcgcgggagatgctgcaaatgctgatcgcctttatgccggaggtgcgtaacaaagttgaggagcagctggtgggcgagcagccggaagggctggtggatctgatccataaactgcacggcagctgcagctatagcggcgtgccgcggctgaaaaagctgtgccataccctggaaagtcagctgcgggcaggcaccgccgccgaggatctggagccggagctgcttgagctgttagatgagatggataatgtggcccgcgaagcgtgccggatgggggtgtaaaccccggatagcggcgctacgcgcctcatccggcctacgccctacggtccggtattcggttggtagccccggtaagcgtaagcgccaccggggatggttcccggatcgcggtgctacgcaccttatccggactacaaataccactgcgccagccgggttaccgcctgtcgcccatctgcaaaaccgcggctacgttacgcgccgtcattcgcaggttggcggcggcattggccaacgcttcatcaagggtacagatggtatacaacacgctgaataccgcatccagcccgtgctgatgcacgacgccaacatcggcggtaagactgccggcaatcccgatcaccgggacgttaaaacgcttcgccaccctcgccacccccaccggcactttgccgtggatcgtctggctatcgatacgcccttcgccggtgatcactaaatcggcatccgccacccgctcagccagctgtagcgcatcggtgacaatctcaatgcccggacgcaactgagcaccacagaacgcatacagcgccgcacccatgccgcccgccgcgccgccgccctcaaggctcagcacgtcgatatctaaatcgcgggcgataatccgggcatagtgccgtaggccgctatcgagccggtcgatcatctgcgccgtcgcccctttttgcgggccgaacaccgcgctggcgccctgcgggccggtcaacgggttggtgacgtcgcaggcaacgtcaatccggcaatctgccagccgcgaatcgagttcgctgagatcgattcgcgccagcgtctccagcgcgccgcccccggaggcaatttgctggccctcggcggtcagcagtttcgcccccagcgcctgcgccatcccggcgccgccgtcattggtcgcactgccgccaataccaataatgatctgtcttaccccggcgtccagcgcatggcggataagctccccggtaccccaggaagtggtcagcagcgggttacgctgcgccggcgggacgctctccaggccgctggccgccgccatttcgataaaggcgcactggcgatcgccggacagcccgtaaaatgcctcaaccggctcgcccagcggcccggtgaccgtcagcggaaccagaagcccgccggtcgccgccaccatggcttccaccgtcccttccccaccatcggcaaccggcagcttgacgtactcggcgtcaggataaatctcgcgaaagccttgctctatcgcactggccacttccagcgcgctcaggctctccttccaggaatccggtgcgatcactattttcatctgctgtccttactctgagccaacccctggcgctgtcgcgcaatgccggcccccgcagaggccggcggacttttagcgcaccatgcatggacgcttgttgtcaaaggtccagcccgggatcagatactgcatcgccatcgcatcgtcgcgggcgccaagaccatgtttcttatatagctcatttgcctgcatcacgcggtccatatccagctcaacccccaggcccggggtactcggtacctgcaccatgccgcctttgatttcaaaaggttgtttggtcagacgctggttgccctcctgccagatccagtgggtatcgatagcggtgatcttgcccggcgccgctgccgcgacgtgggtgaacatcgccagcgacacgtcgaagtgattattagagtgcgaaccccaggtcaggccgaactcatggcacatctgcgccacacgcaccgacccctgcatggtccagaagtgcgggtccgccagcgggatatccaccgattgtagcgacagcgtatggcccatctgccgccagtcggtggcgatcatattggtggcggtcggcaggcccgtcgcgcggcggaactcggccatcacttcgcggccggagaagccctgttcggcgccgcacggatcttccgcataggccagcacgcccttcagctgtttaccaatctgaatggcctcctcaagcagccaggcgccattcgggtcgagagtgacgcgagcattcgggaagcgcttcgccagggcgctgatcgcttcggcttcttcaaaaccggccagcacgccgcccttcagcttaaagtcgttgaaaccatatttttcatacgccgcttccgccaggcggaccaccgcatccggcgtcatcgcctcttcatggcgcaggcgataccactcgcactgctcatccggttggctctgataggccagcggcgtcgcatggcgattaccgacaaagaacagatagcccagcatttcgacttcgctgcgctgctggccatcgcctagcagcgaggcgacgttgaccccaaggtgctggcccagcagatccagcagtgccgcttcgatgccggtcaccacgtgaatggtggtgcgcaggtcaaaggtctgcaggccgcggcccccggcgtcgcggtcggcaaactgattgcgcaccgcgcccagcacgtttttatactcgcccagcgttttgcccaccaccagcggaatggcatcctccagggtctggcgaattttttcaccgcccgggatttcaccgacgccggtatggccggcgttatctttgataattacgatattgcgggtgaagtacggggcgtgcgcgccgctcaggttcatcagcatgctgtcatggccggcaaccgggatcacctgcatggtggtgacaacgggcgttgaagagaaagtcgtcatagcatcatcctttttaattagtggcggccgaaaacgggacgtttgcggtcgaatgtccagccggggatcaggtactgcatcgggcccgcgtcgttgcgcgcgccgcccggcagcgctttataggcctcatgggctctgcgcacctgctcccagtcaagttccacgccgagtcccggcgcgtctggcacggcaatgctgccgttaataatctgcagcggatttttggtcaggcgcgcgtcgccctcctgccagatccagtgggtatcgatggcggtggggttgcccggcgcggcggcgccgacgtgggtaaacatcgccagggaaatatcaaagtggttgttggaatggcagccccaggtgagcccccagtcgtcgcacagctgcgccacccgcaccgcgccggagagcgtccagaagtgcgggtccgccagcgggatatcgacggcgttgagcatcaccgcatggcccatttcgcgccagttagtggctatcatattggtggcgaccggcagcccggtggcgcggcggaactcggccatcacctcccggccggagaaaccctgctcggcgccgcacggatcttcggcgtaggtcagaacatcctgcagccctttacacagcgcgatggcctcatccagcagccaggcgccgttagggtcgacggtgatgcgcgcatccgggaaacgctttttcagcgcccgcgcggtgtcaatctcctgctcgccgggcagcacgccgcctttgagcttaaagtctttgaaaccgtagcgatcctgggcggcttccgccagacgcactatcgcctcgctgctcaacgcctgctggtggcgcaggcggtaccattcgtgatcgcccggcgtatggtccagataaccaaggtcggttttctgccgatcgccgatatagaacaggtagcccagcacggtgacggcatcacgctgcttacccgggcccagcagctcgcagaccggcacattaagcacctggccgagcaggtcgagcagcgccgcttccagcgccgccaccgcgttaaccttcagttcgaaggtccacgcccctttgccgaaggtgtcgaaatccgccgcctgattgcctttgtgcacctgctgcaccacgcgattgagtcgggcgacctcctggcccaccacctgcgggatcgccgccagcagcgtctggtagatgacctctccgccgggcgcttcgccgacgccggtatggccggcgttatcggttaacaccacgatattgcgggtaaaccaggcgttatgcgctccgccgatgttcagcagcatgctgtcgtgcccggccaccggaatgaccttcatctctgtgataatcgggctggattgagtagtcatgattaacgtcccgctacaggtttcagttcgatacgtttgatatcgcccaccagcaccagatagctcagcaccgccaccagggcatggataccgacgtagatcagcgcgccgttgaacgagccggtggtgccgacgatatagccgatggcgattggggtgacgatgccggagatattgccgaacatattgaacagaccgccggagagaccgctaatctctttcggcgcggtatccgccatcaccgcccagccgagggcgccgatccctttgccgaagaaggccattgccataaagccgatcaccatccactccacgttgacatagttacacatcagcatggtcatggagagcagcatccccagcacaatcggcgttttgcgcgcaatgttcagcgagccggtgcggcgcattaaccagtcggagatcaccccgcccagcaccccgccgacaaagccgcacaccgccggaatggaggcgacaaagccggctttgaggatcgacatgccgcgcgcctgcaccagataaaccgggaaccaggtgataaagaagtaggttaaggcgttgatgcagtactgaccgatatagatgccgatcatcatccgcgagccgatcagttgcttgatctgccccattttgacgctaaacggcactttctgcgcgctgctcttctgatccatgttgatcagcgccccgccttcggcgatatagtccagctctttctggttcacgcccgggtggttgttcggatcgtggatcactttcagccacacaaagctgatcacaatccccagcccgcccataaagaagaacacatgcgaccaacccacctcatgcgtcagccagcccatgatcggcgcgaaaataacggtggcaaagtactgggcggagttaaaaatcgataccgctgtccccctctcctgcgccgggaaccaggcggcgacgatccggctgttgccggggaatgacggcgactcggcaaggccgacgaggaagcgcagggtaaacagcgcaacgataatgccaaagccgctgaagatatcgacgaagccctgcagcagggtaaacatcgaccagatgaagatcgaccagaaatagacgcgcttcgagccgaagcggtcgagcagccagccgcccgggatctggccgatgacataagcccatgagaaggcggagaacacataccccatccccaccggatcaaggccgatatccctggccatttccgaaccggcgatcgacagcgtcgcccggtcgccatagttaaaagaggtgacgataaacagcatcaccactatccagtagcgggcgttggtgcgcttttcagccgccgtcgccgcctgacttaatgaactcattgttgtactcctgaatcatagcgtttagctacgttcattctgaacagcacaacctgtagggtaatcagaatgacgtggtcgtgttttgatagttgtcgttatatctggcactgcatttatcactggctggagcagtatatgaagaggcacaccgcggctcaccgtgcatccacacagcttttacgccgctattgcaggtggtttgtggcgaatgcctgaaagaatggggggaagttcacggaaatgaaaagccagcgccgctggcgccgcatagcgcagcaaaaagggccggagtgtgaaatacctcacttgacccggtgaaactggctggcttaagccatgatattgttaaggatattgtggcgtttgcctaaaggcgtggcgcctggaaagcgctactattttgacgtccgcgtatctggccgcgacgtattgaaagagcgccctctgcgtagggagagggcagcgcttttatgcgagcagggtggcccactgctcaacccacggattggagacgctctccggctccgggtcttcgctggcgtcaatcttcagcatctcgccgatgcgcttcgcgccctgctcctgcagcagctgatcgaacttcaggccgccgccgcaaaagttggcataggtgctgtcgccgagcgcgataatgccgtaccgcaggtgaggctgatacatatctttgatgccctcatacagcgggacgatgctgtccggcaggtcgccctgcccggtggtggaggtgaccaccagcacatacttacccgtgtaggattcccagtcgttgacctgcggatcctcatacacggtagccttgtgtcccagtccgctgaggatcgcttccgcttcttccgcgaccagcagcgagttgccgtacatggtgccgacaaaaattccgacttccgccatgctattatctccctggattgaccttattctcttcatcctgaccgctgtcgtcggcaaactcaaccctttcatttagcgggagaagcccgcgccagccaaactgcgacagcgcgcgcatccagacgtcgtcaaaaccggcgcgcagggtcagcggctcgccggtaaaaggatgggttaacgacagctcgctggcgtgcagcatcaggcggtgacagccgaaatgttccgcggcgctgcggttttgccgcagatcgccgtgcttgctgtcgccgaggatcggatgacggaggtgggccagatgacggcgcagctggtgcttgcggccggttttcggctccagttccaccagcccatagcgcgaggtgggatagcgcccagtcgccactggcatctccactgtcgccagaccgcggtagtgggttaccgctggctgcggccctttatcttcgcgggcgaacttatcggcgattctatccagctcctctaccagcgggtaatccagcagcgcctcttccatcagccagccgcggacgatcgcatggtagcgcttccggatctggtgctgctcgaactgttgcgccagcagccggcccgcctcgctcgacaatcccatcagcagcacgccggaggtgggccggtcgagacgatgagcggtaaaaacgtgctgaccgatctggtcgcgcacggtctgcatcaccaccactttctcgtcgcgatcgagccagctgcgatgcaccagccagcccgagggtttgttgaccgccaccagccagtcgtcctggtagataatctccagcatcaggcctgctcaccggcaaacagcgcgtctaacagcagaagttccgccagcatggattcgcggaccgggtgggcctgatccagagccatttcgtaataaggcgcaacggcaaaattttgcggcagcggctggccgctctccagcagctggtgcatacgcgggatcaggacccactgcagccactccagcggctccagggtatccaggcaaaacggcttatcgctggcgaaggcgctgctgtccggcgccgtctcctgccagtgctccgtttcgcgcagcagggcttcaatggcgcgcaggcgatcgcgcacgctatcgtgaagagtcatggggaaacctcgatgagttaaaaaccgggcgcaggatagcaaatccgcaggagaaataaaaaaagggagcactgtataaacagtgctcccggttcgttttgcagcagtcccgctacattggtgctccctgctcgtccttgaaaacttttcctgaggtctcctgaccatgttcatccataaacacgtgcatcctgctttcacaccaccccgatgcgaaatgacttatccataagtttgtcccgatcttcctgatccaccgttcatcctgagcggctctcgttctccatcctggaggtgtccattacgcgatcctgcgttatccttgcttcatcctgaagcctgtccctgcaacgccgtcctggcgggtcctgcagaagcgccatcatcctgatgttcgcttcatttcgcgacgtcctgtcgacagacataggatcactgattctgccccttcttacaacccttcttgagacaatctcttaagattagtccccactcaaaaggacgaaaaaattaagatctgatttaataccaacaacttatataaaaaagtatggattaaatttaccttaaatgatgacgatctcttacaggttttgtaagagatctctcacaaacgatctggcagactggattacagaactggctcaaggtggttgaggaaacccgcaagtgagggagaaagcgtaatgcgtttggcggtgccgagggtctctttgactacctcgccgctgagattacagacggatatcacatccagttcactctcgagggtggcgatgaacagcgtcggcgacagcttcaaccgcttctgcaccaccaggtgcccgattaaattttcctgcacccgctggaaatcctcttcactccaggtctgcagcagcgtcaaggtttcgccggcaaaccggccggacatatcgccggcaaactgagtggtataataagaatgaagcggctgttgtaccacaatgtcgagggcgcgttcaaccgcgctgatattttgcgccagcgaaaacggctgcggctgccagaaaacggcctcgccctgggtgtcgacaacgcaaggcgacgggacgccgtaaagctcttcactgcgcggcaggctgtggcgctgctgctgccagacggcgcaatatcgttgggtaaaagcgcgtagcgcttctgctgtctgatggtccaccggtttctctcttcacgttagacaggatacactggagcaatagtgtacccgctttactatggtgaaacatgtcttcttacgataataagcaggcgctggccggcctgacgctcggtaaatcaaccgattaccgcgatacctatgacgcctcgctgctgcagggcgtgccgcgcagtttaagccgcgacccgctgggcctgcatgccgataatctgccgtttcacggcgccgatatctggacgctgtacgaactctcctggctgaacggcaaaggtctgccgcaggtagctgtcggccacgtcgagctgcccgataccagcctcaatctggtggagtcgaaaagctttaagctctatctcaacagctttaaccagacccgtttcgccagctggcaggacgttgcagagaccctgactcgcgatctcagcgcctgcgcgcaggggaaggtgaaggtatcgctctaccgcctggatgaactggaaggccagccgattgcccgcctgcacggcacctgcatcgacgatcaggatatcgagatcgataactatcagttcagcgccgattacctgcagggcgccgccagcggcaaaatcgtggaggagacgctggtcagccacctgctgaagtctaattgccttatcactcatcagccggactggggctcggtgcagatccagtatcggggggcgaaaatcgaccgcgagcagctcctgcgctatctggtttcgttccgccaccataacgaattccatgagcagtgcgtcgaacgtatctttaacgatattctccgtttctgccagccggaatcgctttccgtttacgcccgctatacgcgacgcggcggtctggatatcaacccctggcgcagcaatggcgacttttcccccgccaccggccgcctcgcccgtcaataataaacaatttcacaatttgcgtgcgtttaggcgcgcgcaaggttgtggaaacgccgttcgcagggctattgtaatcacaggaagaccataagcgtcctgtaaggagttcacttgattacacatgttagcccgcttggttcaatggatatgctgtcgcagctggaagtggatatgcttaagcgcaccgccagcagcgacctgtaccaactctttcgcaactgctcgcttgctgtgctcaattcggggagcctgaccgataacagcaaggagctcctgtcccgtttcgaaaatttcgagattaacgtgctgcggcgcgaacgcggcgtgaagctggaactgatcaacccgccggaagacgccttcgttgacgggcggattatccgctccctgcaggccaacctgttcgccgtgctgcgcgatatcctgtttgtttacggccagatccacaataccgttcgcttcccgaacctcgatctcgaaagttcggttcatatcactaacctggtgttctcgatcctgcgcaacgcccgcgcgctgcacgtcggcgaggcgccgaacatgatcgtctgctggggcggccactccatcaacgaaaacgaatatctctacgcccgccgcgtcggtacgcagctgggcctgcgggaactgaatatctgcaccggctgcgggcctggcgcaatggaggcgccgatgaaaggcgccgctgtcggccatgcgcagcagcgctacaaagacagccgctttatcggcatgaccgaaccatccattatcgctgcggaaccaccgaacccgctggtcaatgaactgatcatcatgccggatatcgaaaagcgtctggaggccttcgtacgtatcgcccacgggatcattattttcccgggcggcgtcggcactgccgaagagctgctctacctgctgggtattctgatgcatcccgacaacaaagcgcaggtgctgccgctgatcctcaccgggccgaaggagagcgccgactacttccgtgtactggacgagtttatcacccataccctgggcgaatcggcccgtcgccactaccggatcatcattgacgaccccgcggaagtggcgcggcagatgaaaaaagcgatgccgctggtgaaagagagccgtcgcgagaccgatgacgcctatagctttaactggtcgattcgcatctcgccggacctgcagatgccgtttgatccgacccacgagaacatggccaacctcaaactctccccggatcagccggtggaagtgctggccgccgacctgcgtcgtgccttctccgggattgtcgcggggaacgtcaaagaggtgggcatccaggccattgagcagtacggcccttacaaactgcacggcgatccggagatgatgcgccgtatggacgatctgctgcagggcttcgtcgcccagcaccgcatgaagcttccgggcggcaccgcctatattccttgctacgaaatcatcgcctgatttcccactctcccgccggggcatcgcctgacgcctgcccccggcgggctctcttcctctgacttccagaacgcgctaaaaacctttctgttactaatcaatcacctgaattatttctacatagccaaacgtttgcgttggtaaaaactgcgacaattatcactgcaaaaaatggttttaagcgcaaaaacgtcgactagttctcttttttacagtaaatccctcgttattacgccgctccgcttttatctcatatgctgcaaatggtagccttcgcgccacaaatcgctggctgatcaccagaaacaggctgttggactaaaaatacgcacattgaaagtggattattgcatttgagatcgcgatcactgatgcataaaccatataaatgtatctttccggcccaattattacggagaaaatttctaaaaaaaccgtaattaaacgaatttcatgttacgcaattgtatttattcattagattttgttgattcctccaggagatacagatggaaaccactcaaaccagcaccatcgtttcgggcgaaacccgcagcggatggcgtaaaaccgacaccatgtggatgctgggcctgtacggtacagcgattggcgcgggcgtcttgttcctgccgatcaacgccggcgttggcggcatgatccccctgatcatcatggcgattctggccttcccgatgactttcttcgcccaccgcggcatgacccgcttcgtgctctccgggaaaaacccgggcgaagacatcaccgaagtagtggaagaacacttcggcgtaggcgcaggtaagctgattaccctgctttatttcttcgctatctacccgatcctgctggtttacagcgtggcgatcactaacaccgtcgaaaccttcatggcgcatcagctgcacatgacgccgccgccgcgcgccattctgtcgctgatcctgatcgtcggcatgatgaccattgtgcgtttcggcgagcagatgatcgttaaggcaatgagtgtgctggtgttcccgttcgttatcgcgctgatggtgctggctctgtatctgatcccgcagtggaacggcgcggcgctggagacgctctccctgagcggcgcttccgttaccggcaacggcctgctgatgaccctgtggctggcgatcccggtgatggtcttctccttcaaccactcgccgatcatctcttccttcgcggtagccaaacgtgaagagtacggcgaaggcgctgagaagaaatgctccagtatcctcgctcgcgcccacatcatgatggtgctgaccgtgatgttcttcgtcttcagctgcgttctgagcctctctccggcagacctggcggcggcgaaagagcagaacatctcgattctgtcttacctggcgaaccactttaacgcgccaatcattgcctggatggcaccgatcatcgcgatgatcgccatcaccaaatccttccttggccactatctgggcgctcgcgaaggctttaacggcatggtgattaaatccctgcgcagtaaaggcaaatcgattgaaatcaacaaactgaacaagctgaccgcgctgttcatgctgatcaccacctggattgtggcaaccctgaacccgagcatcctcggtatgatcgagacccttggcggcccgattatcgcgatgatcctgttcctgatgccgatgtatgcgattcagaaagtcccggcgatgcgtaaatacagcggccatatcagcaacgtcttcgtggtgattatgggcctgattgccatctccgcgatcttctactctctgttcagctaattcattcaacgcctccccccgcgccgctttacggcggcgcgctttccgacagcacgggaatacatatgatcagcgtattcgatatctttaaaatcggcattggcccttccagctcccataccgttggaccgatgaaagcgggcaaacaattcactgacgacctgatcgcgcgcggcctgctggccgaggtgagcaaagtcgtcgtcgacgtctacggctccctctccctgaccggtaaaggccaccataccgatatcgcgattatcatgggactcgccggcaacctgccggacaccgtcgacatcgacgccattccgggctttattcaggatgttaatacccatggccgcctgatgctggccaacggtcagcacgaagtggacttcccggtggatcagtgcatgaatttccatgccgacaacctgtcgctgcatgagaacggcatgcgtatcaccgccctggccggcgacaaggtgctctacagccagacgtattactctatcggcggcggctttatcgttgatgaggagcacttcggccagactaccgaggcgccggttgccgttccttacccttacaaaaacgccgccgacctgcagcgtcactgccgtgaaaccgggctgtcgctctccggcctgatgatgcagaacgaactggcgctgcacagcaaagaagcccttgagcaacacttcgccgcggtgtgggaagtgatgagcgccggtatcgagcgcggcatcaccaccgaaggcgtcctgccgggcaaactgcgcgtcccgcgccgcgccgccgcgctgcgccgtatgctggtgagccaggacaccaccaacagcgatccgatggcggtggtcgactggatcaatatgttcgccctggcggtgaacgaagagaacgccgccggcggccgggtggtgaccgcgccaaccaacggcgcctgcggtatcgtgccggcggtgctggcctactatgacaagtttatccgcaaggtgaacagcaactccctggcccgctatatgctggtcgccagcgcgattggttcgctgtataagatgaacgcctccatctccggcgccgaagtcggctgccagggtgaagtgggggtcgcctgctcgatggcggcggccggtctggcggaactgctgggcggcagcccgggtcaggtgtgcatcgcggcagagatcgctatggagcataacctcggcctgacctgcgacccggtcgccggccaggtgcaggtgccgtgcatcgaacgcaacgctatcgctgccgtgaaagcggtcaacgccgcgcgaatggcgctgcgccggaccagcgagccgcgcgtgtgtctcgataaagtgatcgagaccatgtacgaaaccggcaaagacatgaacgccaagtaccgggaaacctcccgcggtggtctggcgatgaagattgttgcctgcgattaacctgctggcccgccacgcgtcggcgtgtcgggccatcgtcctgcataactctttttgttatatcaataaaattttagttatttaatggttataagcgctgtttgttaccttacgcaaaaccgctaaggagaacagacaatgtccaaccgattccgccccgcctggctgctggtcctcgccgccctctctacctccgcgctggccaaagcgccggaaaccgtcaacatcggctatcaaaaggcgaatatcttcgcgctgctgaagtaccgcggcacgctggatgagagcctgaaaaaacagggcattgccgtacgctgggtcgaattccccgccgggccgcaaatgctggaggggctgaacgtcggtagtatcgatctggccgcgaccggcgatgcgcctccggcctttgcccaggcggcgcaagccgatctggtctaccttgcccactcccccgctaacccgaaaacggaagcgattgtggtgcctgaacagtcggcaatccacagcgtggccgacctgaagggcaagcgcgtggggttgaacaaggggtctgacgtcaactacctgctggttgccgcactggaaaaagcgggcctcagctataaagacatcaccccggtctatctgccgccggcggacgcccgcgccgctttccagcgcggggcgattgatgcgtgggtgatctgggatccgttcctcgcagaagtggaaaccaacgcgaaagcccgacagatccgcaatgccgaggggctggtgccgcactacaccttctatctcgccagccgcaagtttgcagatacctacccggagacagcaaagcaggtggtggatgagctgggtaaactcagcgcgtgggcgaacagccatcaggacgaggccgccgggctgctgtcgacctcaaccggactggataaagccatctggctgaagaccctggcccgcctgccctacggtgccgaacgcatgaccccggcggtgtataacgaacagcaggcgctggcggatacctttacgcgcatcggcctgctgccggtgaaagtcgacgtgcgcagcgccacctggtcgctggataaaccttgattttcctgacgacgggaagctctgcgcctcccgtcgccgacaggcttaccccgccgttttctcaccattgcctatctgccagataaaggtgggcgcttcaccgttcaccagccagttaccgatattacgtgccttataaatcaccggattatgcgaggcaaccgtccgcgcattgcgccagtggcgatccagcgcaaggcgagttcgcgtatccgacgccccgagggcattaaacagctccgtcgccgcccgcgggatccagtcgctggcgatcacctgcgcctgcgccgcttccacttccgccagctggttacgccgggcaatcaatgcttcgtcgtcgctgacgtgcgccacataggcctgctgcagcgattccgcggcctgcaggaccgcggcccgggtcgcccatgcccagctgctgatctgcccaacgacctgcagaacctgggcgtcatcgcgcggcacggcggcgttgccgtggctgtacatccgggaacgatgtttgacgccctgcgcggcatcccgctcaaccgccaggccaatgcccgcgagggtcgccagcagcacatgctggtagaaggcggtctgatagcgaaagcgctgggcaaaatcatagacatgttcggtttccacccgagcgccggtaaagcgggtggtcccgctgccggtcaaccgctggccaaagccatcccagtcatcttcccgcaccacgccggtctgctgggtgctgaccagggctatcacatcgctggcggtatcactgcgccgggcaaacacatcgatccagtcggcgtacagcgcgccggtgctgtaaaacttctcgccgtcgagtcgccagccgccctctgtcggcgtcactctggtgttcacctctcccagcttaaccgcgccgatctccgtccagccgctgcccaccagctcaccgtcgaggaagcgacgaaaccagcggtcgcgcccggcggaatccggctgattcagctgatcttccacaaaggcaaagtgcgcgcgcagggcctgcggcaggttagagtccgcttgcgccagctcgatcagcagcgcactgagctgcggcagcgaagcgccccagccgcccttctcgcgcgggatacgcagcgtgccgaagcccgcttctttcagccagcggatcggctcatcgggcagaatgcgctgctgttcgcgctccgcagcgccctgggcgatacgggtgaatatcgggcggaaggcggccgccagcgcgtcataatcggtgccagtagaaagcagggtcattgtcagttccttattcatgaagtgcgtcgatatcttctcgcgtcggttcatgacggaccgccagcaggaagaaaatgggaataatggcggcaagcgagaccacccagaacatctgcgtgccgagggaggcctgcagcagcggcagaataaacaacgccagcgcgctgccgatcccggagagtgcccggctgaaaccgaccccggtggcgcgaatggcagtaggataggagagcgccgggtagatcatcagctgcgcccccgggccaaacccttcggcgaacagccacagccccagcatcgcgatagccagcacgatacctgccgtcgcgtgcggttgccccaccagcgccagcacaatcagcgccacaaactgcagggcgaagccggctatcgccacatgacgcgaaggatatttccacgccagatgcataccgagcagcccaccggtaaaagcaaacagggcgttcagccccagcgatgccgaaatagtttcgaagacgccagccccgaggaactgggcaagaattgacggcaggaaaaaggcaatcgccgtgtactcgaaggagatacagatattcatcaccccggcgacgatagtccgctcgcggtagggtttttcgaacagcacgcggaagctcactttcggcgctggcgcgggcttcgccgccgggacctcatgggcatggatcccccaggagtcgcgtaaaatacgcactgcagaggtcagatcgccctggttcgccgcccacagcggggattcattcataaatcgactgcggacggcaataatcagcagtgccggcacggcgccgaacagcagggaggcgcgccacagccagtcaagatgctcctgcggcagcaggaaatagaggccgaagataatgagaaagcagacggttgaggcggcgtaccacatcgggcaccacgccgcgaggcgagccgctttgttgcctttgccggcaaagcgggaaaactcggccagataggacatcgctaccggcaggtcgatgccaacgccgatgcccatcaggaagcgggcgccaatcaacacccagacgttcggcgccagcccggcggcgatagccgaaatcacgaaaaagaacatatcggccataaaaaccgaatagcgaccatatttatcggtcagccagccgccgataatattgccgacgatagtcccgaccataatggacgaagtcaccaggccggtcagcagcggtgagagctgaaattcacgtacaacgtcatcaataccgtaggagagcgtggttaagtcatatgcgtcgagaaaaacgccccccagcgcgaggaagacaatcatccgcgcatatttcgcttgttccttgccggaattaattagccgcgccacatccccgacgctactgaccggtaccgaagcgataccgggattatccactggtaatgtactcattttttcaccttattattttgtgcaggtcatcagcggttatagaccgcgcgcgacgagaatcaaaacaacaaatcattctataataatcaatataatcaataagttaataaatatcaccagcacaaaaaggacgcgctttcacgcatcctcaagggaaataaataacaacgaaaatagacgtcgtgcaggacgcttattccgcggacactggaactaatacgtcttttaccagcgggtcatcggtggtttttaaccacgtctggatccgcggatcagaaaaagcctgttttaatttgacgatattttcctgcgataaatacggtgtaccaatcactaattgcgaagcaaaggtgcgcggcgccggcgggaataatatgcctttctcacgcggcactttcccggcgtcaaattgcgagacatagccgatggcggcatccaccgaatttaacgcccgcggcatggtcagcagatccagctctttaaagacaaactgatgcgggttaccgacaatatttttcagcttcgccgtgcgcggctccaccgccgggtcgagcgagatcaacccaatgcgctggagcagccacagggcctgcccctgattggcgccatcgtcaggcacgacaatggtcgcgccgttgggcaacgcctgtaccgacgagtagcggtcggaatagatgccaaacgcccactggaacaccggcaccgtggtcgacagcgcaaagccgttagcgtccaccacctgtttaagccaccactgatgctgatagatcgtcccggcatactgaccttccgctaccgcgcggtcagcctggaccggatcctgcacccccaccgcctccagtttcagaccgtaatcgggcgcaatatgctgattaatatactcaatgatccgctgctcgccggccatcgccggctcgtagtgaatttttaacgtgctgccgaagaccacctgctggctttgggtatgtccccgccaccaccagaaggcgatggcgagcaggataatcaccgccagcgccgccagccagggccagcgccgcgctttacgtaactcaaattgctctgttgtcatacaaggttcccctgcgtgtggcgtaaacggttgaccagacggtcacccaaaaattgaatcaactggatcgtggcgatcagggcaacgatcgtcgcgatcatgatgtggttgtcgaagcgctgatagccgtacaccacggccaggtagccgatgccgccggcgccgatggtcccggcgatagccgaatactcgatcatcgagaccaggtttagcgtcaccgccgccaccagcgcgggcatggcttcactgagctgcgcgctggcaatgatttgccagcgcgacccgccgcagacgacccccaccgcggtgacctccgccggcaactcgcgcagcgcgttctccaccagacggccaaagaacgggacgccggcggcgatcatcggcacgaccgcggcgggtatgccaatcgtggtgccggtcagccagtaagtgaacgggataatggcggccatcagcaccagaaacggcagcgaacgtcccatattgaccacccagttcagcagccggtacagcagtgcgtgcggaaataagccccgcggcgaggcgttaaacaacaccacccccaccagtcctcccagcgtgacgacaaacagcatcacaatggccaccatcagccaggtttcgccataggcggggagcagcagcgaagggatttcgccccagggggtatcctgactgatgactgtcggtttcataccgcctccctgagcaacggcgcgctgtcgaggatctccgccgttatgccgagctgcgccagcaggccctgcagtcgcgcgggcgacaggcgttcgccctgaaagcgcactccggcctgcaggcgaccggccagccgaccattaatcacctcgacgtgaccgccaaggagatcgatctgcagcgcccactgctggctcaggcggctgatccagtcggtggccaccggcacatcccagcggtagctcagacgcagcagcagatcgctgtgggtagctgccgccggcgtcagcggcaacagctgctggccgagcagagaatcgggacgcgccagcagatcttcgatccgcccgtactggacgatcgtcccgtcgcggatctccgccaccgcatccgccgccgtgcgcaccgcgtccatttcatgggtaatcaggacgatcgccagctggtactcatcacgcagccgcttgagcagagccagcaccgaggccgtggcctgaggatcgaggccggaggtggcttcatccgccagcagaacggacgggcgcagcgccagcgcgcgggcaatgccgatccgctggcgctggccgcctgagagctgggccggccaggcatccgctttgtggctcaggccgacgctctccagcagctcgccaacccgcgccttgatatcgcgctccaccacaccaagccacgccagcggcagggcgacattctcccaggcggtcctgcggctcaacagcgccgaagactggaaaacggtgccaatcgcccgccgttcccggcgcagcgcctcgccggacagcgccgacagatccttgccattgatacgaatgctgccgctgtccggttgctccagcaggctgatgcagcgcgccagggttgatttaccggcgccgctcggccccaccaccgcggtgatggagcgctcaggcacctgcagcgacagccctttcagcaccgcgctgagccggccatccgccgtgcggtaacttttatgcaggtcatcaatagcgatcatgtcaccttctcctctaccgatgccgccgtgcgcgcatcgcggcggtagctggcgcccgggtgaggcgcggccagacgcgggccgccgccgaacagtttttcgcgcagggtcccctcgcggtactcttgcttaaagacgccg

SEQ ID NO: 5355 - DNA, 5583 bp, Unknown
  gut microbiota DNA sequence
gatcgcgccatagccgagaccgttgccaataccatccataaagctcgccagcggcggcgacttcatggcgtaggcttcggcgcggcccatcacgatgcagttggtgatgataagcccgacgaataccgacagctgtttggaggtctcataggcgaaagcccgcagcagctgatccaccacgatcaccagcgaggcgatgatcgccatctgcacgatgatgcgcacgctattgggaatatggtggcggatcatcgagataaacatgctggagaacgccgtcaccagggtcaccgcaatggtcatcacgaaggcggtttccagtttggtggttaccgccagtgcggagcagacgcccagcacctgcagggcgatggggttattggcgatgagcggccccaccagcacgcgcttcacctctttcatatcgctctgttcagccattattcagctctccctcacgaacctttttcaggaacggaccaaagcccagttcgcccatccagaaatcaaagctatgctgtacgccattggacgtcagcgtggcgccggataaaccgtcaaccgcgtggagatcgcctgcgcgcgcgccgcctttcaccaccttcagcgccggcatgccgttgtcatccagcacctgcttgccgacaaactgctggcgccagttcgggttttccacctcgccgcccagccccggcgtttcgccctgatcgtagtaagtaatgccttttaccgtgcggccatcgacgtccagcgccacgaaggcatacatcatcgaccacaggccgttgccataaatgggcagcaccacctgctcaatcttctgctgcgcgtcgcgcaccaggtaaatttccgccagattactgcgtcgctttataccagccggatcctgactggcatccagggccatactctgctgcggatccttcagcgcctgagcctgattaaatttacccgggtctttctccagcagttcgccggtggccagattcaccagtcgcggggtaatgcgcgccgcgaaggtgtccgctaccgcatccgcatccatatcggggtgcatcagccctgacactgccaggatattgcgctgcttatccaacgcccgctgcgcctgctggcgggatttcagccccacggccgagcccgccaccacgatggagcagaccagacaaagcaccagcaccaccagcagcgttttgccgatgctatcgttacttttcttctcagccacgcgacttcctccgcttaatattggcctgcaccaccagataatcgaacagcggtgcgaagaggttggcgaagaggatcgccagcatcatcccttccggataagccgggttcaccacgcggatcagcacgcacatcacgccgatcagcacgccgtaactccatttccctttatcggtaaacgaggcggataccgggtccgtcgccataaacatcatcccgaaggcgaaaccgccgagcaccagatgccagtaccatggcatagcgaacatcgggttggtgtcggagccgataacgttaaacagggtggcggtggcgatcataccgatcattaccccggcgacgatgcgccaggacgcgacgcggccaaagaggatgatcgccccgccgatgaagatcatcagcgttgacacttcgcctattgagccgggaatattgccgaggaaggcgtccatccagctcaccggcacgccagtcgccacgttcaccagcgcttcaccgccgccgctggcccactgggagagcggcgtggcgccggagaaaccgtccgccgcggtccatacgaggtcgccggaaatttgcgccggataggcgaagaacaggaacgcgcgccccgccagagccgggttgaggaagttgcgcccggtgccgccaaaaatctctttggcgatcaccacgccgaaggagatccccagcgccgcctgccacagcggcagcgtgggcggcacaatcagcgcgaagagaatagaggtaacgaaaaaaccttcgttaatctcatgcttgcgcacaatcgcgaacagcacttcccagaagccaccgacgataaaaacggtaatatagatcggcaggaagaagaccgcgcccagggtcatcatgctcagccagccggcgtcggcactgaagctcacccctaaccactgggcgacgctgtagtgccagttgttggcgatcgcctgctgcagctgttcggcgccgtatagcttgtgcagcgccggaatggtctgcagcccaacgttgtacatgccccagaacatcgccgggaatacggcaaaccacacgaggatcatcatccgcttcaggtcgatggcgtcgcgcacgtgcgccgcgccgcgggttacctggcccggcgtgtagaagatggtcgccgccgcctcatacagcgggtaatatttttccagcttgccgccatgcgtgaaatgcggctcaagtttctcaatcaggtgctttaagcccatctcttatccttcctgctcaatccgggttaacacgctgcgcagcgccgggccatattcatactttccagggcaaacataggtgcacagagccagatcttcttcatccagctccagacagcccagcgcctgagcgctgtcggtgtctccggccagcagatcgcgcagcagtatggtcggcaggatatccagaggcatcacccgctcgtagttgccgatcggcaccatcgcccgctcgccgccgttggtatcggtggaaaaatgaaagcgcttgcgcttgaagaaatggcccagcgtggtgcgggtaatcgagaatttctctttgcccggcatcacccagccgaagagctctttttcccgcccttctttgaccacgctcacctgcagatggaagcgccccaggaaggcgtgagggccatgggcgcgggcgccgctaagcaccgagccggaaatgaccctgttttccccctcctgcaactcacctgccagcagatcctccaggctggcgccgagcgtcgttttgaccagccgcggagatgttacctgcgggccgccgagcgcaattatccgttcgcagtagagctccccgtcgaggaaaagcttaccaatggcgatcgcgtcctgataattgaggtgccagacctgcttattcaggctcaccggctccagaaagtgaatatgcgttcccggcagccccgccgggtgcggcccactgaactgattgaaacaaacctggccgagaggatgaccgcccagcttgccgccgctgggctggcagacgtgcactttcccgtcggtcaagcgcgtgagcacggtaagaccggcgtcgaaggcggcacgttcggccagaataatcggctgcggctccgccgccagcggattggtgtccatggcgttaacaaagatagcggcgggcgtgctccccgggagcggcgttttgctgaacggtcgggtacgcagcgccgtccattggcccgacgccagcagctgctgctgtacggtgtcgcgcggcagttcggccagcgcgtccgcggcgtaacgggtaaacgccaccgcgtcattgccctcgatatcaatcaccaccgactgcaacacgcgccgttcgccgcggtggatcgcgctgacgatcccgctcgccggggcggtaaagcagacgccagggatctttttatcttcgaacaggatctgaccttttttgacccgatcgccttctttaaccgccatcgcgggacgcatgccaacgtactcttcgccgagtagcgcgacgcgcttcaccgctggcgcgggagaaatctgctgtaatggcatgccagctatgggcaaatccagccctttcgtgattttaatcatatcgttagcaggtatccgtaacctcaaccccgacgcaggtcagggccagcttattgacagaatggcagagaagaaagggcgaaacggcgccagtagcgctcaggacggaagagaagcatcctttcttactctgatgatgaaccggcgcaagtgtaacatttcgtgagcggcggctgtagcgcaaggggcgataagtgcttctaaaatgcgagctattgcgcaaagttctcactgtgttttcgtcgctggcagggtataaagtgaggctgatttgtaaacgccgccacgtcgcccttgcgaaaaaatgccgtgatgctaatgtgagcgctctaaatccagaaaactctgatttcgggtctctcttgccgtcctggcaatgtggctattttgttttatcaaggaacaagcagtatgcgcaaaatcgcattatttattgcgatgcttctgttgccgtgcgtgtcatttgccgggctgctcagcagcaacagcccgacaacgccggtaagcaaagaatataagcagcaattaatgggttcaccggtttacattgagatctttaaagaagagcgcatgctcgacctttacgtcaaaatgggtgagacctaccagctcctcgacagctaccggatctgcaactactccggtggcctcggtccgaaacagcgccagggcgatttcaagagtccggaagggttctataacgtcacccgcagccagctcaaacccgacagccgcttctataaagcgattaacatcggcttcccgaacgcctacgatcgcgcccatggttatgaagggaaatacctgatgatccacggcgactgcgtctcagtcggctgctacgccatgaccgacagcggtatcgatgagatcttccagttcgtgaccggcgctttagtcttcggccagccaagcgtgcaggtgagtatctatccgttccgcatgaccaacgccaacatggaacgccacaaatactcctactacgcggatttctggaaacagctcaagcctggctatgactatttccagcagacccacaaaccgccggtcgtatcagtgaccgacggccgctatgtggtgagcaagccgctcagccacgaggttgtccagccgcagctggcctcaaactacacgctccccgagacaaaataacgcccactcgcctggcatgatcttatgccaggtttcattggccgtcagcggctgcgtggcgataaccgtgaccacatcgttgggtgtggtctcgcgttgaaagtcgatctccacatcctggtccagcagttttgccacgccgaacggcgctcgccgggtgatccagtgcagattggtcgagcagaacgccattacgtagcgcccgtccgacagcagcatgttgaacacccctttctcacgtagttcacccgcgagggtggcgatatacttgaaaacgcccagcatattgcccggcgtgcgcggatagcgctcggttaaacggtgcagcagccagcaaaacgctttttcactgtcggtttcacctaccggatgaaaattaccggttttcagcgacttatagccttttagctgcccattgtgcgcataggtccagttgcgcccccacagttcgcgggtgaagggatgggtgttctccagggccaccctcccgcggttggcctgacgaatatgggcgacgacggaacaggacttaatggggtaatcctgaaccagtttcgcgatcggcgactgaaagctcggctggggatccttgaatgtgcgacagcctttaccttcatagaaggta

SEQ ID NO: 5356 - DNA, 18480 bp, Unknown
  gut microbiota DNA sequence
cctgggcgtggtgcgtatggacaatgaaaagagcttcgtagttgccgatatcccggggctgattgaaggtgcagcggaaggggcaggcctcggtatccgcttcctcaagcacctcgagcgctgccgcgtactgctgcacctcatcgatatcgatccgatcgacggctccgatccggttgagaatgcgcgcattatcatcggcgaactggagaaatacagcgagaagctagcctccaaaccacgctggttagttttcaacaagattgacctgatggacaaggccgaagctgaagccaaagccaaagcgattgccgaagcgctgggttgggaagagaaattctacctgatctccgcggccagccagcagggcgtgaaagagctgtgctgggacgtgatgaccttcatcatcgaaaacccgatcgtgcaggcggaagaagagcagaagccggagaaagtcgagtttatgtgggacgactatcaccgtcagcagcttgaagaggccgaagccgaagcagaagatgacgaagactgggatgacgactgggatgaggacgacgaagaaggcgtcgaattcatctacaaacgctaatcctgacttctctggatcaaaaagggccgcatctgatgcggcccttttgttttaattgttctggtacaaatctttatacaagcggctttcaaagcggaccagtgggatgcggcgattgcgctgatcagctggctccacggcgtagccggagagatattgcacgaaggccaccttttgtccgctggcggtagtgatgaagcctgcgaggttgtaaaccccctggagcgacccggttttcgccgagactttaccatcgacgcccgcctgatgaagaccggcgcgatactgcagcgatccgtcatggcccgccagcggcagcatggagatgaagttgagctcggtatcgtgctgggcgatatactgcagcacctgcatcatggtcgccggggcgatcaggttgtggcgcgacaggccagagccgtcggcgatgatagtgttgccgagatcgaccccagcctgttgacgcaggatctgccgtacggcatcggagcccgcccgccaggtgccaggtacgccgaaccgggcgtggccgatggtgcgaaagacggtgtcggcaatcatgttgtctgacttcttcagcatgatccgcagcagatcgtgcagcggagccgactggctggttgccaacacggtgccgggctcattggccagcgtctggcgcagcagcgtgccgctgtaggtgatccccgcctgggccagctcggctttgaggatcgctccggcgtagctggcgccatcctgaatggcgaaggccagaggcagcggctcgctacgctgcggcaggcagccggtgagagtatagcgattgagatcgcccggcaccacgtcgagctcgcaatactgcgcttccgatgagccacgcgccagcgttcgcacctggctgaacatggtgaccggataataggatgcaacgcgaatgaaggcgacatcgcccggtttctgcgcgctatacagcgagacagagaagcagttacggtcgacaatcgccgccgccggcggggcgctgaagcactgcgtcaggtcgttccacggccagccgggcgctttgtcatggctggcgaagaccgacgtatcgatgagcacattgccttcgatacgctgcacgccggcttttttcagcgtcgccaccatattgcgaatatcctgccgtttaagcgtcggatcgccgccgaagcgcgcaatcaggtcgcctttcagcacgccgccgtcaagggagcctttggtttccagcgtggtggtaaagcgaaaatcgggccccagttgcagcagcgccgccagcgcggtgatgaccttttgcgtactggccgggagcgccatttgctggctgtgatagtcgatttccggcgtcgatgcgccgaccttttgcgccataaaggcaaggttcgcaccggcgggaagctggttgatgtactcgtcaatattcgccgcctgagcgctaagcgctataccggcggtcaatccgatgataaatctgggaaatcgcataatctcgcgctaacaacctgaagccaggccgtcatactacggtgcaacgcccagtaaagtaaacgatgacccataatgaacttcggggtaaaatacccatcaaatgaaaaattgctgctgacctggggagtgtttcccgggtcggtttctttttgctcgtgccctgcccgtgggcaggacaggtggcggagcggagctatccgttccctgaaggaatgataaagaggtataactaatgcaagcgattccgatgaccttacgtggcgctgaaaaactgcgcgaagaactggattatctgaagtctgtgcgtcgtcctgaaatcattgccgctattgctgaggcccgtgaacacggcgatctgaaagagaatgccgagtatcacgccgcgcgtgagcagcagggtttctgcgaggggcgtatcaaggatatcgaagcgaagctgtctaacgcgcaggttatcgatatcaccaaaatgccgaacaacggccgggtgatttttggttctaccgtcagcgtgctgaacctcgataccgacgaggaacagacctaccgcatcgtgggcgatgacgaagctgattttaagcagaatctgatctccgtgaactcgccgatcgcccgcggtctgatcggcaaagagcaggatgacgtcgtgactatccgtaccccgggtggggaagtggaatacgaaattaccaaggttgaatacctgtaaggcgtatttcccgctacgatgtttatagattgtaaagaaaggaaaaaggccgcatagcggccttttatcaacgtcaggagcatggcattttgctcgcctggccgcagaaatccctcgttttacacaaagttgtgtcgagattcaggatattcttagcgtggcagcgagattttacgctctggtgttgggcggtacagaaccagcgttttaccgatgacctgtacgttacaggcgccggtttcgcgtacgatggcttccacgatcaaggcttttgtttcgcgatcttctgaggcgatcttcaccttgatgagttcatggtgccctaacgcttgttcgatctcggccagtaccccttcggtcaaaccattgttgccaagcataactaccggcttgagcggatgtgccagacctttcaggtgctgtttttgtttagtactcagattcatcgtatttttttgcttacgttgggattgaaaacgggtcattctaccgccatctcccatatatcgccaaactaccgcgtcgatttttacgcagtaaagtacgatgaacccgaacgggaatgttaaatgacaggtaaaaagcgttctgccagctcaagccgctggcttcaggaacactttagcgataaatatgttcaacaggcacagaaaaaggggttacgttcccgtgcctggtttaaacttgatgaaatacagcaaagtgacaaaatttttaagccggggatgacggtagtcgacctcggtgctgctcccggtggctggtcgcagtatgcggtcacgcagatcggcaacagcggccgcatcatcgcttgcgatcttttaccaatggatccaatcgttggtgtggacttccttcagggcgattttcgtgatgaattagtcctgaaagcgttacttgagcgagtgggcgacagtaaagtccaagttgtcatgtccgatatggcgccgaatatgtgcggaacaccggcggtggatattccccgggctatgtatctggtagaactggcgcttgaaatgtctcgtgatgtattagcgccaggtggtagttttgtagtgaaggtgttccagggcgaaggcttcgatgagtatcttcgagaaattcgctccctgtttacgaaggtcaaagttcgtaagccggactcttcccgcgctcgttcgcgtgaagtgtatattgtagcgaccgggcgtaaaccataaccggcagatttcaaacgaaagtttgaaagaaactggatatagagtatcctgacgctgtttttaacacagttgtaataagaggttaatcccttgagtgacatggcgaaaaacctaatactctggctggtcattgccgttgtgctgatgtcagtattccagagctttgggcccagcgagtcgaatggccgcaaggtggattattctaccttcctgcaagaggtcaatcaggaccaggttcgcgaagcgcgtatcaacggacgtgagatcaacgttaccaagaaagatagtaaccgttacacgacttacattccggttaacgatccgaagctgctcgataacctgttgactaaaaacgttaaagttgttggcgaaccaccagaagagccgagcctgctggcttccatcttcatctcctggttcccaatgctgctgctgatcggcgtctggatcttctttatgcggcaaatgcagggcggcggcgggaagggcgcgatgtccttcggcaaaagcaaagcccgtatgttgacggaagaccagatcaaaaccacttttgcagacgttgccgggtgtgacgaagcaaaagaggaagtcggcgagctggtagaatacctgcgtgagccgagccgcttccagaaactgggcggtaaaatcccgaaaggcgtcctgatggtcggccctccgggtaccggtaaaacgctgctggcgaaagcgatcgctggtgaagcgaaggtaccgttctttaccatttccggttctgacttcgtcgaaatgttcgtcggtgtgggcgcttctcgtgtgcgtgacatgttcgaacaggctaagaaagccgcgccttgcatcatcttcatcgatgaaatcgacgccgtcggccgccagcgtggcgcaggcctgggcggtggtcacgatgaacgtgagcagaccctgaaccagatgctggttgagatggacggcttcgaaggtaacgaaggtatcatcgttatcgcggcgactaaccgtccggacgttcttgaccccgcgctgttgcgtccgggccgttttgaccgccaggtggtggttggcctgccggatgttcgcggtcgtgaacagatcctgaaagtgcatatgcgtcgcgttccgctggcgccggatatcgatgcggcaatcattgcgcgcggtaccccgggcttctccggtgcggatctggccaacctggtcaacgaagcggcgctgtttgctgcccgcggcaacaaacgcgttgtgtcgatggttgagttcgagaaagcgaaagacaaaatcatgatgggggcggaacgtcgctccatggtgatgacggaagcgcagaaagagtctactgcttatcatgaagcgggccacgcgattattggtcgcctggtgccggagcacgatccggtgcacaaagtgacgattatcccgcgcggtcgtgcgctgggtgtgaccttcttcctgccggaaggcgatgcaatcagcgccagccgtcagaaactggaaagccagatctccaccctgtacggcggtcgtctggcggaagagattatctacggtccggaacatgtttctaccggtgcgtccaacgatattaaagtggcgacgaacctggcgcgtaacatggtgacccagtggggcttctccgacaaactcggtccgctgctgtatgcggaagaagagggtgaagtcttcctcggccgtagcgtcgcgaaagcgaagcatatgtccgatgaaaccgcgcgtatcatcgaccaggaagtgaaatcgctgattgagcgtaactacggtcgtgctcgccagctgctgaacgacaacatggacattctgcacgcgatgaaagatgcgctcatgaagtatgagaccatcgatgcgccgcagattgacgacctgatggctcgtcgcgaagttcgtccgccagcgggttgggaagaacctggttcttctaacaactctgacaacaatggcacgcctcgtgcgccgcgtccggttgatgaaccgcgtacgccgaacccgggcaacaccatgtcagagcagctgggcgacaagtaagctaccgctgttgatgcttgtttaaccttaaaaccccgggcgtccgctccggggtttttcttttttaacctcttcagtctcagggattttgtgatgaaacttgtagcccagggctcaaccctcgatctctctcacccccacgtgatgggtattctaaatgtgacgcctgactccttctccgatggcggcgcccataattcgctgattgaggcggtgaagcatgccaatctgatgatcaacgccggcgcgaccatcattgatatcggcggtgaatcgacgcggccaggggcggctgaggttagtgtggaagaggagcttgcgcgggtgataccggtggttgaagccattgcccagcgctttgaggtatggatctcagtggatacctccaaggcggaggttattcgccaatcggccagggccggggcgcatatcatcaacgatattcgttcgctgaccgagcccggcgcgctgcaggccgccgcggaaactggactgccggtgtgtctgatgcatatgcagggacaaccaaaaaccatgcaggaggcgccgaagtatgaggacgtcttcgccgatgttgagcgtttttttaatgagcacattgtgcgctgcgaacaggcggggatcgcaaaagaaaaattgctgctcgacccgggattcggtttcggtaaaaatctctcccacaattaccaactgttggccaggcttggggagtttcatcactttggtctgccgctgctggtcggtatgtcacgtaagtcgatggtaggtcagttgctgaacgtcgggccgtcggagcggctgaacggcagcctggcgtgtgccgtcattgcagcaatgcagggcgcgcagattatccgcgtccatgatgtcaaagaaacggtagaagcgctgcgcgtggtggaagccaccctcgccgctaagggaaaaaaacgttatgagtaaccgcaagtattttggcaccgatggtattcgtggccgtgtcggcgatgcgccgatcactccggagtttgtgctcaagctgggctgggcggcgggcaaagtgttagcgcgtcacggttcacgtaaaattatcatcggcaaggatacccgtatttcgggctatatgctggaatcggcgctggaagctggactggcggcagcggggctctctgcgtcgttcaccgggcctatgccgacaccggccatcgcctacctgacgcgcgccttccgcgccgaggcggggattgttatctctgcttcacataaccctttctacgacaacggcattaaattcttctccattgagggcaccaaactgccggatgatgtcgaagaggcgattgaagccgaaatggagaaagagctcacctgcgtggattcggctgagctgggcaaagccagccgtatcgtcgatgcagcggggcgctacattgaattttgtaagggtacctttcccaacgaactgagcctgggaacgctgaaagtggtggtggattgcgcgcacggcgcgacctatcacatcgcccctaatgtcttccgcgagctgggagcccaggttatcgcgatgggctgcgagccagacggtctcaacatcaacgaagaggtcggcgccactgacgtgcgggcgctgcaggcgcgcgtgctggcggaaaaagccgatctgggtattgcctacgacggcgatggcgatcgggtgattatggttgaccacgaaggcaataaagtcgatggcgaccagatcctctatatcatagcccgggaaggattgcgtcaggggcagctgcgcggcggcgccgtcggcacgctgatgagtaatatggggctggagctggcgctcaagcagttaggcatcccgtttgcccgcgcgaaggtcggtgaccgctatgtactggagatgctccaggaaaaaggctggcgcatcggtgcggaaaattccggccatgtgatcctgctggataaaaccaccaccggcgatggcattgtcgccagcctgcaggtggtcgcggcgatggtccgcaaccacatgagcctgcatgacctgtgcagcgggatgaaaatgttccctcagctgctggtgaatgtccgctttaccgagggcagcggtaacccgctggagaatgagcacgtcaaagcggtgaccgcggaagtggaggcggcgttaggaaaacgcggccgtgtcctgctgcgtaaatcgggtacggagccgctaatccgcgtgatggtggaaggcgagcatgaagatcaggtgcacgagtttgcgcaccgcatcgctgaggcggtaaaaagcgtttagctttgccggctaagtggttaaaaaggcggcgcttgccgccttttttatgatcgaaaattggctttttgctgtttttttctgcagttgatacaatgtgtcgaaattgcccttgcgaaggtcattcgctttggttagtattcacacccgcttcagtgggaaacgttaaaacgtcccgctttattggtcgaagcacttggtatgcggcgaatccgcaaggaacaggttgattatgtacgaagctcttttggttgttttccttattgtagcgattggccttgtaggtctggttatgctgcagcaaggtaaaggcgctgatatgggagcctccttcggtgcaggcgcttccggcacactgtttgggtccagcggttctggcaactttatgacccgtatgaccggcatcctggctgcgctgttcttcatcatcagtctggcgctgggtaatatcaacagcaacaagaccagtaaaggaagtgagtgggataatctgagcgcgccgaaaacggagcaaactcagccaactgcgccggctcagccgaccagcgatatcccgcactaagtattctgtaccgaggtggtggaattggtagacacgctaccttgaggtggtagtgccctaacgggcttgtgggttcgagtcccatcctcggtaccaatattccagaaaaaagacgctgaaaagcgtctttttttgtttttgtccccgctggccatttatttataaacatctcttcgctggttgcctccttttactgtcgttaaagtcgcctcgtcaaattaacagaggtgaagtgacacaatgaacaagatcgggttgcttatcgtcgccggcgtgctcggtttagctgggtgcagttcaacatcgccctcccaaacggtggagacgattaatgcgctaaccgtaccggtatcgcccagtgagtctgggactacagcgaatcatgcccaggcggtgaggcgctatttccaggacaatacggcactgattagtcgccttaaccattcgttgaaaagtcattatctgcaggacgtggagcgccgcgatgtgttcgacagacacagcgaggcgtataaggtgtatggcgccctgacccgcctggagcagatggcgtccatgaatgaggtttaccgcaaagagaataatgttgcgggcctacaagagatcaaccgcgtactgaaaagcgtgccgctgaccagctgagaatgaaacagggactgccgaccggcaatccctgtgaagagttaaaagcggaagttaaccccggcgtaagcgccgtcggccagcgtgttatcgcgattgccatctttccctgccatatcaatatagcgatagccagcttcgatattcagagaggggagcacgttaaggcgtaccccggcattggcctccacataatcctcaacgccgctggacattgagtccggtgagtaatagccctcgccgaaaagcgtgaaatactgaccaagggggagttcagcgccaccaccggcggcgatggcgtaaccttcatcaccatcttttgggttcagatagaccgccttaccgcccagggtcatcagaaaagggccaaggttaaagttataacccattcccagtcctacactatctccatcgttgtcgctatgagcccactgagaactgaacgtcatacccggttccccggcgccaaagctggcggacagattggtaaactcggcgccagcttctccatgcaggttaacggctgcgcaggcagcgctgctggctcccaaagcgatcgttacggcaaccatttttgcagcaatagacttcattattaaattccttcagataaaaaaaagcccgatatgggcgttcgggcataattaacgggttcgtgcatctcattgttatggtcgcagcaggcgagggggcaactctcgctaccgccgcacacgtctggccgatttccgctggcatatcctgagccggtgcagacccggcggttaacgccgtttgtggtcgtctgctggcgaactcaggaatagattgtcttccgggaaacccaggcgcttagcataaaatttttgttcttttagcggtaacggttattggtttaaatttaaacatcttccccgctgcagcaaataacaataaatgataggaggagtgcaggtcagaatttttcaggaagtgagacgatattttgtaaataaccgccgcgggcaaaggcaatataaccgcctttctttaatgctgacaatacattgagaatactgctacgcgacagaagggtcctgtcctgaatatactcaagaatagatacccgctgtcgggtctcttcgcttaatagcatcatctccagcagatggttacggatgaccgaataggtacgctgctgcaggaccagatcgtcacgatacaccatatacgaggtatgataagccaacaggctggtcacctcttcccataggttatgctggcgaaaaagcgccgaagccaggtcatggtcgatccgtagcagttcgcatgatacctcggctcgcaggctgtggctgcggctgggctgcagcatttccgccacgccgaaaagatgcggctcatagacggtcaccatcagtagcctgtcggaattacgaataatcgacagctcgccttttttaaaaataaagagctgggttttgcctttatattcccatgtcagtctttttctggcgatcgcgttaacgggggtcgcgtgtggctcaagtacatcgatcagtcggtcaatggtcttttgcggcctgatcggcggtttaatattcatgatgtgtatcaccagatatgaattaatcaattgaggctattatagtcaacagttttgctggtctggcgataaggaaaaaatgcgtcatggcattttttttaagttggtgggtcattcaaaataaaaagccggcggtgatccgccggcggaaagcaacattgtcaggcgattatttgcctttgttttccagattttcaacctgcggtaaaccggttgccgaggaggcgctcagcaggccagactgggcatagccgaacagcttctcgcgggtatcggtgatgtccagattacgcatggtcagctggccgatacggtcttcggcagtaaacatggaatcgcctttttccatggtcagacgctccgctttataggtcaggttgtctgataccgtattaaggatcgagtagtcgttaccgcgacgcagttcgagggtgacttcgccggtgatctggctggcgacccagcgctgcagcgaatcacgcagcatcagcgcctgggaatcaaaccagcggccctgatacagcaggcggcccaactggcgaccgtgggcgtgatattgctcaatcgtatcttcgttatggataccggtcagcaaacgctcgtaggcaatatgcagcagcgccatccccggagcttcataaatgccgcggcttttcgcttcgataatccggttttcaatctggtcgctcatgcccaggccgtgacgaccgccgatgcggttggcttccagcatcatctcgacgtcatcggcaaaggttttaccattcagcgccaccggatggccctgctcaaagcgtacggtgacctcttccgcagggatcttcacgttttcgtcccagaacttcacgcccataatcgggttgacgatcttgacgctggagttcaggaattcgagatctttcgcttcatgggtcgcgccgagcatattggagtcggtggagtaggctttctcgaccgacatcttgtaatcaaagccgcaggcgatcataaattcggacatttcgtgacgaccgccgagctcattgataaagtcgctgtccagccacggtttgtaaatctgcagttcagcgttggtcagcaggccgtaacgatagaaacgttcgatatcgttgcctttataggtgctgccatcgccccaaatgttaacgccgtcttctttcatcgccgccaccagcatggtgccggtgaccgcgcggcctagcggcgtggtgttgaagtaggtcaacccaccggtggtgttatggaaagcgccacactgaatcgcggcgatcccttctgcgaccagctgtttgcggcagtcgatcagacgggcgccttcagcgccgtactctttcgcgcggcgcgggatagcatcgtagtcgtcttcgtccggttgacccaggttagcggtatatgcataaggcacggcgccttttttgcgcatccataacagcgctgcgctggtatccagtccaccagagaaagcgataccaatacgttgaccaaccgggagatgcttgagaatcgtcgtcataaaataaaaccctgctcgatagactgtggtgagttcgactcaacaaccttaactgcatttttatgcattaattgtgagtattcatttaaccatcttttactggcgacaggaagtgcttcatcatctttttgctaaaaaagcctgaaataccagcacaaacggcaatcgggggcgctaaaaagcatgttgacaaaatatactaatcgccgttacaattcatctcgattttatgtcccgtcttcggtaccaaatcccagcagtatttgcgtcttttgctcataaagagtaaaatatgccacgtttcaggcgcggggtggagcagcctggtagctcgtcgggctcataacccgaaggtcgtcggttcaaatccggcccccgcaaccactttcccattaagtactttttcaaatatactgtgaggactaggtgtccttcgtagccgaatttgaaagaattcttgcggaaggtgttccagatcgccatggcgatctcagggttcagttatctaaagccccgatttatcggggttttttgttatctgacttcagaataactgggctatacgccctttttttatgtcttgggggtgggtttgtccacattagagcaaaaattgacagagatgctcactgcgccggttgaagcgcttggctttgagctggtcggcatcgaatttattcgcggtcgcacatccacactgcgcatctatattgatagtgaagatggcatcaacgttgatgattgtgctgatgtgagccaccaggtaagcgccgtcatggatgtcgaagacccgatcactgtcgcttacaacctggaagtctcttcgcctggtcttgaccgtccgatgttcaccgccgaacactatcaacgtttcaccggcgaagaagttgcgctggtgctgcgcatggcggttcagaaccgccgcaaatggcagggcattatcaaagcggtagacggtgagatgatcacggtaaccgtcgaaggcaaagatgaagtgttcgcgctgagtaacatccagaaggcgaacctggttccccacttttaacagtctggattgaggtgaaaggccccgatgaacaaagaaattttggctgttgttgaagccgtttccaacgaaaaagcgctgccgcgtgagaaaattttcgaagcgctggaaagcgcgctggcaacggccaccaagaaaaaatacgaacaagagatcgacgttcgcgttgaaatcgaccgcaagagcggcgatttcgataccttccgtcgttggctggttgtagaagaagtcacccagccgacgcgcgagatcacgctggaagcagcgcgtttcgaagatgaaagcatgaacgtcggcgactatgtcgaagatcagatcgaatctgttaccttcgaccgtatcaccacccagaccgctaagcaggttatcgtgcagaaagtccgcgaagccgagcgcgcgatggtggtcgatcagttccgcgagcacgaaggtgagatcatcaccggcgtggtgaaaaaagtgaaccgcgacaatatcacactggatctgggtaacaacgctgaagccgtgatcctgcgtgaagatatgctgccgcgtgaaaacttccgtccgggcgaccgcattcgcggcgtactgtacgctgtccgtccggaagcgcgtggcgcccagctgttcgtcacccgttccaaacctgagatgctgatcgaactgttccgcatcgaagtgccggaaatcggtgaagaagtgctggagatcaaagcggcggctcgcgatccgggctctcgtgccaaaatcgcggtgaaaaccaacgacaagcgcatcgacccggttggcgcttgcgtcggtatgcgcggtgcgcgtgtgcaggccgtgtcgactgagctgggtggtgaacgcatcgatatcgtcctgtgggatgataacccggcgcagttcgtgattaacgctatggcgccggcagacgtcgcgtccatcgtggtggatgaagataaacacaccatggatatcgcggtagaagcgggcaacctggcgcaggcgatcggccgtaacggtcagaacgtccgcctggcttcacagctcagcggctgggaactcaacgtcatgaccgttgacgatctgcaggctaagcaccaggcggaagcgcatgccgctatcgataccttcaccaaatatcttgatattgatgaagatttcgcgacagtgctggttgaagaaggcttctcctcgctggaagagctggcctatgtgccgatgaaagaactgctggaaatcgacggtctggatgaagccaccgttgaagcacttcgtgagcgtgcgaaaaacgcactgactacgctggcgctggctcaggaagaaagcctgggagataacaaacctgccgatgatctgttgaatctcgaaggtctggatcgtgccctggcattcaaactggctgcccgtggtgtttgtacgctggaagatctcgccgagcagggcgttgatgacctggctgatatcgaagggatgaccgacgagaaagctggcgagctcatcatggccgctcgcaacatttgttggttcggcgacgaagcgtaataaactgtagcaggaaggaacagcatgacagatgtgactattaaagcgctggcctcagagattcagacctctgtggatcgcctgatacagcaatttgctgacgcaggcatccgcaaatcggctgatgattctgtgacctcgcaagagaaacaaactttgttgacgcacctgaaccgtgaacacggctcggcgccagacaagctgacgttacagcgtaagacgcgcagtacgttgaatattccaggtaccggtggaaagagtaaatcggtacaaatcgaagtccgcaagaaacgcacctttgtgaaacgcgatccgcaagaggctgaacgcctggccgcggaagagcaggcgcagcgtgaagcggaagagcaggcccgtcgtgaagctgaagaagcagcgaaacgcgaggcgcaattaaaagctgaacgtgaggccgcagaacaagctaaacgtgaagtcgctgataaagcgaaacgtgaagctgcggaaaaagacaaagtgagcaatcaacataccgacgaaatgaccaaaaccgcccaggctgaaaagatccgtcgcgagaacgaagccgcggaattgaagcgcaaatcggaagaagaagcacgccgcaaacttgaagaagaagcgcgccgtgtagcggaagaagcacgccgtatggctgaagaaaacgaaaaaaattggtctgaaacctcagacagcccggaagatagcagcgactatcacgtcaccacatcacagcatgctcgtcaggctgaagatgataacgatcgtgaagtcgaaggcggtcgcggccgtagccgtagcagcaaagcggctcgtccggcgaagaaaggcaacaaacacgctgaatcgaaagctgatcgtgaagaagcccgcgcggccgtgcgcggcggtaaaggcggtaagcaccgtaaaggttccgctctgcagcagggcttccagaagccagcgcaggccgttaaccgtgacgtcgtaatcggcgaaaccatcaccgttggcgaactggctaacaagatggcggtgaaaggttctcaggtcatcaaagcgatgatgaagctgggcgccatggcgaccatcaaccaggtcatcgaccaggaaaccgcacagctggttgccgaagagatgggccacaaagttatcctgcgtcgtgaaaacgaactggaagaagccgtaatgagcgaccgtgacaccggcgcggcggctgaaccgcgcgcaccggtcgtgaccattatgggtcacgttgaccacggtaaaacctcgctgctggactacattcgttctaccaaggttgcctccggcgaagcgggtggtattacccagcacatcggtgcttaccacgtcgaaaccgacaacggcatgatcaccttcctggataccccgggccacgccgcgtttacctccatgcgtgctcgtggcgcgcaggcgacggatatcgtggttctggtggtggcggcagacgacggcgtgatgccgcagactatcgaagctatccagcacgctaaagcggcgcaggtaccggtggtagtggcggtgaacaagatcgataagccagaagccgatccggatcgcgtgaagaacgaactgtcccagtacggcatcctgccggaagagtggggcggcgagagccagtttgtccacgtttctgcgaaagcgggtaccggcatcgacgacctgctggacgcgatcctgctgcaggctgaagttcttgagctgaaagcggtccgcaacggtatggcgagcggcgcggtcatcgaatccttccttgataaaggtcgtggtccggtagctaccgttctggttcgcgaaggtactctgcacaagggcgacattgtgctgtgcggcttcgaatatggccgtgtgcgcgcgatgcgtgacgaactgggtcgcgaagtgctggaagcgggtccgtccattccggtggaaatcctcggcctgtccggtgtgccggctgccggtgatgaagtgaccgtagtgcgtgacgagaaaaaagcgcgtgaagtggcgctgtatcgtcagggcaaattccgtgaagttaagctggcgcgtcagcagaaatctaaactggaaaacatgttcgctaacatgaccgaaggcgaagttcacgaagtgaacatcgtactgaaagcggacgtacagggttctgtcgaagcgatttccgattccttactgaaactgtctaccgacgaagtgaaagtgaagatcatcggttccggcgtaggtggtatcaccgaaaccgacgctaccctggcagcagcatccaacgcgattctggttggcttcaacgttcgtgccgatgcctctgcgcgtaaagttatcgaagcggaaagcctggatctgcgttactactccgtcatctataacctgatcgacgaagtgaaagcggcgatgagcggcatgctgtctccggaactgaaacagcagatcatcggtctggctgaagtgcgtgatgtcttcaaatcgccgaaattcggcgccatcgcgggctgtatggttaccgaagggacgatcaaacgtcacaacccaatccgcgttctgcgtgacaacgtggttatctatgaaggcgagctggaatccctgcgccgcttcaaagatgacgttaacgaagtccgtaacggcatggaatgtggtatcggtgtgaagaactacaacgacgttcgcgttggcgatatgatcgaagtgttcgaaatcatcgaaatccagcgtagcattgattaatcatttgatggctaagcagccggggaagcgaagcgccacccggcaatcattttaaaaaggggcttttggccccttttttgtctttattctggagaacttattatggcgaaagaatttggtcgcccgcagcgcgtggcccaggagatgcaaaaagagattgccatcatcctgcagcgtgaaattaaagatccgcgtctgggcatgatgaccaccgtttccggtgtggaaatgtcccgtgacctggcctatgccaaggtgtatgtcaccttccttaacgacaaagatgaagccgcggtgaaagcgggcatcaaagcgctgcaggaagcttctggctttatccgctctctgctggggaaagcgatgcgtctgcgcatcgtaccggaactgactttcttctacgacaactcactggtggaagggatgcgtatgtccaacctggtcaccagcgtggtgaaacacgacgatgagcgtcgtgtgaacccggacgacagcaaggaggactgatgagtcgtcctcgtcgtcgcggccgcgacgtgcatggcgtattgttgctggacaagcctcagggcgcctccagtaacgatgtgctgcagaaagtaaaacgtatttataacgccaaccgcgccgggcataccg

SEQ ID NO: 5357 - DNA, 20671 bp, Unknown
  gut microbiota DNA sequence
atccgctggcgaccggtatgctgccgatctgccttggcgaagcgaccaagttttcccagtatctgctggactccgataagcgttaccgcgtgatcgccaaacttggccagcgcacggatacctccgatgccgacggtcaggtggtggaagagcgcccgctgacttttagcgacgaacagctggcggcggcgctggacagcttccgcggcgagacgcagcaggtgccgtcgatgtattcggcgctgaaatatcagggcaagaagctatacgaatatgctcgccagggtattgaagttccgcgggaagcccggccgataaccgtctatgagctgctgtttattcgccgcgaaggcgatgagctggagctggagatccactgctcgaaaggcacctacatccggacgattatcgatgatttaggtgagaagctcggctgcggcgcgcacgtgattttcctgcgtcgcctggcggtaagcaaatacccggtcgagcggatggtgaccctcgagcagctgcaggcgctggtcgatgaggcggcggcgcaggatattcctgccgctcagttgcttgatccgctgctgatgccgatggacagcccggcctcggattacccgctggttaatattccagaaacctccgcagtctactttaagaacggcaacccggtacgtcagtcaggcgcgccgcttaacgggctggtgcgggtgatggagagcgagtccggcaagtttctcggcatgggcgaaattgacgatgaaggccgcgtggccccgcgtcgtctggtggtggaatacccggcgtaagcgcttttcttgcgataaaagcctgctacgagtagaatatcgccgcttaacgtccgctaacgtgttttaacattttcgggcgttgcatcaggggtcgctgaattagagatcggcaccctttctttcttttaatttttggagttataaaatgtctctaagcgttgaagctaaagcaaaaatcgtttctgagtttggtcgtggcgaaaacgacagcggttctaccgaagttcaggttgcactgctgaccgcacagatcaaccacctgcagggccactttgcagagcacaaaaaagatcaccacagccgtcgtggtctgctgcgcatggtttctcagcgtcgtaaactgctcgactacctgaaacgtaaagatgttgcccgttactctgcgctgattgagcgtctgggtctgcgtcgctaattctgcgagtttcagaaaaaggggcctgacggccccttttttcgaccgggcggcagcaattcattcaaaactcatgtattgttgctagtaatgatcttcatgcagaggttcgcgcggctaatgagaggcttcatccgcaggggcgggtaaaggttgtcattagtcgcgaggatgcagaagatcgggtcaatagacgctatgtcgtggatatggcgtgatttatagataaaaaggatagaattttgcttaatccgatcgttcgtaaattccagtacggccagcataccgtgaccctggaaaccggcatgatggcgcgccaggcaacggccgctgtgatggttagcatggatgacactgcggtattcgttaccgttgtgggtcagaaaaaagcgaagccaggccaggactttttcccgctgaccgttaactaccaggagcgtacctacgctgccggtaaaatcccgggtggtttcttccgtcgtgaaggccgtccaagcgaaggcgaaaccctgatcgcgcgtctgattgaccgcccggttcgcccgctgttcccggaaggcttcgttaacgaagttcaggttatcgccaccgtcgtttccgttaacccgcaggttaacccagacatcgtcgcgatgatcggtgcttccgctgcgctgtcgctgtctggtattccgttcaatggcccaatcggcgctgcgcgcgtgggttacatcaacgaccagtacgtactgaacccaacccaggaagaactgaagtccagcaaactggacctggtggttgccggtaccgaagcggccgtgctgatggtggaatccgaagcggaactgctgagcgaagaccagatgctgggcgcggtggtcttcggccacgagcagcagcagattgttattcagaacatcaacgacctggtgaaagaagccggtaaaccgcgttgggactggcagccggaagcggtcaacgaagcgctgaacgcgcgcgtggctgcgctggctgaatcccgtctgagcgatgcttaccgtatcaccgacaaacaagagcgttacgctcaggttgacgtgatcaaatctgaaaccatcgccacgctggttgctgaagatgaaaccctggacgctaacgagctgggtgaaatcctgcacgccatcgagaaaaatgtggttcgtagccgcgtactggccggcgagccgcgtatcgatggccgtgaaaaagatatgatccgtggtctggacgttcgtaccggcgttctgccgcgtactcacggttccgcgctgttcacccgtggcgaaacgcaggcgctggttaccgcgactctgggtaccgcacgcgatgcgcagaacatcgacgaactgatgggcgagcgcaccgactccttcctgttccactacaacttccctccgtactccgtaggcgaaactggcatggtggggtctccgaagcgtcgtgaaatcggtcacggtcgtctggcgaagcgcggcgtactggccgtgatgccgactattgaagaattcccgtacaccgtgcgcgtggtatcggaaatcaccgaatctaacggttcctcttccatggcttccgtctgcggcgcctctctggcgctgatggacgccggcgtgccggtaaaagccgctgtggcgggtatcgcaatgggtctggtgaaagaaggcgacaatttcgtcgtgctgtctgacatcctcggtgacgaagatcacctcggcgatatggacttcaaagttgcgggttcccgcgacggtatctctgcgctgcagatggatatcaaaattgaaggtatcaccaaagaaatcatgcaggttgcattgaaccaggctaaaggtgcgcgtctgcacatcctgggcgtgatggagcaggcgattaacgcgccgcgcggcgatatctctgaattcgcaccgcgtatccacaccatcaagatcaacccggacaagatcaaagacgttatcggtaaaggcggttctgttatccgtgccctgaccgaagagaccggcaccaccatcgagatcgaagatgacggtaccgtgaagatcgcagcgaccgacggcgacaaagcgcagcatgctatccgtcgtatcgaagagatcaccgctgagatcgaagttggccgcatctacaatggtaaagtgacccgtatcgttgactttggcgcattcgttgccatcggcggcggtaaagaaggtctggttcacatctcgcagatcgctgacaagcgcgttgagaaagtgactgactacctgcagatgggtcaggaagtaccggttaaggttctggaagttgaccgccagggccgtgtccgtctgagcattaaagaagcaactgaacagactccgtctgccgcagcgccggaagctccggctgccgagcagggcgagtaaggttgccgttagccctccgcttttgcggagggcgttttacgggcaggacgcctcgtttgcagccggggaacaggacgttcatccaatcgttgtcttcgggagtgggaaatgaagccttttttgcgctggtgtttcgtggcgacagctctcacgctggcaggatgcagtagcaccgcctggcgtaaggacgccgtcctcgcagtaccattgcaaccgactttacagcaagaagtgattctggcacgcatggaacaaattcttgccagtcgggctttatccgatgacgaacgcgcacagcttttatatgagcgcggagtgttgtatgatagtctcggtctgagggcacttgcgcgaaatgatttttcacaagcgctggcaatccgacccgatatgccggaagtattcaattacttaggcatttacttaacgcaggcaggcaattttgatgctgcctatgaagcgtttgattctgtacttgagcttgatccaacttacaactacgcgcacttgaaccgcggtatcgccctgtattacggcggccgggctaagttagcgcaagatgatctgctggcgttttatcaagacgatcccaatgatcctttccgtagcctgtggctttatatcgccgagcgtaaactcgacgagaagcgggcgcttgaagcactcagagagcgcttaaacaagtcggataaagagcaatggggatggaacattgtcgagttctaccttggcgacattagcgaaaaagagctgatgactcgtctgaaggcagacgcaacggataacacctcgctcgctgagcatctcagtgaaaccaacttctatttaggtaagtactacctaagtctgggggacaaggacagcgctacggcactgttcaaactggcggtcgccaacaacgtacacaactacgttgagcaccgatacgcattgttggaattatcgctcttgggccaggagcaagatgacctggcagaatcggaccagcaatagctgacgaacacatcagcccatagttttttgcttgccatcaccttcgcgggtgagggcgttgttgttcgttaatacacctactttgagccggttcacacttttcaatgaaaattaccgtaaattttcacgatgagttatgtagactggccgccattaattttgaggcacacgtactacatggctgaattcgaaaccacttttgcagatctgggcctgaaggctcctatccttgaagcgctcaccgatctgggttacgaaaaaccatctccgatccaggctgagtgcattccgcatctgctggacggccgcgacgttctgggtatggcccagaccggtagcggtaaaaccgcagcattctctttaccgctgctgaacaacatcgatcctgagctgagagcaccgcagattctggtgctggcgccgacccgcgagctggcggtacaggttgctgaagcaatgacggaattctctaaacatatgcgcggcgtgaacgtggttgccctgtacggcggccagcgttatgacgtgcagctgcgcgccctgcgtcagggtccgcagatcgtcgtcggtaccccgggtcgtctgctggaccacctgaagcgcggtaccctggacctctccaaactgagcggcctggtactggatgaagcagatgaaatgctgcgcatgggctttatcgaagacgtagaaaccattatggcgcagatcccggaagggcatcagaccgcgctgttctccgccaccatgccggaagctatccgtcgcattacccgtcgctttatgaaagagccgcaggaagtgcgcattcagtccagcgtgacgactcgcccggatatcagccagagctactggactgcctacggcatgcgtaaaaacgaagcgctggtgcgtttcctggaagcggaagactttgatgcggcgattatcttcgtccgaaccaaaaacgcgaccctggaagtagctgaagcgctggagcgtaatggctacaacagcgcggcgctgaacggcgacatgaaccaggcgctgcgtgagcagactctggaacgcctgaaagatggtcgtctggatatcctgattgcgactgacgttgcggcccgtggcctggacgttgagcgtatcagcctggtggtgaactacgacatcccaatggattctgaatcctacgttcaccgtatcggccgtactggtcgtgccggtcgtgctggccgcgcgctgctgttcgttgagaaccgcgagcgtcgtctgctgcgcaacatcgaacgcaccatgaagctgaccattcctgaagtggaactgcctaacgcggagctgctgagcaagcgtcgtctggaaaaattcgccgcgaaagttcagcagcagctggaaagcagcgatctggatcagtaccgtgcactgctggcgaaaatccagccgacggcggaaggtgaagagctggatgtggaaacgctggctgctgcgctgctgaagatggctcagggcgaacgttcgctgatcgttccgccggacgcgccgatgcgtccacgtcgtgaattccgcgatcgtgacgatcgtttcgaccgtcgtggcgaccgtaatgatcgcggcccgcgcggcgatcgcgaagatcgtccgaagcgtgagcgtcgtgacgtgggtgacatggagctgtatcgcattgaagtgggtcgcgatgacggcgttgaagtgcgtcatatcgttggtgcgatcgccaatgaaggcgatatcagcagccgttacatcggtaacatcaagctgttcgcttctcactccaccattgagctgccgaaagggatgccgggcgaagtgctgcagcactttactcgtacccgtatcctgaacaagccgatgaacatgcagctgctgggcgatgcgcagccgcgcaccgaacgtcgtggcggcggtgagcgtcgcgaaggcggccgtggctttggcggcgagcgtcgtgaaggcggccgtggcttcggtggcgaacgtcgtgaaggcggtcgtggtgaaggacgtcgtttcagcggcgaacgtcgtgaaggccgtgcgccgcgtcgtgacgatgcatccgcgccgcgccgcgatgactcagccggtcgccgtcgcttcggtggcgatgcgtaatcaacgccgcccgctagcgtaaactaaataatacagccccgatcgtcatgattggggctttttttatttcctttgtactcgtgtactggtacagtgcgtcatgctcaacgtgagcgaagtattttcgactggagaattcggtaaatggcgacactaaccactacggcaacccgtccgtctctatttggcggcgtggtgattatcggcggcacgattatcggcgcgggcatgttctcgctgccggtggtgatgtccggcgcgtggtttttctggtcgctggcggcgctagtcttcacctggttctgcatgctgcactccgggttgatgatcctcgaggccaatcttaactaccgcatcggctccagcttcgacaccattaccaaagacctactcggcaagggctggaacctggtgaacggtgtatcaatcgcctttgtgctctatatcctgacctacgcctatatttcggcgagcggttcgatcctccaccacaccttcagtgaactgtcgctgaaggtgccggcgcgcgcggcgggcttcggctttgcgctgctggtggcgtttatcgtctggatgagcaccaaagcggtgagccgcatgacggctatcgtactgggcgctaaggttatcaccttcttcctgaccttcggtagcctgctcgggcacgtcgagccgacgacgctatttaacgttgcggagaagaatgcctcctatgcgccatacctgctgatgacgctcccgttctgcctggcctcctttggctatcacggcaacgtgccgagcctgatgaaatactacggaaaagatccgcgcaccatcatccgctgcttaacctacggtacgctgctggcgctgggtctgtatgtcgtttggctgctggtgacgatgggtaacatccctcgtccgcagtttatcgacatcgcgcagaagggcggcaacattgatgtgctggtgcaggcgttgagcggcgtgctgaatagtcggagcctggatctgctgctggtggtattctcgaactttgccgtcgccagttcattcctcggcgtgacgctggggctgttcgactacctggcggatctgtttggctttgacgatagcgcgatgggacgctttaaaaccgcgctgctgacctttatcccgccgatgattggcggactggtcaaacccgatggtttcctctacgccatcggctatgctggcctggcggcgacgatctgggcggcgattgtaccggcgctgctggctcgcgcctcacgcaaacgcttcggcagcccacagttccgcgtttggggcggaacgccaatgattgtgctgatcctgctctttggcctcggcaatgcggttgtacatatcctgtcgagcgtcaatctgctgccggtttatcagtaaagctattgcccggtggcgcgacgtccaccgggctgacgtgtgtgttaccccaacagctcctctttcacctgcatcgctaaatcgaaagaatgcagacgcgcctggtggtcgaagatctggccattgaccatgatttcgtccgcctcggtttcacgcagaatcgactctagcccatggcggactttagttttatcgccgaccagcgacatgctcagtgcctgctgcacaccatactgctcggacgctgaccacagctgatgcatattttccaccggcggcggcaactgaccggtctcgccgcgacgcagcttcacaaacgcctgttgcatggaggtgaagagaaactccgcatcgcggttgctgtcggcggcgatgatattgatacacaccatcgcgtacggtttttccagccgcgccgaaggtttgaaattgctgcgatacagatgcagggcctggaacaacatatccggcgcgaagtgcgaggcgaaggcaaacggcaggccgagctgcgccgccagttgcgcgctatagaggcttgagcccagcagccatactggaatgcgctccccgtagccgggaaccgggcgcacgtgcgggttcggatcgcgggcgtcaaaccagtccaccaattccgctacatcgcgcgggaaattatcgacatcgccgctcatatggcgacgcagggcgcgcatggtcggctgatcgctgcccggcgcgcggccaaggccgaggtcgatccgcccggggtaaagggtgttcagggtgccgaactgctcagctatcaccagtggagagtggttaggcagcatcacgccgccggacccgagatgcagggtggtggtgttggcggcgagatagccaatcagcaccgaggtcgctgcgctggcaatgccgaccatattatggtgctccgccagccagtagcgatgatagccgcgcgattcggccagccgggcgagatccagagagtgggtaaaggcttctttggcagaagatccttgcgggatcggcgccagatcgagcaccgagaatggaacagatttgtcagtcataaaggctcactttgctacagcatcgtcatcagattgaaggtcttcttccagcctggcgcatcctggacgcgccagccagaaaagctgcatctttaataatgcattaaaatctgagcactgttgttaacaaagtgagcggtttatcaggcctgaagcaccagtcctggcaatcgtttccagtagccgttgcaatcgctattgctggtgagatccagcggcgcagcgccgttttcgttggcgcggaaggcctcgagcatggcgaaggtctcgttgcccatcggcgacaggcgcaccatatccaccaggccgtgcatggaggtcagctcattgcccaggttatagacgtagccgctcatggtctgaataccattgagcacgaacacctgctggttctcctgcgacagcatgctgcgcccggttgggtacttgatgcagcaggtttcgcactcgtcctttggccggtcttccgagcgggcggtaaagcagcgcgcggaataagccagcggcagatggccgtagctcagcacttcgacttcaaactggttgcggatacccagctcttcgcactgggtcagtaaattagccagccagtcgcgggagagttccaccggcatgcaccagcgcaccatgccctgtttccgcagcaggcgcagggtaacggcgttgtagcagttcagcgcatgcccggcgacgaacggtagcttgcgttcggcgcagagatttaccacgcccaaatcgctggcctcaatcagaaattcgccgttatcgacatagcgcttcagctcgcccagttcagaagaggcctgcaccagcgcgagggtggagagcaccacctgcttgccgctagcggccagcgttttcgccatttcgatccagtcgccaactttggtggcgcggcgtttgctgcataccgcttcgccgagataaatggtgtcggcgctgcagtttgccgcctgctggtaaaaatcttccagcgtctcttttggccagtagtacagcaccggccctaatgaatatttcatgtttctcactgccatttacggtgataagcgccaagggtagtttgtgtcccctcggacatggcgcccagggtctccatccaggcggactgcggtacgaaattctgcggatcggctttgcagcgatcgatcgcctggcgccagactttcgccacctgggtcacgtaagccgggctgcgctgacggccttcgattttcaccgaggcgatattggcggccatcaattccggcaacagttccagggtgttgaggctggtgggctcctccagcgcgtgatagcgctcgccatcaaccaggtagcggcctttgcacagcgtcggataaccggcattttcgccatcctgataacggtcaatcagcacttcattgagacgcgattccagcccctgcggcgtttgctgccagcgtacgaagcgggcaggcgaacaggcgccgacggtgttgggcgattcgccggtcaggtaggaagagagatagcagcggccttccgccatgatgcacaggctgccgaaggcgaagacttccagcggcaccggcgtggcgcgggccaactgtttcacctgatgaatagacaacacgcgcggcagtacgacgcgcgcgacgtcgaagttgcgatgatagaagcgaatggcctcttcattggtggcggaagcctgcaccgaaacgtgacgttcaatgtgtgggtaacgctccgcagcgtactccagcatggcgatatcggccagaatgagcgcatcggcgcccagttgagcggccatatccactgctcgctgccagcgggcgtagccgtcgggatgagcgaaggtattgatggcgatatgcagcttacgacggtgctgatgcacaaagctgacggcttcctgcagtttcttttcggtgaaattaaggccggcaaagtggcgggcgttggtgtcatctttcagcccgatatagacggcatcggcgccgttttcgatggccgccttaagcgccggaaggttaccggctgggcagagcagctccataatttttcctgaaaaatgcggcccgtcagggacgctgaatggttaacgagcagggattttagttaaccttctggtgacaatttttgatttgaggcagttaaaagtgtattggcggcgccaataactggcggccgtcatcgcgtttttgttgatttacgccgctatgttgtttatgtgatatggcacaatagcggaactattgcattcatggagtaaagcttgtgttggataaactgcgttcccggctggtccactttggcccgtctttaatgagcgtgccggttaagctggcgccttttgccctcaagcgccaggtgctggagcaagtgctgggctggcagtttcgccaggcgctggcggagggggagctggagtttcttgaggggcgttggttaagtattcatgtgcgtgacatcggtctgctgtggtatacctcggtagtcgatggtcgactggtggtcagccagcaggccgacgccgacgtcagcttcagcgccgacgccagcgatctgttaatgatcgccgcgcgcaagcaggatccggatacgctattcttccagcgtcgtctggtcattgaaggcgatacggagctgggactgtatgtaaaaaatttgatggacgccattgagctcgagcagatgccaaaagcgctgcgcgtgatgttgctgcaactggcggattttgtcgaagctggactgaagagcccgcagaaacctgaacagacatcggtaggtgaggcatgctgattcgagtggagattgggattgatgcaccgggaatcgacgcgctgctgcgtcgtaccttcggccgcgatgccgaagcgcagctggtgcacgatctgcgtgaagatggactgatcacgctgggggtagtggcgacggatgatgaaggccaggtgatcggctacgttgccttcagcccggtggcggtggaaggtgaagagctgcagtgggtcggcctggcgccgctggcggtagatgaacgctaccgcggacagggcattggccggcagctggtttatgaagggctggactcgctgaatgagtttggctacgccgcggtggtgacgctgggcgacccggatttataccgtcgcttcggctttgaaccggccgcgcgcttcgatctccgctgccgctggccggacagcgccgaggcgttccaggttcaccgtctggcggatgacgccctcgacggcgtccatggccaggtagaatacagcgagcactttaatcgtctttaagccttgccagcagggtttcgaaggcatcctctccggcaacgaggcgctctttttcgcgcttcgttagctgcttgacgcgatattccagtcgcaatgcaagtgagtgttcaccaacttcgtggctaaaggccagctgcaggtcgcctttgccgcgcaacgcctttgcgccttttcccgcctgatgctggcgaaagcggcgtggcacgtcggtggtgatgccggtataaaggcgattatccgcggttcgaatgagatacagaaaccagcacacggtcacaaagtcactatggtaaggtgtgtgcaccatagcataatggagaagaaagatggatacgcttgccgccattggtcgctggctgagtaaacagcacgtcgtcacctggtgcgtctcccgtgaagacgagctgtggtgcgcgaatgccttttacgtctatgacccggataccgtggccttttatctgctcagcgaggagcacacccgccatggccagatgaccggacagagggcgaaggtggccggcacggttaacggccagccaaaaacggtggccctgatccgcggcgtgcagttcaaaggcgagatccgtcgtctgagcggtgacgaagaggcgcgaatgcgccagcgctacgtcaagcgcttcccggtggcccgcatgctgtcggcgccggtatgggagattcgtccggacgaaatcaaatttaccgacaacacgctgggtttcgggaaaaaattacactggcggcgtgatgccggcgccgagcaggcgtagcgcttcgcgattgaaggccggcagatcgtccggcgttctgctggtgaccagctgttcgttatcgaccaccacctcctggtcgtaaaactcgcccccggcgtttttcacatccaccacaatcggtttcaccgccgtgagcttacgtccgcggatcacatcggcgctgatcagcagctgcgggccgtggcagatggcaaacaccggcttaccgccgttgacaaaatcgcgggtaaaggtgacgaagcgttcatcaccacgcagctggtcgggagagtagcccccgggcagcaataaggcatcaaattcacccggtgtgacgtcatcgatggctctgtcgatggcgacctcggcttttccctgcttacccttcaccgttttgccagcctgcttttcgatcgtgatgacctgatgcccggcgagcttaaaggcttcggcgggagaggtaaattcagaatcttcaaagtcgtcggtaatgaggacggctatctttttactcatgcttcctccactgtctggatggtcaatgaggtaattccatgatgatggtggatacttaccttgtaaggtattaagcctggaacatgagcctgaaagtgcaaggcggagaattctgtaaaggagaaccaatgagtcaggtattattaaccggcgcgaccgggttagttggcggtcacttactccggctgctgcagaatgagccccgtataagcaccatcgccgcgccgacgcgtcgcccgctggcgccagcggaaggtgtctttaatcctcacgatccccagctgaccgatgccctggcgcaggtggttgacccggtggatatcgtcttctgttgcctgggaacgacgcgccgggaggccgggagcaaagaggccttcgtccatgctgactacacgctggtggttgataccgcgctgaccggcaaacgactgggtgcgcaacatatgctggtggttagcgcgatgggcgccaacgcccactcgccgtttttctacaatcgggtgaagggggaaatggaggcggcgctgattgagcaagactggccgcggctgaccatcgccaggccgtcgatgctgtcaggcgagcgggaaaaaaagcgggccaatgagaccttcctcgcaccattgttccggctcttgccggggaactggaaatccattgcggcccgcgatgtggcgatcgccctgctggcggaggcgctgtcgcccacccacgaaggggtgcgaattctgacatcatcggaactacgggagcgcgccgcgcggcaggctgaatagcggtttgcaaacgcaggcttccggcgtagtattcacggcttcaattcatatccacatttcttgctggggaatgctatggctggtcagtcttcatctcaggcggcgtcaccatttcaatggtggaaacccgcgcttttctttctcgtcgtgattgttggtctgtggtacgtcaaatggcagccgtactacgggaaagccttcaccgctgcggaaacccacagtatcggtaaatctattctcgcccaggccgacgctaacccgctgatggcggcgtgggactatgcgatggtttacttccttgccgtctggaaagcggcggtgctcggcgtgctgctcgggtcgttgattcaggtactcattccgcgcgactggctgctacgcaccctgggacaatcgcggtttcagggcacgctgctgggagcgattttctcgctgcccggcatgatgtgcacctgctgcgccgcgccggtcgcggccgggatgcgcaaacagcaggtgtcgatgggcggggcgctggcgttctggatggggaacccgctactcaatccggcgacgctggtgtttatgggctttgttctgggctggcagtttgcgctggttcgcctggtggcgggtctggcgacagtattaactgtggcgacgctggtgcagaaatgggtgaaagaggcggcgacgcagccggtagcggtgcctgctgcaccgtcggaagcgactcagggcggcttctttagccgctggctgcgggcgctgtggacgctgttctggaacacgatcccggtttatatcctcgcggtgctggtgctgggagcggcgcgcgtctggctgttcccgcacgccgatggcgtggtggataatacgttgttctgggttatcgcgatggcgatcgccggctgcctgtttgtgatccctaccgcggcggaaattccgattgtgcagacaatgatgctggcgggtatggggacggcgcccgcgctggcgctgctcatcacactgccggcagtgagcgtgccgtcgctgattatgctgcgtaaagccttcccggccaaagcgctgtggctgacgggcggactggtggcgctgtgcggggcgattgtcggtgcgctggcgctggtgtagtttgccgtaaacgtacgcatagccggattggatgccgggtggcggctacgccttacccggcacacaacgtacagggggcggtagcccggctaagcgcagcgccagccgggaaactgcagctttatttaatgtaggtaaaggcggtggtcacccgggatacgccgcttacccggctggcaatatccgccgccgcccggccttcgcggtcggtcaccagccccatcaggaagacttcgctgttttccgtggttactttcacgttcgaggatttgacctgatcggtgctcaggagctgcgaacgcaccttggtggtaatccaggtatcagacgaggcggtgcctaaaccaatcggctggccctggcgcacttcattaaacacttccgtggtcccttccacgcccatggcgatttgcttggcgcgcgcggagaggtccggcgtcggcgactggccggtcagcaggactttgccctgataagcggtgacgttgatacgggcctgtttcttaatctgttcatctttcgacaaggcgctattgacgcgcagttccagggtactgtcatcgacctgggttcccaccgtacgcgggtccgttgcggctttggtgccgactgctgccgttccgactaccgcggcggcaacgcagccctgcagcagtagtgcagaaagcaggatggcgaggggcgagagagccttcatgtgttctccttaatcgtcctggtgtggaaaaagagtgttatctatcaaatcgcacagacagttgacggtcagcatgtgcatctcctggatacgcgcgctgcgatgggaggggatgcggatttcgacatcctgttgacctaacaggcccgccagctcaccgccgtcatagccggttaacgcgacgatggtcatgtcgcgggtcacggcggcttccaccgccttgacgatgtcccgactgtttccgcgcgtagagatcgccagcagcacatcgccggcgtgtcccagggcgcgcacctgcttggcgtagatctcgtcatgcaagcgatcgttagcgatggcggttaagaccacattatcggtatttagtgcaatggcaggtaaaccagggcgttccgtttcaaagcgattaatcatgctggcagcaaaatgctgtgcgttggcggcggaggtgccattaccacaacagaggattttgttgccgttaagcagggactggacgagcgtcatcgccgcccgggagatggcgtccgggagtgcttccgctgcggcaatttgggtttgaatgctttcggtaaagcaggctttgattctgtcgagcacgggatcccttacttctggtattacgctattcgccaaaggcgttttttagccattggatgtcgtttccggtgaaggctaccacatcgaaacggcaatccacagtctcaaagctcccattctgtcggcagagccacaaacgggcggctttaagcagtcgttgttgtttttgcggagtgacgctggctgccgcatcaccgtaccgggcgctacggcggtagcgcacttcgataaaaacggtgaccgtgccgtcgcgcatgataaggtcaatttcgccgccacgctcgcgggcattggcggcgataaaacgcaggccctggccttccagccagcggcgagcctggttttcccaggcatcgccggtctgtttgcttagctggccggaacgatttttccctgctggtacttgagccatgacagtttcctgttaatcacgcaatcctggttggccgtcagatcgccggtattgccgttcagctcgaagccaggcgtctggcgcatttgcgtgaagtgatttgccagtgaccaggcgtcagcgcccatggcatacagacgcgccagcgagtagtcattacgcaccgcggacagcgcctgctgcattagcgacggattgctgccggccagcattgggatctcactatactgcaagccttccatctccagacggaaatccggccccgcggtgccctgggcgctgcgcgagctggcgtacagggtgacattgctctggctgccgttgcgcatggcgatcatcggtttgatataggcaatctgttccggggtggcgaggatataggccgcatcgacgctgccgccgctgcttaccggcatctcatccgcactgccgaggatgctgttctgcgctgatggcagggtggagaccggggtgccgctcagcgcaatgcccccgccgccgttcacgccggcgcgcagctcggccgtggatccaaaacgctgctgcaggacgctggcgccgcccagcttcagccactcgtcggcaaaagcgctaaccacacgatcgcccagcgcgccgcgcggaaccagcagcagcggggtctgtttcccctgttggtggatatgtcgggcggcgtcacgcgcttcgtcttccggagaaagcgcgaaatagcagaggttagcgcggctttcgactttttccggctggttgagggccagcacattgagcggcgtgttgctcttgataacctcttcaacgttttctttcagcaacggcccaaccaccagggtggcgccatcctgctgcgcctgggcgagcagctggcttatcggctggctggtggtgtcgtaaattttcagttccgcagaagggttggcggcggttgcgaccacgggctgcggctgtgcggccggcgcggtaaccggctgggtggccggggaagcggtagtctgcggcgtggcggatgttgccggcgcctgggctgccggttccgcagcaggcgctgcctggtcctgcgtcggggcctgaaccggatcagcgcggcttccggtggcggtaagatcgctgatttctgcctgcgacggactcaccacatcatcattaccggagacattcgccgcctgggcgacctgggcgggaaccgcgctgcccgtcaccgacggcgcgccgtttttggcggcttcaaagccctgctggatagtgcggccgaagatcgacgcctgaccgttcagcggcagaaaaagcgcaatcttgttgatggacgcaggcttatagttttgcatattcacaagcgccgtcggcagcattttagcgcccgggttttgcggatagcgcgtctgccagtctttaacgcccgctttcagtagcgtcggatcgttgcggttgtcaaaccacatccgctgcagatccagccagccctggaggatattttcatcggcgttgatcaccagcgcattggcctggtcctggggcatcgaggtgagcgcttgccaggtcgcatcaatatttttctgacgctgtttggcgtcactcagcagcggctgctgggcgattaaggcgcgcagcagggtcagcgatggtttgccctggctggcatcgatttgcgcctgccagtagcgcgcctgctgaggctgctcaaggtttgtcggatcgatcttagccagcagattacgggcggcctgataatcgttctgcgccagcttcacttccaccgccagcagcgactgttcacgggcctgagtgctgttcaggttcgccggcagctggttaaacaggtcgatagcctgctgcttcttcccttcctgcagtagtgcacgaatggcgagtaattgccagttggtcttgctatcattcgtgctttgctgcatctgctgtaagtagaaactggagttggcctgcgacgtaccctgcataaacgccgcgctttgatcctgcgtgtgggtgccgcagccagcaaaaataagagtcgccagcaatacgggcaggcagcgcgcgggcttagaacgaagaaatgttgacggtaccataagtgtccagtgatatttttttggctcaatgctcaatattaaatcggcaatacggacgagacaatgaaacaacacgaatcagcggataattctcaggggcagctctatattgtgcccactccgataggaaatctgtctgatatcacgcagcgtgcactggaagtgctgcaagccgttgatttaattgcagcggaagatacccgtcataccggtttgctgctgcaacattttgcgataaacgcccgtttgtttgcgcttcacgaccataatgagcagcaaaaggcggaaaccctgcttgccaaactgaaagaagggcaaaacatcgcgctggtttccgatgccggcacgccgctgattaacgatcctggttaccatctggtgcgcacctgccgcgaagcgaatattcgcgtggtaccgctgccgggcccctgtgcggctatcgccgccctgagcgccgccggcctgccttccgaccgtttctgttatgaaggcttcctgccggcgaaatcgaaaggccgccgcgataccctgaaagcgctggaagaagagccgcgcacccttattttctatgagtcgacccaccgtctggtggagagtctggaggatatctgcgcggtactgggagaatcccgctatgtggtgctggctcgtgagctgaccaaaacctgggagtcgatccatggcgcgccgattggtgagctggtggcgtgggtgaaggaagatgaaaaccgtcgcaaaggcgagatggtgctgatcgtcgaaggtttcaaggctcaggaagaggcgctgccggcggccgcgctgcgtactctggcgctgctgcaggcggagctgccgctgaagaaagccgccgcgctggccgcggaaatccacggcgtgaagaaaaatgcgttgtataagtacgccctggagcagcagggggagtaaacgatgagccgttaccaaccgccgtttagcatcacaccctcggtcctcaaccttgtcgttgagattggggaattgcttgggcattggtcggctaaacgtggacaagcatcgccgttgctgcgtaaagaaaaccgcattcgtactattcaggcgtcactcgcgattgaacataatagcctgagcatggaacaggtaacggcgctgctggaaggcaaacgggttctggcgccggctaaggatattcaggaagtgagaaatgccattcgtgcttatgaattaatgcccggatggcatgcggcaaacattagcgatcttctgacggcgcataaaacgctgatgaccgggctggttgatcgtccaggcgctttacgtggcggaaacgtcggcatttatcgcggtac

SEQ ID NO: 5358 - DNA, 68047 bp, Unknown
  gut microbiota DNA sequence
catttgtcgcagttcgtaggcccggtaaggcgcagccgccaccgggcaaaacaggcgcctggcgccggatgcccatttccgggcggcgctgcgcttgcgccggcctacctttccgtgccatttgtcgcagttcgtaggcccggtaaggcgcagccgccaccgggcaaaaacaggcgcctggcgccggatgcccattgccgggcggcgctgcgcttgcgccggcctacctttccgtgacatttgtcgcagcgccaccggggaatgcgttcagcttaccagtccgcctcctggccgaggatgcgcaatatatcctgacgatgctgcagcagctgcgggttatcgcgatgacggggaaaagccagcggcagcgcaaactcggcgataatccgccccggacgcggcgacatcaccagcacccgctcgcacagcagcagcgcctcttcgatatcgtgggtcaccagcaggctggtatacccctgctgctgccagagggcgatcagctcccgctgcatgctgatgcgggtcagcgaatcgagtttgcccaacggctcgtcgagcagcagcagacgcggttcgttcaacaaggcgcgcgccagcgccgcacgctgcgccatccccccggacagctgccgcggccacgcctcgctgaaggcctgcagcccgatgcggtcaatcagcgcgtctgccttcgcctccagcccctttttgccctgcgcctgcgggcccagcagcacgttctgccgcaccgtcagccacggatagagcgtcggatcctgaaacacaaggatccgctccggccccggggcgccgggcgccgcgccgtcgatctgcatctgtccgctctgcggcgcttccagccccgccagcagccgcagcagggttgatttaccgcagccggaagggcccagcagcgccacgctttcccccgggcgcagctgcaggctgatattctccagcaccggtaccgtctgtttgccaagcgtaaacgcatgatgaagatggctgatggataccgccgcgccgcgcgctatcgtctcggttaccattgcatccctcctcgctgccagctcagcagccggtcacgcagcataaataatccgcttatcaggccggagcataacaaggccatcaccagcagcgcggcatacatattcggataggccgcccagccctgggcccactggaggtaaaagccgatccccgacttcaccccgaccatttcggcgacaatcagcaccgaaaacgacgcgccgagccccataaacaggccgacaaagacgttcggcaacgcggcggggatcgccacccgcaggatcaggaaacgctggctggcgccgagggtccgcgccacgtcgtaccacgccttatcaatgcccatcactccggaccaggtcagcaccgtgaccgggaaccaggtgctcagcgcgatcaaaaacacgctggcgccgaaactcgagggaaaaataaacaggcacagcggcagcagcgcggtggacggcaccggccccagcagacgtaacaccggatgcacccagtagccaatccgttgcgaccagccgatggccagaccggtgatgaacccgctgctggtacccagcagcacaccgagccccagcagccccagggagtgcagcaggctgtcgagcaggcgcggccagtcgtcgtgcagcacctcgatcagcgcctgcggcggcgcgaagaatggtaccggcaacacggcagttttggcggtcagcccttcccagacagcaaacagcaccggcagcagcgccagccacttgccggcatgcagcacacgcgcgccgcgcgcccgccagtagcgatagctcagcgccagcagcagcaagccgccgccgagggtgaattgcgccagcgcccagccttcgctaaacggccagcgccgcccggcgtcgggccaggtcagagtaaacagaccgcccagcagccacagcgcggcggccagcagcccttctccccacagcggcgcgcggccggtggggcgcgccagagcctgctcaggcgaatacgttggcatagatactctccgcgaactgatggggatcggtacccggcttgatcacctgcacccgctgcaggtcgaccgcatactgcgtcagctctttcacgaacgcttcgcccaccgcgtgatggccgtggccctgcccgtggaggatgccgctcacctccgcttcactggtattcagggcatgggcgaggaaggattgcgccacgctttccggatgcgcagcggcatagctgtgcgcctcaaggatcgcctgggtgagcgccgcggcggccggtttatggtcccgcgccaggctcccgctcacccccagcacgcagcagctgaggttggcataatccccggtcatattgctggcgatcagctgatacttaccggtctccagcagacgatagctgaacggctcgctgccgctgatggcggcgatttcgcgcttgtccagcgccacgctgagcagatccgccgggtagactttccactgcacgtcgctgatcgggtcgataccgtggcgcttaagcagaatggcgaagaagtttttatccggtccggccatgtcggtgacgccgatggtttgccccttcaggctctcgaggccgccgaacggcgagtctttagccgtcagcaggttcagacagccgccgtgggtcccggcggtgagcttgacgtcaaagccctgctccagcgccttcagccagcgcagcgccatccccaccccggcgtcggccttaccggtggcgatcgcctccagcagcacatcggtggagctgccgaagttaacaaactcaacgtcgaggttgtatttactgaatatcttctgctgctcggcgacggcgaccggcgcgaggcataccgcgcttttgttgatcgccagcttgatcttgtagggctctggcaggcgcagcgccggatgggcatcgccgccggccatgtccgccatatcatgagcccacagcggcagagagaccccggccagcgccaggccgccgctgagctgtaaaaaacggcggcgggaaaaaggggttctggtcatggcgtcacctcggcggcgggcacgctaaaacggcggtcaaaggtcggcttcacgtccagccgggtgcggatcaggccgttggtgagataaaagtccgccgttgcctgctgctgggccactgtttcctcggccagcggctgccactgcgactggcggttggcaaactgcgcccgggcgatctccgccgggaagcggatgatctcccccaacgttttgccgtagctgtcgagattggcgtaggcccagcgctcggcgccggccaggcgctggagataatcctgcagcgcggcgcgtttttgcggatcgttaagcgcggaatccgttgccgcgaggaaggtattccccggcagcagccctttgccgctcaccaggatctgcccctcgttggtcttcaccatttgggtggtgtagggctcccaggtcgcccaggcgtccaccgagccgtttagcaacgccactttggcgtccaccgggccgaggaacacccactgcacctccttcggtgaaatccccgcctgctccagcgctttcagcgccacgaaatgaccaatcgaccctttaccggtggcgatgcgtttgccttttaaatcagcgccgctttttaacgtgctgccgggggataccagcaccgcggtccccgccgggttgcttttatcaacggcaatagctttgaccggcgcaccgttggccagggcgaagagcaacggcgcatcgccgatgatccccgcgtccacggcgcccgcgttgagggcttccgccagcggcgcggcggccgggaactcggcccacttaatgtcgtaagggagattttgcagggcgttggccgcctccagctgcgaacgcatgccgcctttttgatcggcgatacgcagggtaagccgctcctgcgctgtcgcgtagccgcccagcgccagcagcatcagcgcggccgccacccggcctgaaaatgatagacgcatcgtgattatccttgtgattgaaagacgaagttgccggctgccagccaggcgctgtcgctctgtggggtatgtacccgtccgcagagcacattgcggtagtggcgttccagcgggttttgtcggctgagaccatgattgccggtcagctcgagcgcgatattcaccgcctgaatggcgttgtcggtgatggtgactttcgccagattggcctcgatggcggaaaagcgcagcgcggcggcctgctccagcaggctgcggttgaccagcagcagcccggcgatctgcccgactttctcctgcacccgtggcagacgagagagcggatggccgagaccggcgggcacccgccccgccagccacctcaccagccagtcgtgagcggcgtgggcaatgctgtcatagatcgccgccagcagcgctgtctgccggttggcgaacaggcgaaacggttcggcctgggcggcgggtggcgcatcggccggccagacatccaccgcgtgctctgccgccacccgaacgtggttaaaaataacttcatggctgccggtggcccgcatcccggcgtgatcccagctcttcaccaccgtgatacccgggctgtcgccaggcaccagccaggtacccaccagcggcgggttatcatcgcttctggcccacaccgccagccagcgcagcccttcaatgccggtggtataaattttatggccgctgatgtcccagccctccgcgcgacggatcgccacggtgtccggcaggccgccccgcgccggggagcccagctccggctcgacgcgcaggctgttgattaggccaccgtgttcgacagcatcgtgaaaaacctgctggcgcagcggcgcgtgccaggcgtcgttttccgccagccgcaaatggtggagatactgcatgcagacgatcagcgctgtcgccggctctccccaggcgatggcggcgatgacctgctgcagctgggccagactggcgcccgcgccgccgcaggatggcggcacggcgagacttaaccagccccccgcacgcagatggtcgatattacgccagggaaactcgccgctggcgtcaaggctggccgcctgctccgccatcagctggcgaagcgccgtcagctgccgggcccagtcgtcgcgctcaggatggatcacgatgcgcgctccgccactgcacgccgggcggctttttcccgggcgatcggcagcagcgcccggccatagtcggccgcgtcgttcagcggatcgaagccgcgaatcaggaagttacgcaccccgaggtcgtagtaatcgagcagcgcatccgccacctgctccggggtgcccaccagcgcggtggagttatgtccgccgcccaccagctgggcgatgccggtccacaggcgtttgtccaccactctgccctgcgccgcggtagcccgcagccgctgggcgccgatgctctccggtttggctttgaacccgcccccgcgctgcgccgcctgctcggtggcgacgtgcaggatatgctcggctttctcccaggcttcggcttcgctgtcggcgataatcggccggaacgagacgctgaagccgatatcacgctggtgtttcgccgcttcggcgcgcacccgctggatggtctcgccggtttgcgccagcgactcgccccacagcgcgaagacgtcggcatgtttgccggcgacggcgatggccgcttccgacgagccgccaaaatagatcggaagatgcggcttttgcagcgggcgaatggcggaccaggcctgctcggcctgatagaaatcgttgtgaatatccaccggctgctcgctggtccacacctggcgcacggtgtcgaggaaggcgtcggtgcgggcgtagcgctggtcgtggtcgagataatcgccatcccggcgctgctcggcatcgttgccgccgctgatgatatgcaccgccaagcggccccccagcaggtgctcaagggtggcgaatttgcgcgcggcaagggttggggaaacaaaaccgggacgatgggccagcaggtactgaattttctgcgtcgacagtccggccagggccgtcaccagaaagccgtcgggttgatcggaccagtggccgaccagcagacgatcaaacccggcggcttcatgggtttgcgcaaagcgaacgatatagtcgcggtcaaagatcggccccaccggggcaatcgtttcggaagagaggcggtggccaatcatgccgagaaactgaatgctcatgaacaactccttgcgtcagggtaatggagtggccgcgacagcggcgctggtcattaccctatacagagcgtgttaatgagcaaaatgcatttttatcatatcttaatatgcttaattagcattaaacaaaaatgcatagtgctttcagtcggatacggtcagctgctgcaccactttgctggcaaaaaaggtcagcggcggctgcaggttcgccagatactgggcgtggatcagccacagtgagaccgcaggctgaaaatcgctgaggctgaggaccgcgacctcgtcccgccacgggctgctggccagcgccgccctcggcaccagacccagccccagcccctgcgccaccagcgctatctgcagctgcgcgcccgcgctctcgacgttgagcgtcaaccgcaatccctggctctgcagctcgcgaatgagcccggcgcgcaggccacagccgtcggggttaaggatccagccccgttcggcgcactcccgcagggatgacgcgcgcaaattcaaacgccggccgacgatcggcaccacctccaggggacacagcaggcgcccgctgtagccctcggcgaagctttgctgggcgggccccatcgccagcatgccgtccagctcgccgttttccagccggcgctgcagctgtccactccagccgcaggtgatctgcggcgccagcccgggaaactgctggctcagcgccgacagagccgccggcagggcaatctcgctgagactctgcggcacgccgagacgcagcgcgccgcgcggctcgccttgcggatccaacaggctgtagagttttttcgtctcacgcttaatgctcagacactgctcgtacacccggtgtccggcggcggtcagggtcagcgggcgggtctggcgctctaacagcgtgacgttcagctcctgttccagacgctgcaggcgccgggtgatggccgactgggtgatccccagatattccgcggcctgattgagggaggaaaactgcaccgtggccagcaaagcgtcgatatcgtcaatgcgcataggatccttatgtgaaatttgcatattaatatatgcgtaaattgcatttaaataatattaacgcctctgttagcgttttgaccagtccctctgacaggaaccgcacatgactgcaccacgactggaaaaattacgccatttcattcatgaggtagaccgcctgcaccgcgaacaccaccaggccgccccgctgcttgacgccgtggcgcagcggctggcggcgctggtgcgttacgacgactggctgccggaagagtacaccctgccgcatccgcaccattaccagcagtatctgctgcatgccgactccggggagcgcttctcgattgtcagcttcgtctggggaccggggcaagcgacgccgatccatgatcaccgggtgtggggggccattgggatgctgcgcggcgcggaggaaaaccagcgctaccagctggatgccgatggcataccgcgcgcgctgggcgccgccacgcttctggaagcaggccaggtggagaaagtctccgctgacgatggcgatattcatcgcgtcagcaatgcgctggcggatcgcgtctctatcagcattcatgtctacggcggcaatatcggcgcggtgaagcgcgccgtgtataccccggaagggcagcagaaaccgtttatctccggctactctaaccgccatttacccaatatctgggattcctcccgcgaacatcaaggataaccactatgtccacctacgcttatcgccaggccgccgggatccgccaggcgctgctcgaccgtcgtgaactggcgctgatcgacgtccgtgaagaggccgatttcgccaccgctcatccactgtttgccgtcaatctgccgctcagcaaactggagctcgaggtccgccggcggataccgcgcttcaccaccccgctcaccgtctacgacaactgcgagggtctggcggagatcgccgtcgaacggctgcggtcctggggctatcaggatgtggccctgctggccgagggtctcgccggctggcgccgcagcggcggcgagctgtttcaggacgtcaactccgccagtaaagcctttggcgagctggtggaaagcgtgcgtcacacaccgtcgctcagcgcccaggaggttcaggcgctcatcgacagccggcaggaggtggtgatcgtcgacgcccggcgcttcgatgagtaccagaccatgagcatccccggcagcatcagcgtgcccggcggcgagctggccctgcgggtggagagcctgacgccctccccgcagacgccggttatcgtcaactgcgccggacgcacccgcagcatcatcggcacccagtcgctgatcaacgccggcgtgccaaacccggtccatgccctgcgcaatggcactatcggctggacgctggccggccagacgctggcgcaccagcaacagcggcaatacgatccctccgcccgcgcctccggcgcccgggccgctgaggtggcgcattttgccgaacgggccggggtggcggtcatcgatgaggccacgctgcaacgctggcagcagcagagcgaccgcaccaccttcctgtttgatgtccgcagccccgaagagtacgcggcgggtcactatcccggcagcctgagcgcgccaggcggccagctggtgcaggagaccgaccacttcgccagcgtacgaggggcgcgcattgtgctgctggatgacgatggcatccgggcagcaataaccggctcgtggctggcgcagatgggctgggagacggcgcggctgagcgcgctgtcgaccagccagttgagcgaacgcggggtgccagccgccgaggtgccgcccggcccgcaggcggaggagataagcccggcgcagctggcgcaacagctggaagaacccggtacggtggtgctcgattttaccaccagcgccaactttgtcgctcgccatatccccggcgcgtggtggctaacgcgctcgcagctgcgccaggccctggaggtgatccctcccgcccaacgttacgtggtgacctgcggcagcagtctgctggcccgctacgcggtgccggaggtggcggccttgaccggtaaaccggtgcagttgcttaccggcgggacgctggcgtggatcgccgccggtctgccgctggcgcatggcgacagcggcctcgccgtcgagcgccgtgaccgctatcgtcgtccgtacgaaggaaccgataattccgccgaggccatgcaggcctatctggagtgggagtatggcctggtggatcagctggcccgcgacggcacccacggttttcgggtgctctagcgcgagcccgcctcaggcttcgcgcatgatccacgaatactgaaagctcttcggcgccggaaaatgggtccggcgccggtaggagcccagcgactgcggggtgcagtaggtacaactccccagccattcaacgctcgccggcgccacccccgcctctgcgaagatcgcttcggcaaaggcgcgcagatcaaaccacagattatcgctgccacgcgcggcggctttgagcggatcgctgaccgggcccgaacgggagtggaacagccgctggcgatggcgggccacccggtcaccgccgggctggtccagcagttgctgatagaatccggcggagacttcgtaacagcaggggtgaatatacggccccacggcgatgaccagatcggccaatgccaccccctgctggcgaaaacaggccagactgttgtcgacaataccgctgaccagcccctgccagccggcatgcacgctgcagacgtagcgaccgtcgcgcgaggcgatcagcagcggcagacagtcggcggtcaccacccccaccttttgcccggctaccgcggtaaacaccgcgtcggcgtgcgggcgcgtcggcagcggctgctgataatgatgaacctcattaccatgcaccagcttcaccggagccagctcggcataggtaaaggcggcggtttcatggacatcgagaaaagcgtggcggatgccagggatcgcattgagcaaacgggaggtgtaagccatagggacgataagcgtcagggaatgatgtcttaccttaggccaggggacgcggacaggcaaggcggcggcccggcatttttttaccagaccgccggatgcatatcagaccatggccgcgcgctgctggcgatgcatcagccagaacaccgccacgccggccagcacaatgcccggcgctgaggccgccatcaccccgacggtgccggtgccgagggccagcatcttgccggccagcagcgggccgctcatcgccccaagacgccccaccgccacggcggtgcccaccccggtggcgcggatggccgcgggataaaaaagcggcgccagagcgtaaagcacactttgtccgccggtggcgaacagcccggcgacaaaccccgccagcagcatgccagtcagcgacgacgcgctgcccagcgccagcagcgacgccagaatgccgctgtagatcaggagcgacatccgcagcggggtgagcttatccattagcgcccccagcagcagcgtgccgcaggcggcgccgatctgcagagagaacatcacccccgccgcctggctggcgcggaatccctggcccaccagcagcatcggcagccagttgatcagcatatagaccaccagcagggtgaaaaaataacccagccacagcagcagcgtagcggcggcctggcccggggcaaacagggtgcgcagcggcacgctggcctccgcgcgctgaaacgcctgcgactccggcagccagcgcatcagcaacgggatcagcagcagcgggaccacgccgccaatccagaaaataatctgccaggccgcggcgagaccggaaaagcccagcgctgccgccagcgcggcgccaatgggtacgccgcagtacatcaggcttaccgcccggccgcggaaacgtgagccagcggcttccgaggttaaggcaatcaggttcggcaatgccgccccgagcccgacgccggtgagcaggcgcgccagcagcagcgtcgggaagctccatgccagcgcggtggccagcgagaacaggccaaacagcagcaccgaccccaacagaatgcgcttacgcccgtggcggtccgccagcatgccgcccaccagcgcgccgggcagcaggccgaggatcccggcgctgaagatccagcccatctgcattttatccagcgcaaaggcctgcgccatgccgacggcggcgatccccgccgcctgcagatccagcccttccatcagggccaccataaaacagagcccgatggtgaccaccaggcgcgagggggttgcagtcgttatcttggtcatagggtaccttggcgatagccgaacaaacggagcaggtgactggcggctgatgctttgtcagccgcacgttcttagttatttattgcggttaagcagatccagcgcgacgtcgacgatcatatcctcctggccgccgaccatccgccgcttgcccagctcgacgagaatatccaccgcgctgaggccatagcgcttggccgccgcttcgctgtggcgcaggaagctggagtagactccggcgtagcccagcgccagcgtttcgcggtcgacacgcaccgggcgatcctgcagcggccgcaccagctcatcggccgcgttcatcagggcgtagagatcggtgccatgctgccagccgagcttgtcggcggcggcaataaacacctccagcggcgcattgcccgcccccgcccccatcccggccaggctggcgtcaatgcgatcgcacccctcttccaccgcgacgatcgagttcgccaccccgaggctcagattatgatgggcatgcatcccggtggcggtctccggcttcagcaccgccttcagggcgcggaagcggtcgcgaatgtcgttcatgttcatcgccccgccggaatccaccacatagatacaggtcgcgccgtaagattccatcttcaacgcctgctgcgccagcgcctgcggggagatcatatggctcatcatcagaaaaccgacggtgtccatccccagctcgcgggcaaaggcaatatgctgcgcggcgacgtccgcttcgctacagtgggtggcgacccgcaccacccgcgccccggcctgatacgctgctttcagatcgtgcagcgtgccgatgcccggcagcagtaaggtggcgattttcgcctggctcacgacatccgctgccgcttcaatccaggcgatgtcgctgtgggcgccaaagccatagttgaagctggatccctgcaggccatcgccatgggccacttcgatggagtcgaccccggccttatccagcgcgctggcgatctgctgcacctgcgccagggaatactggtgacgaatggcgtgcataccatcgcgcagcgtcacgtccgagatataaagttttttaccgttcatgctgtcgctcccgccgcgctgtgcattgccccggccatttgctccgccgtcgccagcgccgccgaggtcataatatcgaggttgcccgcgtacgctggcagatagtgcgccgccccttccacttcgaggtacaccgcggttttcaggccggaaaaacagccgacgccgggcaggttgaccggcctgtcctcggggataacctcaaactgaacctgctgcttcagccggtagcccgggacgtaagcctgcactgccgccgccatttcggcgatcgaggcggcaatcgcctcctgcgacgccagctcgctcaggatgtagacggtatcgcgcatcatcagcggcggctccgccgggttcagtacaataatcgctttgcccttgcccgccccaccgactttttcaatcgcctgcgaggtggtttcggtgaattcgtcaatattggcccgcgtgcccggcccggcggattggctggcgatcgaggccacaatctccgcgtaatgtaccttcgccactcgcgagaccgcggcgatcatcgggatggtcgcttgcccgccgcaggtcaccatattgacgttgccctgatggagattgtccgcgaggttgaccaccggtacgcagtacgggccaatcgccgccggcgtcaggtcgataacgcggatccccggcttcgcttcgcgcagcgcggcatcgtttttgatgtgcgccccggcgctggtggcgtcaaaaacaaaatcgatgtcggcaaattccgccatctgcatcaggccgcccaccccttcgtgagtggtcgcaacgcccaggcgccgggcgcgggccaggccatccgactgcgggtcaatgccgaccatcaccgccatctccagatgctggccgtggcgcaggattttaatcattaaatcggtgccgatattcccggagccgataatggcgactttacgtttacgcatcacgatctccttctccggcggcaacgaagcgtgccgcgactgagccaataccttcgatatgggcgacaaagctgtccccctcgttaatcgtcaccatcgggcctaacgccccggtcagcacgatatcccccgcccgcagcggttcgccgagactcgccagcttgcgcgccagccagactgcggcgttcagcggatgccccagacactcgctgccgcggccgctggagaccagctcctggttgcgggtcatgtgcatggcgcactgcttcagatccagtcccgccggacgctgcgccgggccgccaatgacgtacaggccgcaggaggcgttatcggcgacggtgtcgacaaagccgattgaccagtcgcgaatgcggctgcccaccacctccagcgccggcaatacccattcgatggcgttatacagttcatcaaaagtggtatcggcatgcggcagatcctgcttcagcaccagggcgatctcggcctccaccttgggctgcagcacgcggccaaacggcacctcggcgttgtcgccgtagcacatgtcggcaaacagggtgccgaagtccggctgattgacgcccagctgctgctgcactttgggatgggtcaggcccaccttgcggcccaccacccgccggccatgggccacgtggtgctggacgttcagacgctggatggcataggcggcgtcggcattgtcgacgccgagaatatcgcgcagcggggcgatcgcctggccgctctgttccgcgtcgcggagctgccgggccagcgcgtcaagagaaaaagtcatcatttactccttaagcccgtgcgaggaaattgagcaccagctgattaaaactgtcggcatgttcccactgcgcccagtggccgcagtcgcggtaaatatgcagttccgaaccggcgatcccggcgagcaggcgcaacccggcgtccatcggcacgaagcggtcattgcgtccccagacgatcagagttggcgcgctgatttcgcccagccgcgggccaaagtcaggaaactgcttcgggttggcttccaggctcttgacgaagttgtccagatggtcgcggcgcgacagcatattgttgagacgcgcctcgaacagcgcctcggtgaggtcgcgggtgtcgaagacgaagatgctcatcatctttttgaggttttcaatggtcggctcgcggtacagggcgttcagcagcttgatgccctcggtcggcatcggcgtgaacaggctcatgccggcggtccccccgcccatcagcaccagcttagccacccgctccggccagctcagggtgaaggccaccgcgctatggccgcccatcgagttgcccagcagatggactttatcgatccccagctgatcgaccacgcttttcagaatgcgggcgttgagatccgaacgcgagccgctgttgacgatagcatcgcttttgccccaccccggacagtcgaggagcagcacgcgatagcccgcctcgaccagcgggtcaatattgcggctgaagttggcccagccggtggcccccggcccggagccgtgcagcatgaccacggtctctttcccgtcgccgcagtcattgatatggatacgcagcgtgcggcccccctcgtcgacattgaggaatcggctggtggcggcttcggtttgcggttgatagctcatgttagtctcccggttaatcaaatctcggtggtggcgctcagcgagccgaatccggcgatccactcggggatcggccggtaatagcggccttcactgcgccagcggccaaaagcggatagcgcagcaaaagcggccacccaggtcttaatttcgtgcgtcgatttcccggccatcgccgacagctcgtcattgccgatggcatccagctccgccagccggccctgctccagcaggctcataaagcggttgtcccagaccgggttgaggggatggagcgagtgcgggtcttcggtaaaccgtcgggcggcattgatcacccgctgctggcgccgttcgcgttcgtccggcggcagctgttttccgccgccgagcaggcgatcgcgcagatgggcgtcggccttcgccagctccggcaccggcggctggtgcgagagtccgcccgagccgaggatcagcacccgcttattgagggtattgagaaagcggcccatcgcctcgcccagcagccgggtgcgttgaaaacccggcagcggtgcggcgacgccgttaataaacaccggcagcaccggcacgcggtccaggccacccagcagaaactccagcggctgggcgaagccatggtccacctgcatgttgtacgacaccgccaggtcgataccgctgttgaggatggcgtgggcgcaggcttccgccagctcggcgggcaccggcaggtcgccggcggcgctggcgaagtcgccaatcgcggtggcgccgacgccgaggcagaacggcggcattacgtcatagaaaaaaccgttgtagtgatcgggggcgaagagcaccaccagctcgggatcgaattcagcaatccgccgccgggcgtcggcaatcaccccgttcacttcatcgaggaccgcctgctccgggtctacgaatcccaccagcggggtgtgggagagacagtgcaaataggcatgcatatcaggccaccttctcttcagcgtgggcggtatccccggttgcgagggccattttttccgccagagcggtcagctgcgcgccgagggtttgcgggatggcgagagcggcgacaaagcggtccggcctgaccacggcgatggcggtgttatgcagtgcaaaccagcttttgaggcggttttgcgtatcgcccacccgcagcgtgccgggggcgttatcctgctcgcgctggatctgcacctccggcaccacctggataaagcgcacgccaatcgcgcgccagcgggcgatctgcccggcgttgagcccccactgcgggttgcagccccagccgataatggcgaaattcgccccgataacctcgtcgagcagcacgctctcgccgctctccagcgtcacctgcggttgaataaacattttgcccaccggcgaggtcttgccggcgccgtcggtcagcagcgccccctcgcggtactgcggcatcggcttaaagcgcatttcgaggaagtagcgcttcaccggcggcaggtagttcagcagccaggagaggccgtcgcgcgcggccccctgccagcgcttcggcggcgccagcacgtagccggcggtaaccgacaggtcaatcatcgctttcgcgtggtcgcggcgctcctgctggtagctgtcgagcagcgcctctcccgctttgccattgaccaccagcgccagcttccacgccaggttgaaggcgtcgcgcatgccgctgttatatccctgcccctgccagaccggcatgatgtgcgccgcatcgccggccagcagcacgcggtcgatgcgaaagcgctcggcaaggcgggcgttatgcgtatagacccgctggcggatcagctcgacgcgatccgggtccggcagcactttgctcagcaggcggcgcatattgtgcggttcgctgagctgagcttcggtttcgccgggcatcaccataaattcaaagcggcgcacgccgtggggcagcgcggcggaaacgtagggtcgcaccgggtcgcagcacaggtaaacgtgcggggtggccagcgggtcgttagcgatatcgatgacgatccactgattcggcgcggttttaccttcgaaggggatgttcagcgtacggcgaataaagctggcgccgccgtcgcaggccaccagccagtccgcgcgcaccgtctcccgctcgccgtccggtcctttaagatttaacgtgacaccgtcaccggtctggctaaaggcttccacttcgcgggagaagaggcagcggacctgcgggtaacgctgcagaccgtgatacatcaccgcatcgacctgcggctgaatgaaggcgttgcgccgcgaccagccaaactcatcggtcatcggctggatatcggcaaagcagcggccttttggggtgagaaaacgcatggcgtgccacggcgtggtatgcggcagcacgtcattcaccagccccaccgcctgcatcgcccgcagggattcatcgtcaatgccgatggcccgcgggtaatcgatcagtgtggcgagcttttccaccaccagcacgctgatgcccatctggccaaggtagttggccatcatcagaccaaccggaccggcgccaacgatggcgacctgagcggtatgctgcacggcgggttgaatatcgggtgtagatgttgtcattctcagcgacctcacgactcggaaactgcccggctgacaggcaatttgttaatcatgtgtaaacgttttttttataatgggctgagtatagggcgggggttttcggctacaatcaaaacatcatcgaatgtgcaccaggtgcaccacactgtttttaaagcattttaagggagggtttatgcgtgacgatgggtccgcagcgtacaaaacggtgcgcggattaagccggggtttattgttattaaaattgttaaataaattcgacggcggcgcgacgccgggcctgctggcggagtttagcggcctgcatcgcaccaccgtgcgccggctgctggagacgctacaggaggagggttttgtccgccgcagccgctccgatgacagcttccggttgaccattaacgtccgccaactgagcgatggatttcgtgacgaacattggatttctgccctcgccacgccgctgctcggcgagctgctgcgcgaggtgcagtggccaacggacatcaccaccctcgacgtcgacgccatggtggtgcgcgagactacccaccgcttcagccgactgtcgtttcaccgcgcgatggtcggacggcggctgccgctgctgctcaccgcctccggactgacgtggctggcctttgcccccgacgcggaacgcgacgccgtcgtcagcatgctggccgcccgtccggaagctgagtatcagctggcccgcgaaccggaacggctggcggcgatcctcgcccgcacccgccagaacggctatggcgaaaacttccgcggctggcggcaggaggagaaaatcgcctcgattgccgtgccggtctgcagtcagcagcgggttatcgggtgcctgaacctggtctatatcgccagcgcgatgaccattgagcaggcggcgcagaagcatctccctgcgctgcagagggtggcgaggcagatagaagcccgcatggaggatgaagaagtgtggtacgaaatgccctgatcgtgatgaggataaatgcgatcaaccattgcgcccggcttcgttatataatttaatacacaacgaattttcacgccattcgggccacaccatgtcaaaacaccccttactgctgggcctgacgctgctcagcgccagcctgttcaccggccaggccttcgccgaccgcaccgtcaccgaccagctgggtcgccaggtcaccctccccgaccacgtcacccgcgttgtggttctgcagcatcagacgctcaacctgctggtacaactgcatgccgccgaggatatcgtcggcgtcttaagcagctggaagaaacagctcgggccgcagttcgcccgctttatgcccgagatcgggcaactggcgaccccgggcgatcttacccaggtcaatattgaaagcctgctggcgctgcgtccgcaggtggttttcgtcgccaactatgcgccgccggcgatgatcgcgcagatccaacaggcagggatcccggtggtggccatctcgctgcgccatgatgccgccggggaaaaaaataaaatgaaccccaccatggctgacgaagagcaggcctataacgccgggctgatggaggggatccgccttatcggcgaggtggtcgagcgccagcccgaggccgaggcgctgattcactacaccttcgaggcgcgcaagcaagccaatgcgccggtggccgatattccaccgaaccagcgggtgcgggtgtacatggccaaccccgatctgaatacctatggcgctggcaaatacaccgggctgatgatggcgcacgccggggcgctgaacgtggcggccgccagcgtaaaaggcgcccgccaggtgtcgctggagcaggtgctggagtggaacccccaggtgatcttcgtccaggaccgttatccgcaggtggtcaaacagatagagaacgacccgcagtggcagacgatcgatgcggtgaaacatcaccgcgtgtggctgatgccggagtatgccaaagcctggggttacccgatgccggaggccctggcgctgggtgagctgtggatggcgaaaaaactctatcctgcgcgctaccagagcatcgatgtggacagtaaagccagcgattattatcagcgtttttaccgtgtgacgtggacgccagatgcccgctaaccatcatccctggctggtgcacggtagcctggcgctggtgaccctggcgatcgcggtcgcctcgctctgtttcggccagtacccgttaagcctgagcgccgttggccacaccctggtccatctgccgccaggtgaaggggtgatcgggcagatcgtctggtcggttcgcctgccgcgcgtggtgatggccctgctggccgggggcgcgctggggctgtgcggcgccaccttgcagggcgtgttccaaaacccgctggtggacccgcacatcatcggggtaaccgccggctccgccttcggcggcacgctggcgatcctgttgggcgtcggcagtctgctgatgatggcctcgacatttttcttcggcctcgtcgcgctggggctgatttacgccctcgccgccctgcaggggcgggacagcacgctggggctgattctgtccgggatcattctcagcggcttcttcgccgcgctggtcagcctgatgcagtacctcgccgacagcgaagagacgttaccgaacatcgttttctggctgctcggcagcttcgcgaccgccagctggcataaggtactgcttatgtccctgcccctggcggtggctgccggggcgctgtggaagctgcgctggcgtatcaacctgctggccctggaggaacgcgatgcccgcagtcttggcgttccggtggccgcgctgcgtcgcggcgtgctggtttgctgcgcggtgctggtggcagcccaggtggcggtcagcggcagcatcgcctggatgggtctggtggtcccgcacctcgcccgtctgctggtaggggctgaccatcgtcgcctgctgcccaccgccttctggctcggcgccgcgctgatgctggtggtggacgatctggcgcgcacgctgacccaggcggagatcccgatcgggatcatcaccgccctgctcggggcgccgctgtttaccgtgttgctggtgcaatcccgacgccggagtacgacccgatgaacagctcattatcgctgcaatcgctacgctatggccaccgtcagccgctcttcgccccgctcacgctggcctgccggcccggtgagatctgggcggtgctgggcgccaatggccggggaaaaagtaccctgctggataccctgaccggcgtgttgccgccgctgggcggcgagatgcagtgcgagggcggcgtggccctggttccgcagtcgtttcgtcccgcttttcgctggcgcgtgagcgatgtggtgctgatgggccgggcccgtcacgtggatctctttgcccagccggacgaggaggatgcccggcgggttgagcaggcgctggcgcagctggggattgccgccctggccgaagatgacttcggcgccctctccggcggccagcagcagctggtgctgattgcccgcgcgctggtcagcgccagccagaatatcctgctggatgagccctgctcggcgctggaccttggtaaccagcaggtggtattgcagctgatcggcgacctcgcccaccgccaggcgcgcaccgtcctgttcaccacccatgatcccaaccacgccctacaggtggccagccatacgctgcttctgctgccggagggccggtggctggcgggcgagaccgccgacgtgctgagcgaaacgcatctccggcaagcgtacggcctgccggtacgcctgatccgacatgccgcctccgcgttccctctgctggcgccggggtttacgctgcgtcgctgaacggcataaaacccgcctgccgaagatacccctggccaacgtcgccgaggataaagcgatacagggccagcgcggcgggatcggccctgagacgcgccagctggtaatcgcagcgaatattccacggcgccgggatggtcagggtacgcagatcgtcgcaggtggccagcgcggggccatagtgcgcatagccgataaacagatccgccagattctggcgaataagccacgcgccggctatctctcccggcggcacgctcagtgagtctctgccgccgaccagctgctgcgcccgcccggccatcgcgttgcccaaccctggatagcgtgcctcaattcgggcgaacagctgccaggtataatctcccgacggatcgcagcccggcgtggaggtcgccaaccgcaggcgggtcgtgctgagcagcgccagccagtccaggccatcgttatccggcgaccgccgggcggtcagcatcagctggttgctggcaaatccctggcattcctgcgccagacccgcctgcagcagcgcctgcgggtgcgccgcgttggcggaagcaaaaaccgcgcacggcgacccggcttcgatccgctcgcgcagcaggccggcagggccaaactgcgcatcgaccgccaggccagtgtgctgccgaaagtgcgccaccagcggcaggaaagcgcttctcaggcttcccgccgccagcagcgtgagagtggtgtttgtcataagaggtcgctataaaccggataatatagcgctatattacccggtttgccgtcgcgtcagtagcgaatttctgccagggtccgcagctgctcgggggtggctaccggtaggtcaaaaaagcgcagataggcagggatcatttcaaacagcatgtcggtcccgcgctggatgtggcactgtcgtgcctgagcggccctcagcagcggggtgtactcctgagtcatgacgacttcccccacccaggcgcctggcgccagacggtcaacgtccagcggcagcggatcgctggccttcatccccagcggggtggcattgaccaccagctcgtgtccggcaggatcgggctgcatcagggtgatatcgagctgcggatagtgctgatgcagccgcccggcgagggcgtgcgccacctcgggccgggtatcgtacagggtcagggcgctgacccccgccgccgcgagggaggcggcgatagccgatcccaccccgccgctgccaaccaccagcgcccgcgtcccctgcgggttaaaccctttacgacgcaggcccagcacaaatccctcgccatcgaacatgtctccgctcaggctaccgtcagcctcgcggcggatggcattgcaggcgccagcgatggccgccgtcgggctcaggcgctgcaccagatcgcaggtggcgattttatgcggcatcgtcaccagcgcgccgatgatattggtcatcgtaaacagcggcggaataaacgcggcgtagtcctccggcctgacccccatcggcaccaccttcacgtccacctgctggtcaacgaaccacgggttgtagatcatcggcgccttaaaactggcggtcggatagccaaggtgcgctatcagccgcgtatgcccactaatcaccatgccttgctcctttgcttactgcgataacttaatacgtttgacgtcgccgaggataaacagataggccaccacgcccagcagcgcggcgccgccgatgtagatcaacgcgtagaaaaaattgccgaacccggcaacgataaagccgatcaccagcggggtgaggatccccgcgaggttggcgcagaagttaaacaggccgccggtcagaccgcccagccccttcggggcgatatcggagatcagcgtccagccgagacccaccatcccctggccaaaaaaggcaaacgacatcaccaggatcaccgccaggtcgctctccagccagttggcggtgatgatgcagctggccatcagcagaccggcgacgatcggcagcttacggccaaggttggccgacccggtagctttcagcaacttgtcggagagccagccgccaaacatcaccccgccggcggcggcgacaaacggcaggatggagaagaagccaaccttcagccagggcatatgccgctcggtggccagccaggtggggaaccaggtgagaaagaacaccagcacggtattgccggcaaactggccgatactggcgccgatgatctgccgtttgctcagcagctggcggaccagcggccagctgaacgccacctgctggtcggtcggggcgctgaggccgccgccgttttcgatatgctcgcgctcctgctggctaaggcgcggatcttcatgcggttcgcggtagcagcgccaccacaccagggcaaacagaatgccgacggcgccaacgctgacgaacagcacccgccagccgaaaccgtccatgatccagaacagcagcggcgcaaagcaggccagcccgagatactcccccacggtgtacaccgccgtggccttcgcccgctcctgctgtgggaaccaggcgctgaccacccggctgttgaccggaaagcacggcgcttcgctaatgccgagcccgaagcggcacagcagcagcgtcttcagccccaccgccatgccatggaacagggtaaacagcgaccacagggtcagtgacaaaaagtaggtcactttgttgccaaagcggtcgagaaacaatccgccggggatctgcgccagagcataggtccaggcgaaggcggagaagaggattcccatgatcgccgggtcgatccccagctcagcggtgagctttggggcggcgatccccagtacggtgcgatcgagatagttgatcatggtgccaatggccaacagcgcaagaatgccgatacgccgccgggagcggcgcacggtgacggctggctgggcggcagccgtcgggttagggctatatgagctcatagtcggttcctgtctcgggtacagagggtgttgttattgtgtttaacgcataatgaaccatttgattcaggctaacaatactgcatcgccgccagacggacggccgcattcgctgcgccatagagcgcatagccagcccggcgctcggttaactcaaagaaaaagcggccggcggtaaacggccgggtgtaaagatgcaggaaatctcccccctgcggatcgcggtcatagaggagctgctggcgctgaagctgcccgacgtccagctcgccgccaaagcgcgccagcagatcgtcataataattggccgggatcggcagcgtatggcgggcaacctcggcaagctggtcgcaggcggccggcagatcgcggcaggcaaaggcggcatgctgcagccccgccccctggtagcaagcgacggagcgggcgatctgcgtcgcccggctctgcgaaatattcagcgccagacggatatcgccctgcgggctgcgcaccgccaggctgcgcaccagtccatacgggtccggcagcgtctgctcatgctcaagggaaaaaccaaacaccgtacggaagaacatcacccagttatcgcggctgtcggcctccattcccagcgccagatgatcgataccgagataatcctcgcgcaccgtcacgccatcacgcagatgaaaatcgcgctcgtagatagcctccccggcgtcgatgagatagataaggctgccgtcgggggcgcagatcgccgggatcggcgtttcgttcggcccggcgtcgccctgccaggtggcataccccagcgcgcgggcgcgggcgacaagcgacgcgctgtgctcgacccgcagcgccatcgcgcagagcgataccccgtggcgttgataaaaatggtcggcccagctgtgcggctgatggttgatgacgatccgcgccccgccgttgcgccacagcgtcacctgtctggagcggtggcttccctcgtgctgaaaacccagcgcctgcagatgttgccccaggcgctgcgcctcggcggcgctggcggcaaactcgataaactccagcccgtgatagaccggcagcggcggcggtgaaaacagatcggcatcgcacgtcgggagccgacggcgggtttgctcctccagccacagcagcgaacgataaccatctttggccgtcgcaccgttcggcgaggcgcgaaaaccgtcattgaagatctccagcgaccaggggccgcggtagccacagcgggtgatctgctcggcaaatgcctccagcggcagctccccctgtccgggaaagcagcggaagtggcggctccactccagcaaatccattttcatatacggcgcatcggcgagctgtacaaaggtgattttctccaccggcaccgacggtagcgcgtccagcgtgtcgccgcgggccagaatatggaagctgtcgagcaccaggcccaacgccgggctgtccacccgccgcacccgctcccaggcctgctgccagcggttcacatgggttccccaggccagggcctcatagccgatagcgatcccctcctcttccgccagcgtggccagcgcccgcaggtccgcgacctgcaattcgctatccgccgagcagtccggctgcacattgctgcacagcagcagcgtctcgcagcccagctcgcgcatcagagcaaacttgcgccgagcgcgggccatattcgccgcaaactgcgcccgactggagccttcaaaatcgcgaaagggttgaaaaagcgtgatttttaaccctaaatcggcggcaagctggcggatttccgccggcgtccccgtataatagagcagatcgttctcgaaaatttccaccccctgataccccgccgccgcaatagcgtgcagcttctcaggcagggtgccggaaatcgaaacggtggcgatagagcgcagcataaggtcctcgggtcaacagctgacgtaagccttgaatatgtatcatttggttcatttgcgccataccaggttgctaaattgtgatcattatgtgtattttttgtcacccaagaaaaaggagttgccatgaccgtcgttgcccatgatgaagcacaatccctgaaggcgcggatcttcagcgccgctatcgctgtctttgctgaacacgggctgtcaggcgcccgcatggagcagatcgccaccgaggcgcagaccaccaaacgcatggtggtttactacttcaaaagcaaagaacagctctatcaggaggtgctgcagcatgtgtatgcgcggatccgcgaaaccgagcagcagctggggctggagaatgtgccgccggtggaggcgctagtgcggctggtgcgctggagcgtgcgctatcacgccacccatgcggactatatgcgcgtcatttgcatggagaatatgcagcgcggcaagtggttaaaaagctcgggtgaactgaagccgctgaatcgtaccgccctgtcgatactggaagacattttactgcgcggccagcagcagggcgtctttcaggcggggctcgacgcgcgcgatgtccaccggttaatcagcagcttcagcttttatcaggtgtcgaacttctacaccttcagcagcctgtatcttgacgatccgctacccgccatcgacgatgaagcgatggtggctcaccattgtgacattgccgtcagggcggtgatccgcttcgtgatttcctgacccgccggcgtaagggatcagtgcccggaaagcgcatgaatgactttctccatagcctccacggtgagcggcgaacgctggattttgcggttcgccagcgaggtgcgcagcacaccggcaatgacaatgtgtttcggctcctgacccaggtcacgcatttccagcacgactttacccaccacgcggcacatttcctggtacaggtcgtcgtctttcgctttatttcccatagaatttggctcgtattttatcattatcaatcaaatcattattgatagatttcccgcacaacgcaaaccatcgccactttaaaggttcaatgacgcattttaccggctcatgatggcgaaataatccatttcttttaccctttttcatagccggtgacgaaaaagtgtgttgcgtagatttttgcataacgtgccggttttgttacgcgttttgtccataatttgaaacgaggtttttattttcctttttgatttcggcagcgtataatgcgcttcgattctttcttgaatggtttcagcgcattggactgcatgataaaacgcataacaccttgccacatttcatgggctgaaccgccagcacacattcttctgcacgcttcagggttgtcacctatccttagggcgtggcttagcaactttcgtaatacaggtttggctccccggcagtgcgcccgcggagcgagaattccatatccttcacaacttaaagactaaaactgtcatgaaaaagaccaaaattgtttgcaccatcggtccgaaaaccgaatctgaagagatgctgaccaaaatgctggaagccggcatgaatgtgatgcgtctgaacttctcccacggtgactatgcggaacacggtcagcgcatccagaacctgcgcaatgtgatgagcaaaaccggtaagaaagccgctattctgctggacaccaaagggccggaaattcgtaccatcaagctggaaggcggcaacgacgtctccctgaaagcaggccagaccttcaccttcactaccgataaatccgtcatcggcaacaacgaaatcgttgcggtaacctatgaaggcttcacctccgacctcgccgtcggcaacaccgtcctggtggacgatggcctgatcggcatggaagtcacggctatcgaaggcaacaaagttatctgtaaagtgctgaacaatggcgatcttggcgagaacaaaggcgttaacctgccgggcgtctccatcgccctgccggcgctggctgagaaagacaaacaggacctgatcttcggttgcgaacagggcgtggacttcgtcgcggcctccttcatccgtaaacgttccgacgtcgtcgagatccgtgagcacctgaaagcccacggcggtgaaaacatccagatcatctccaaaatcgaaaaccaggaaggcctgaacaacttcgacgaaatcctcgaagcgtctgacggcatcatggttgcgcgtggcgacatgggcgtggagatcccggttgaagaagttatcttcgcccagaaaatgatcatcgaaaaatgtatccgcgcgcgtaaagtggttatcaccgccacccagatgctggactccatgatcaagaacccgcgtccgacccgcgctgaagccggcgacgtggctaacgccatcctcgacggcaccgatgcggtgatgctgtccggcgaatccgcgaaaggtaaatacccgctggaagcggtcaccatcatggcgaccatttgcgaacgtaccgaccgcgtgatgaccagccgtctggacttcaacaacgacaaccgtaaactgcgcatcaccgaagcggtgtgccgcggcgcggtagaaaccgctgagaaactggaagcgccgctgatcgtggtcgccacccagggcggtaaatccgcacgcgctgtgcgcaaatacttcccggatgccaccatcctggcgctgaccaccaacgaaaccaccgctcgtcagctggtgctgagcaaaggcgtggtaccgcagctggtggaagagattgcctctaccgatgatttctatcatctgggcaaagacctggcgctgaagagcggcctcgcgcgtaaaggcgacgtagtggtgatggtttccggcgcattagtgccgagcggcacgactaataccgcttccgtacacgtgctgtaataatttacaggttaattggttttttttaataaagcgcctcgcggggcgcttttttttattcattgattagctcttcctattaaaaatgcaaatcggaatttactatttaataagggattatctaagatgaatccgatggaagcgcgctgttttcactcgcctttttcagcgattctgagcaattcgatgcttctttgagcgaacgatcaaaaataagtgcgttcaggtaaaaaaaatattctcatcccaaaaaactttgtgtaatacttgtaacgctacatggagattaactcaatctagagggtattaataatgaatcgtactaaactggtactgggcgcggtaatcctgggttctactctgctggctggttgctccagcaatgctaaaatcgatcagctgtcttctgacgttcagactctgaacgctaaagttgaccagctgagcaacgacgtgaacgcaatgcgttccgacgttcaggctgctaaagacgacgcagctcgcgctaaccagcgtctggacaaccaggctcactcttaccgtaagtaagagttctggtaataaaaatggcgcactctgtgcgccattttttttgccctcagcatgagggctattgggtaagcagaccgttgtcagacgaactattctgcgccgacagcgacgtcgccgtgctacctgccccagccgacaccaccaccggataccccgcccttctcgacatcgcttttttcaactgcaggtcatccactgctttatcctctgcgaaggcgtgaaacgccgctggcagcgtgtaagcgatggtccgggtgttttccccttcggtctgcgaaagcggcctgtggacttcgacatagcgtttaccatccggctcgacggcaaacttcaccggctgattgataatccgtaccggcgtcccggttttcacctggctgaacagcgctttgatgtcatcagcgttcatccgcatacagcccgagctgacgcgcagaccaacgctgtctggggcgttagttccgtggatgagatattcaccgttaccgtaggccagacgcagcgcatagcggcccaggggattgttcggtccggccgggaccactgccggcagcgtcacccctttctccagcgagcgcgcgcggatgccggcggtaggcgtccaggtagggttagggatcttctgccccacgcgggtggtcatctccggcgtttccagacctaactggccaatgcccagcggatagacctgcacctgattctctcccggcgggaagtaatacagccgcagttcggcgaggttgacgacaatgccctccctcggcacgtcgggcagcagcatctgagaagggataaggacctgagtgccgggcttcggctgcaccggcgcaatcgtatcgttggcttcgaggatcagcatcgccgcggtatcgaaatggcgcgcaatcgcctgcaggttgcgatctccctcctggaccgtccagtactgattctgcccaatcagccgactgttggcgggaggaagcgggtaatcaacggcccaggcggccgaggaggcgccaagggcgctgagaagggctaaggtgatcatcgttttgcgtttcatactgagattccttctttcgctgataaaacgccaggagactgaacggcggcagggtcagcgccctgccggacgtaacagaatgaaatctacctgtttattctagctaatatttgccgctttcgcgcgtatcgcgcggatcatggcttcgaggccttgcgagcgggagggggtgagatgctgggtgagcgccattttttcaaaccacggacgcacgtcgaactcggtgatgtcctgagcggtcatccggtcatagaggataaacaccaccgctatcagacccttgacgatcgccgcatcgctatcgccgcgcagggtgatcacgcctgtgggatcctggtccatcacgatccagacctggctttgacagccctgaataatgttctgcacgctatgttcttccgggcttagcggcgccagacgctggccaagctcgatgatatagagatacttctcttcccagttggcgcaacggctaaagttacgcaacagtttgtctttgtccggtagtgccgccattgtcccgtcctttaccctaacagtttgcggatccgctggaggccggccaccaggcggtccacctcttccgtggtattgtacatcgccagcgatgcccgacacatagccggtacctgataccgggccatcaacggcatcgcgcagtggtgtccggtccgcacggcgatcccgtagttatcgaggaagctgccgacgtcataggcgtgatgctgaccgaggttgaaagcaattacccctttacgctgcgccgggccgtaaaggatcagatccggtaccgcgcgcagggcatcgagcgcgtagcgcatcagcgtctgctcatactcggcaatctgcgtcagtcccagctggctgacgtaggtcagcgccgcgccgaggccaatgatccccccggtattcggcgtgccggcctcaaagcgccacggcgcctgattccaggtggtgccctccgtcaggctgacggtggcgatcatcgacccgcccccttcccaaggcgccatcgtctgcagcagctcggaccgggcgtagagcacgccgatcccggtcggcccgtacagcttgtgggcggagaaaacataaaaatcgcagcccagcgcctggacgtccaccgggtggtgcatcaccgcctgggcgccatccaccagcactttcgcgccatgctgatgcgcaagagcaatcagcgccgccagcgggttttccgtccccagcacgttggagacctcggttatcgccagcaggcgggtgcgcgggtcaaacagtcccgggacaacatccagttgcagcgtaccgtccgggttcagggggatcacccgcagctcagccccgacgcgggcgcagagcatctgccacggcacaatattggcgtggtgctccatttcgctgatgatgatgttatccccggcgccgacgttggcgtttccccagctgttggccaccaggttgataccctcggtggtgccgcggacgaacaccacttcctccgccgacccggcgttaaggaaggtggccgcctgctgacgcacggcttccatccgcgcggtggcttccgcgctgagggtatggatgccgcggtgcaccgccgcgtagccgtggcgatagaattccgcttcggcgccgatcactgcctccggcttctgggcgctggcggcgctgtcgagatagaccagcggctgaccgttgacctcccggttcagtaccggaaaatcggcgcgaacctgttctactgaaaatgtcatactgtgcctcccggcaaacgctgtccaatacgcgccagcacctgctctctgagcgcgtcgctgcggatagcctcggtgagctcggcggcgaaggcgtagaggatcatctgctgcgccgcctgctgttcgataccgcgcgagcgcagatagaacagctgctcttcgtcaatgcgccccaccgtcgccccgtggctgcatttcacgtcatcggcgtaaatttccagctgcggtttggtgtcgacctccgccagccgcccgagcagcagattattgttggtcatctgaccgtcggttttcagcgcgagcggcgcgacgttgatcagcccgttaaacaccgcccgccccttatcgctgacaatggttttgtgcagctggcggctggtgcagtagccgacctgatggtcgagccaggtgcggctatcgcagacctcatttttcaccggcatcgccagcgaattgaggcgcaggttgctgttttcgccgcccaggcgggtgctggtctggtgacgcagcacctggccgccaagcaggaaactgctgctgaaggccgaggcgtcgcggcccagcagcaggtcgttatgggcgaagtgatagctgcgggcattctcaaatgccagcttgatatgctggaggtgcgcgttatcggccaccgtcatggtcaatcgcccgccggtgaaatgcggctgctcattgaggctcaggtaatgctcgacaatcgtcgcctccgccccgctctccagcgccagatgatggcgatagtgggcggtattcagcgcatcgccggccaggccactggtgatatgcatcagcagcagcggtttatccaggcggcggttgcgcggcacgcgaatgcgggtcaccgtctgggccaggctttcggtcagatggagaaacacctccggctgcagggcatccggcagatgctggcgctgattatcgacactgacctccacgccgctggcggcaagatcgtcgctcagctgaggatgatagcggccatcgataaacaccagccgccaggcgtccagcggcagcgccagcgcatcacgctgttcagcactgagagaggctccctcatcggcgacaaagcgaccgttaagtagggcatccagcggagtgtatttccagtcctcgtgcttgcgcgtcggcagcccaaggcgcagcagctgctgcagatgctgaccggcctccggggtacgcgggccgccctgcgcttcaaacagatggtgccactgctgcagcgcgttactgctgttcggtaagccagccatagccctgctcctccagctgtttgaccagagagaaatcgcccgacttcacaatccgcccctgatacagcacatggacatagtccggcttgatatagtcaaggatgcgctgatagtgggtgacaatgataaaggcgcgtttgccgtcgcgcagggcattcactccctgcgagacgattttcagggcatcgatatccaaccccgaatccgattcatcgagaatgcacagctccggctcaagcaccgccatttgcagaatatcgttgcgctttttctcaccgccggagaagccaacgttcaccgagcgggtcaggagatcttccggcatctgcagcagcttgatcttttcttccattaagtcctggaaatcgaaacgatccagcgcctcctggccacgatagttgcgcacggcattcagcgcagtctgcaggaaaaactggttgctgacgccggggatctctaccggatactggaaggccataaagataccttccccggcgcgatcttccgcagcgagttcgagcaggtttttgcccttaaattcaacgcgaccgccagtcacctcataatcttcacgcccggccagggtggccgaaagcgtacttttgcctgagccgttcggccccataatggcgtggacctctcccgggcgcacctcaaggttcagcccgcgcaggatcgctttatcttcgacggcgacgtgtaaatcttgaatacttaacatcttttttccttaattatcagccgacgctatgttcaaggctaatggccagcaatttttgcgcctctacagcgaactccagcggcagctcggagaagacgtctttacagaaaccgttgacgatcatcgagatggcatcgtcttcactgatcccgcgctgcaggcagtagaacaattgatcttcgccaatccgcgaggtggtcgcctcgtgctccagctgggcgctgttgttgcggcattcaacatacgggaaggtatgcgccccgcagtccgggccgatcagcatcgaatcgcactgggtatagttgcgggcgttggtggcggtcggcatgattttgaccagcccgcgatagctgttctgactgtgtccggcggagatccctttcgagatgatggtcgagcgggtgttcttgccgatatggatcattttggtgccggtgtccgcctgctgatggccgctggtcagcgccaccgaaaagaattcgccgatcgagttatcgccgcgcaggatgcagctggggtatttccaggtgatggccgagccggtttccgactgggtccatgacattttgctgttctccccttcgcacagggcgcgcttggtgacgaagttgaggatcccgccggtgttgttatcgccggggaaccagttctgcaccgtggagtatttcacttccgcgtctttatggatgatgacttcaacgaccgcggcatgcagctgatagctgtcgcgcaccggcgccgagcagccttcaatatagctgacgtagctgccttcatcggccaccagaatggtgcgttcaaactgcccggtcttttcggcgttgatgcggaaataggtcgacagctccatcgggcagcggacgcccttcggcacatagataaaggtgccgtccgaagccaccgcggcgttcagcgcggcaaagaagttgtcattccccggcactacggtgcccagatactttttcaccagttccggatggtcgtggatcgcctcgccgaaagaacagaagatgatcccctgctcggccagcttttctcggtaggtggtcgccaccgacaccgagtcaaatatcgcgtccaccgccacctcgcgcccttcgcgtaccggcacgcccagctggttaaaggcttcttccacctcgctggtcagaaaggtattggccccggtctgctgcaccgcgccaggctcggaggcgcaggtctcatcgcagttgccgcaggagggcgcggaatagtagctgtaatcctgataattaagcttatcgtaatgcgctttcagccagtgcggctcctccatttccagccacgcccggtaggcattcagacgaaactccaacatccactgcggctcattgcggcgagccgagatagcccgaacgacttcttcattaatgcctttggccagctcatcggtttgcaggcgagtaaaaaagccctctttgtagttgagcgggccgccggtccaggttttgacatcgtcagttgcttcagtattacgcgacatagttactccgcctgcaccccaaaactttcgccgcagccgcactcatgctgcgctttcgggttatgaaatttaaagatttcatttaaaccttcccggacataatccagctcggtgccgtcgatgaacggcatcgcctgcagcggcgcaaacagcttcgccccgtcagattcaaagagcagatcgtcgggcgccggctcggcaatcatttcgagcacatagccaaaaccggcgcagccgctggttttaatgcccagccgcagccctttcttatccggctgcttgcgcatcagatcgcggatatgcgcggcagcggccggcgtcatggtcagtccctgccagctgaaatcggcgggattaaaagttcctgcttgtacttccatcgatagacctccaggttggcgccatcaaggcataccgccatgttagtgataatgattatcacttcaacccttctgcagcaggggtattgcctcatttagtgctttttataagcatagaccctcgcccggggattatcagggcgtgcaaatagaacttaatcgattgatttataatatgttattttgaaatcattctatctccgcacgcaatggcaaagatgtatcgaaaataccgatttatgcaatagcggcagaccaccttgctggttatcctttgcaggcgagcataaagtgacaacgtaacagaaagaccatgccagcgcggggcgcggccccggccatgcgctagaaaaaagcgggtagtgaaagcgcccgccggtaacgcttcaggaaaggaataagcgccgctcgcctggccgcgttcgggaaataaaaaccaaaataaaacgggcaaacggggctgccaggcgggataccggctggctaggtgcctttactcaccagccgggcggcctggacaaagacctcatcctctaccccgtcccccttctgtctgcccagcctcaccagttcatccacgatactcccctgattaatctgcttttgtgtagccactaagctaatgaccgccgcgccgatggccatgccaatcaatgccgtttgttcatctttatctttcatggtgtcgctccgtctgtcctcctcagaaaggctagcaaaagataccatctgctcaatttcaaattcaccttctttacgtctgacgcaaagcctgcggcagggcacctggcaggagaaaaacaaactaagcggctgattgcaatggcataacactaatgaacaattaacagacttgtgagtcttgaaattattttttagactcattggtctgttaattatcaattgcgtaaaatcttatgcctaattcgaccttatttttcatcaccctttgtctctctcgcgtcctggtgaccttcttcttctggatggcaggcatctacggcgtctttcatttcgcggagatcgttcaggagatggtgaccgtcggcctgccgtggccggtcttgttcgcggcgggcacgattttttgccagctggcgggttcggcgctgatcgtttttaatcctgccggctacggctggattggatcggggatgctgattgtgtttacattactcactattccgctgggacacgccttctgggccttcagtgaaccccggcgcactgaggaattctatattgcgcttgaacacattaccgtggtcggaggattaattatgagcgcgctgtttgcaggctatcggcgatgagcgaaacccctcgtcagaaaggtcggccaaaagatccgttgaaaacgcaggcgatacttcaggccgcccgtaagctgtttctggaacagggcctggaggtgacaacggccgaaatcgcccgcgtagccggggtggcgaaagccaccctgtatgccaatttcagcgataaagaacatctgatagaggcggtcttacgccaggaatcggatctcaccatcagcgaccatgatttcgcccagcgccatcatctgccgctgatcgaggtactgacggcgtttggctatcgctttgtccgctttatcaaccagcgggaactcaccggctgggaccgactgatcgccttggctgccgtgcgtcaccccgatctccccggccgcttttacgccgccgggccggggcgcgcgcagcagatgcttgaagcgatcatcgccgaggcgatcgaagccggtactttacgagcctgcgatccgcaggaggctgccgacgaactggccggtttatggctgggaatgaccagcctggcgataaaacttggcgcaagacctccgctgtccgacgacgaaatcaaacagcgggttgagcgcgccctggacgtctttctgcgcgcgtattccctggcgccgggctgatctctccttgaccttttcagcgctgtcgtctggcgtaaggctgatttattgtgccaaatccgcgcccggcgcaaaaaataatgtccttgccggttagcattaaaagaaaataacaaccacagagtgcaacgcagattattccatgagggaatagtgggaatgctaatatttcatttcctcgccggtttttagaggcctatagtttttttacctgcagaacatccactaaggttaaaaaacataaggacataataatgattgtttcagcccccagcgattatcgcgaagccgctcgtcgtcgtctgccccgcttccttttcgattatattgacggtggcgcggtggcggaaaacaccatgaacgccaacgccgccgagcttgcctcggtagctcttcgccagcgcgtactgtgcggggccggcgaaccgacgctggcgaccacgatccttgatgccccatgggcgatgcccgtggcgctggggcccgtcggcgccaccgggatgtacgcccgccgcggcgaagtccaggcggcccgcgccgcctcccgcgccgggatcccgtacaccttatccaccgtgtcggtctgctcgattgaagaggtggcgagccacgccagcggcgcgctctggtcccagctgtacgtactcaaagatcgcggctatatgcgtaacgcgctggagcgcgcctgggccgctggcatgaaaaccctggtatttaccgtcgatatgccaatccccggctcgcggtatcgcgataaccgctcagggatgtccgggccgcacgccaccctgcgacaatatctccaggcttgcacccatccgcgctgggcgatgaacgtcgggctggcgggcagacccctgtcgtttggtaatatcgaagcctacaccggccacaaaatgaccatggacgactatatggggttcatcagcaacaacttcgacccgtccatcgcctggcacgatctggagtggatccgcgacagctggcaaggaaaattaatcatcaaagggatcctcgatgccgacgatgcgcgcaatgccgtgcggctgggcgccgatggtattgtggtgtcaaatcatggcggcagacagctcgatggcgccatccccaccgcccgggcgctgcccagggtggtggatgcggtcggcgacgatctgacagtgcttgccgattccggggtgcgctccggcgtggacgttatacgtctgctggccctcggcgcgaaaggcgtgctgctcggtcgggcctatatttatgccctggccgcggcgggcgaagcgggcgtggcgcatctgctgcgcttatttgccgaggatatgaaggttaccatgaccctcaccggcgcgacctcgccatcggccatcagcctcgattgccttgatcgcctcgaacaggatcaacaccgcactcatgcggtgccggtatccttacccgcctgaccctgcccgggacctggcctggccatgtgcctcgcccaggtccggcaaagtggaattacctctgaaggtgcaactctgtctgttgtaccgtgttctccggacggatgcggaaccagatcgcgtacatggccggcaggaagataagggtcatgatggttccccccagcgtcccgccaatcagcgtataggcgagcgttccccagaagaccgaatgagtgagcggaatgaacgccaggatcgccgccagcgcggtcagcagaaccgggcgggcgcgctgcaccgtcgcctccaccaccgcgtggaacggatcgagccccgcctgttggttatgatggatttggccaatcaggatcagcgtattgcgcatcaggatccccgacagggcgatcaggcccaccagggcattgatgccaaacggctgattgaacagcagcagcgtcgggaccacgccaatcagccccagcggcgcggtcaggaaaaccatgaccatcgccgacagcgaacgcacctgcaggataatgatcagcagcgtgagggcgatcattatcggaaataacggcaccatcgcccgggtggccttgccggattcctcaatcgaccccgccgtctcgatgcgatagccaggcggcagcgagtcgataatgggctgcagcggcttcatcagcgcggtggagacatccggcggctgcaggttctccgcaacatctccgcggacggtgatggtcggcgtgcggtcgcgacggcgaagcagcgggtcctccatcctgatcgacacgtcgccaatctgtgacaagggaacccgctgcccgccgctgcccaccagggtgaagtcggcgattttcgccggatccagacggatgtcgcccgccgcgcggccgatcacctgcacggcgcgaatatcttcccggacggtggtgatcgggatccctgacagcaggaactgcagctgctgggcgacggactgggagctgagtccgctcgcctgcagccggtcctgattgaggctgaaatgcatcaccggtacccgcgaaccccagtcggtattgacggtgcgcatcagcggactggcctgcagcaccgatttaacccgctcggcgatgtcgagcagagcgtgcggatcgggccccatcacccgccaggcgaccggataaggcgaataagggccaaacaccagctgagtgacgcgcacccgcgcctccggcgccaggccattggccaccgcctcccgcagccgccgcttgagcgcctcgcgggcaccctgcccgtcggtcaacaccaccagtttggcgaaggagggatcgggcaattccggagccatcgccaggtaaaagcgcggcgcgccctggccgatatagctggtgacaatcttcgcctccggctgccgctgcagccagtgctcaattttcgccgccgcggcgctggtctggctaatcgacgacccgtaaggcagctgcacttcaaccagcacttccggacgatcggaggtggggaaaaactgctttttcaccacgctcatgcccaggatcgccacgataaacagcgccaccaccccggcggccacgcgccatttgtgagcaataacccgggtcagcagccgacggaagcgctgatagcgcggggtgtcatacagcgcggcgtggccggccgccgcgggctttctgtccggcaacaggtgcacccccagccagggggtaaaaatcaccgccaccatccaggaggcaatcagcgcgataccgacgatccagaacacattgctggcgtactccccggcggtggactgcgcaaatccattaggcataaagcccacggccgtcaccagggtaccggccagcatgggcgcggcggtatggctccaggcataggccgaggctttgaggcggtcatacccctcctccattttgaccaccatcatttcgatggcaatgatggcatcatccaccagcagccccagggcgaggatcagcgagccgagagtgatgcggtcgaagtttttgccggtcgcctccatcaccacaaacaccacggcgagggttaaaggcaccgccgccgcgaccaccacgcccacgcgccaccccatgctgacaaagcacaccgccatcaccaccagcagggcgacaaagaatttgatcatgaactcatcgaccgcggcgctgatattcaccgactgatcggtcaccttggtcaacgacatgccgagcggcaggttctgattgatgctggccgtttcggcatccagcgcttttcccagcgccagaccattccagccctcacgcatcaccacccccagcagcagcgccggttcgccctgatggcggatcaggaaggtggcgggatcttcgtacccccgctcaaccgtggcgacatcggccagtttcagcgttctgcccccggcaataatcggcgtgtcgcggatctgctgcaggcggtcaaacgccccatcgaggcggataaagatctgcccgccccgggtctcgatagccccggcggcggtcagcacattctggctgttcagcgcggcaaaaatcgcctctggcgaaaggcccagggtggcgagacgatcatgagaaaacgagagataaatgcgctccgcctgttcgccgaggatattcacttttttcaccccggatacatgcagcagctgctggcgcagggcttcagcgtcacgcaccagctgccgcggcggctctccccgcgctttcagagcaaagagggcaaaggtgacatcggcgaattcgtcattcatcatcgggccggagacgccggcaggcaggtttttcgcctcatccccgagctttttgcgcgcctgataaaactgctccggcacctcggaaggcggggtctgatcctgcagcgacagggtgatcaacgctatgccagggcgggtataggtctccgtgcgatcgtaccactttagctcctggagtcgtttttccagcggctcggcgacctgatcctgcatctcctgcgcggtggcgccgggccagacggtaatgaccgtcatttgcttgaccgtaaagggcggatcttccgctcgcccgagtccgaagaacgccaccagcccggcgacggagataaggataatcaaaaacagggtcaccgaccgctcgcggacggccagcgcggagagattaaaacgcccggcgctcatggctggctcccggcggcattatgcccgcgtcgttccgccagacgcaccgcctcgccctggtgcagaagatgggcgcccagggcgacgatcggctcgccgggcttcagcgggccggtcacccgcgcggtttcatcatccaggccgagcacagttaccggttgccaggagacggtggccggacgagaggcaatgcgccagacgccagggccgttacccggatcgtagaccgacgccaggggcaccgccagcacctggcctggcgcctggtcgttgccgatgcgcagggtcacggtagaccccagcggggcattcgccagcgcgccgttcagtacatagcgcgcttcaaaggtgcgggtggtggcgtcagccgcgtccgaaagcaggcgcagggtcgccgtgaccggctgagattcgctgccatagcgtgtcgccagcgcctcgctgccgaccgccgggcgcagcgtctccggcagttgcacccgcgcttcgcgctgccccgcccgcgccaggcggatcaccacctgcccggcgctgaccacctgccccggctcagcgagggtttccactaccacgccgtcagcatccgccagcagtccggcatagccggtggcgttttgcgccacattggcctgcgcctgggccgcgctgaggtcggctctcgccgcctctgctgccgcgttaatctggtcgaattccgcggcagagatggcgccgctcgccaccaggccgcgatagcgggccagatcgttggccgcctttttggctcgcgcccgcgcggcatctacggcccgctgttgggactgcgcctgcaaggctagatcagccggatccaggcgcagcagcagctgaccgcgcttgacgctctgcccggtttccacccgccgttcaagcacttttcccgccaccctgaagccgaggtcgctttgggttcgggccactatcacgccggtaaaggcccgcgagccggcctccgcgcgctcgacggtcgccacccggaccagcggcggccggatgcgggggtcgtcatgatcggcaggttcgccgcagcccgcgagggccagcggcaggaggcagacggcaagatggacggcgtttagcctgagcatgggtcaccttaatgaaaagaccggatggtgaccgcattctcagactagtgaccaataaagtcaatggtcactaatcagggggagagacttctcaggatcagggaggcaagcagcaccgccgcggtgggcgcggtgtcgagattgtattgcaactgcaccgggttgatgaaaggacacatcaccatatacaccgccagggtcgcttcatccagcggggttttgcgctcgaactcgcccgcctggcggccttcgacaaggatttgaccaatcagctgctgcagatgaccggcatactgttccgttgaaggccatttatcgcgcgccgcgacggcggcgatgtcgtacagtttgcgatcctcgaaaaacagttcactgccggcctcggtcagcgcccggaacaggcggcgcagtttctcgctggcggacggcgcatcggcgatggcctcgctgacggccaccatgatcttctccagccggctggcgcaaatcgcctcgccaatcgcctgcttggagtcaaagaatttatagatataggctttggaaaagcctatcgctttggcgagatcggtgaccgtcgttttctcatagccatagcgactaaagtgcgccatggccgcgtcaagaatctggtcccgaacgctgtggtcatggggaccacggcttgcaggggtgggggtatttttcgtcatccgtttagcttaatgcgatcgctatcgtttgacaacgagtgacgttattatgatttggtcacaataacgccccgctctgtgatcctcttgccgcgttacgcctcacccgcctcttggtttatcgcgccggcgggcagacaacccaggccttgcagcgtctgatacaccgcgctgtcgagcggggtatgcggttccgcgcctaaaaaatcaaccagtttatcgttgcgcaggcgtaccggcagacgccagagatagtgcatctcgaccatttcgcgcagggtggcgttgaagggcgccgccagcttcaccagccaccagggaaaggacttcactaccgccctgccgccatagcgggcgaccacccgctggatcgcctgactcatttcgctgccgtccgggtcccagtggccctgcatatgaaagcgggcgaacggctcaagctcgcgcctgcgggccagcagcgcggcgatggtggcggcgacgtcgggcaaccaggcccactgatgcccgacgccgatcgcccccgggtagctaatgatgcggggaagctgaccaggcttgaccagcccctgcgaaaaccagttatttccggcgcgtggaccaaaaaaatcgcccgcccgaacaatcaacgcccggccgccgcgctgcacgtaatccttcagcgccagctccatcgccgcccggatggcgcctttgcgggtcaccggctgttgtgcggcctcttcagcaatcagcggaaaggcatccggtccatagttgtagaccgtgccgggcaggactacaagcgcccgctgccgttcggcagcctgcatggtgttgcgcagcataggcagtacttgttgccgccagtgccggtagcccggcggattcaccgcatggacgatgacgtcgcaaccggcagccgccgccgcgacctggccgccatccagcgcgtcgccggctatccactgtatgccatcttcgggatcacgtatctgggcgccgcgcttcagcgcccgaacctgccagttgtctgccaccagccggcgcgccacttccccaccgatgcccccgcttgctcccagaataagtaccttgccgctgctgttcatcctctttccccgttcgctaatggatgcttgacagcctacctgtggctcatatcaaatgaaattgcataccatcgtcgagcggctatacatatttgtatgaatacctctattccctgggagtggtaccgaacctttctcgccgtcctgcaggaaggctctttatcgggcgcatcgcgtaccctgaacatcactcagccgacggcggggcgccatattgccgggctggaaaccgcccttggccaggccttatttacccgctcgcaaaccggcctgctggcgaccgacgcggcgctggcgctgcgggtgcacgccgaggcgatggacaataccgcccgggcgctggaacgcaccgcggctaacttcagtcgcgacagagccgagctgcgtggcgtggtgcgggtggccgccagcgaggtggtcggcgccgaggtgctgccgccgctggttgcccggctcaggcaggcgtgcccgaatatcgtcatcgaactgatgctctccaatcggtttcaggatctgcttcaccgggaggcggatatcgcggtgcggatggtcgccccgcagcaggagcagcttatcgcccgccgtctcggcaggatcgagcttgggttacatgccaccgccacctacctgacgcgccagggcctgcccgcgaccctcgacgatctggccagccacgcgctaattggttttgatagcgccacccctctcgtgcgccgggcgctgcaggcttacccccgctttcagcgcgaggccttcgcgatgcggaccgatagcgacctcgcccagttgagcctgatccgcgccggagcggggatcggcatctgccaggcgcctcttgcggatggcatcattcccctgcagcgagtgctggcggccgacttttctctgtatcttgatacctggctggtaatgcatgaggatctgcgccacagccctgcctgtaagcgggtatttgattttctcgcccaggggttgcaggcgtatattcgtggcccactggcgagctgacccgcccatcgcgcgggcatttcattgcctgcggaaatagtcactcattgacactgtaaatatggcattgtataaaaccccgccccaataatgagtttcatttgcattactcccatttgctggtcatccactcgcctgtttacaaggatagcgtttaatgaagaaggtcctttgcgcgttaggcttgatgttcaccgccgtcagttccgcgctggcaacaacctaccccctgacgattgaaaactgcggctatcaggagaccttcacccggccgccggagcgcgtggtcgcgctggggcaaaatacggtcgaaattctgctgctgctcgggctgcaaaagcaggtggtcgccagcgccttctggccgaccagcgttttaccgcagctggctgagcaaaacgcgaagattaaaaccttgacggtggaaattccgagcctggaatcggtgctggcgcaaaatcctgatttcgttcccgcccagttgccgctgctgctggggccggaaagcaaagtcgccaggcgtgaagatctcgccaccgtcggcgtaaacagctacgtctcaccggggatgtgcgccactaaaaaggccaccggcgacatgtacggcagccggcaaaagctgtgggatatgacctggctgtatcaggaaattagcgatttcgcccgcattttcaacgtcgaagatcgtggtcaggcgctgattgccgatttcaaaaaacgtgaagccgacctgcgccacgaatttggtaaaaacaaaaaggatctctccttcgtcttctggttctccagcgcctcgccttcggccgatgcctatgttggcggcaaaaacagcgcctccggatttatcgccagcgtgctgggcggacataatgcgataacctccgagaccgagtggcccacggtgagctgggagagcatcattgccgccaacccggatgtgatcgtggtcgccagtctggaccgtaaccgctgggcgctggataaggccgaggagaagatcaaattcctcaaaagcgatcccgccgtcagccagctggaggcggtgaaaaaaggccatatcgtggtcatggacggtcaggcgatgaatccgaccatccgcacgctttacggcgcggaacaggtgggcgagcagctgagaaaaatggggctgaactgatgagcgtcgccgcgattgagacgcgccgcagcatactgctcaccggctggtgtttactggcagcgatcgtgctggcgctggtgatcgctgtgggcgtcagcgtcggcgagctggccatcccgctgcagaatgtcttttatgctatcagcaacagaaccggcttaaccgctgagccgctcaaccgtatctatgagagcgtaatctgggatttccgcctcagccgcgcgctggtcgccgcctgctgcggcgccggcctcgctatctgcggcgtcgtgctgcaaagcctgctgaaaaatgccctcgccgaaccctacgtcctcggcgtctccgccggggcctccaccggcgcggtgtcgatcgtggtgctgggccttggcgctggcgcgatttccctctcggcaggcgcctttgccggggccttcgccgccttcgcctttgtcgccttgctgactaacggcgcgcgcggcggcaatgagcgtaccattctggcgggcgttgccgcctcgcagttatttaacgccatcacggcttacaccatcagcacctccgccagcgcgcagcaggcgcgcgatgtgatgttctggctgctgggcagcttcagcggcgtccgctggcccgaattccagctggtcattgtggtggtgctcgcgggtctggcggtctgcctgtggtatgcccgggcgctggacgcgttcaccttcggcgacgatgccgccgcctcgctggggattgctgtgccgcgcgtgcgcctgatcctcttcaccactgcggcgctgatcaccgccaccatcgtcagcatggccggctcaatcggctttgttggcctggtggtgccgcacgtgatgcgtttcttctttggcccgctgcaccgaacgttgctgatcgccagcgcgctggcaggggcgatattgatggtactggcggacattgcgtcgcgcctgctgattgccccgcaaagtctgcccgttggggtagtaaccgccctggttggggtgcctttctttgccgtgattatctaccgctcaaggaataagtgatgagtatttgcgctgaaaatatcacctggaaggcaggcaaaaaggtcatcgtcaataatgtctcgctgcgggtgccgcgcggcgaaacggtcggactgctggggcccaacggctgcggcaaatcctcgctgctgcgcgttctggcgggcctgcgccgcccggatgcaggtcgcgtcaccctcgacggccaggatatcgcccggatggcgaaaaagcagctcgcccgccgcgtggctttcgtcgagcaacacggcatgaccgaggccaatatgcaggtgcgcgacgtcgtgcgcctgggacgcattccccaccactctccgttctcaaactggagcgctcaggatgacgaggcgattgccgccgcgctgcagcgggtagcgatgctggagaaaagcgaacagggatggttaagcctctccggcggcgagcggcagcgggtgcatatcgcccgcgcgctggcgcagagcccgagcgaaatcctgctggatgagccgaccaaccatctggatatacaccatcagatgcagttaatgcagttgatcagcgagctgccggtaaccagcattgtggccattcacgatcttaaccatgccgcgatgttctgcgattcgctgatcgtgatgcagcaggggcagatcctcgccagcgggacgccggaggagattttgtccgaagggctgctgtgggacgttttccgggtgaaaaccaaaatcgagatctccccttaccacggcaaaaagcacattcatttcatcgtttaggttgggcggatatgcctcttttctccctgcgccctgcggcaaccctctggcctccggtgttactgggaagccagttcgtttttaatattggcttttacgcggtcgttcctttcctcgccctcttcctgcgcgacgacatgctgctctcaggcggacttatcggcctgatcctcgggctgcgtaccttctcccaacagggcatgtttatcctcggcgggacgctggccgaccgctatggcgctaaggcgatcattctcgccggctgcgtcgttcgcgtcgccggttttctcctgctggcgtgcggggcgtcgctgtggcccattatcctcggcgcctgcctgaccggcgtcggcggcgccctgttctccccgtcgatagaggccctgctggcgcgggccggcacccacagccaggccaacgggaaacgcagccgcgccgagtggtttgcgctgtttgcggtatgcggtgaactgggagcggtgatcggcccggtggccggaggcgtgctgagcgggatcggctttcggcatatcgccctcgccggcgcgggaatatttcttctggcgctggcggtgctctttttctgtctgcccgccgacgggcacacgacaacaacgcgcagacgagtcccatggtggacgcctttgcgccagccgcgctttgtcgcgtttattctcgcctacagctcatggctgttgagctacaaccaactgtacctcgccctgccggtggagatccaacgttccggcggccgcgagcaggatctggcgccgctctttatgctggcctcgctgttgattatcaccctccagctccctctcgcccgcttcgcccggcgaatgggcgccgtgcgcatcctgccggtgggctttctgctgctgtcggcttcctttgccagcgtggcgttattcgccgccgccccacccgccgaaggttggctgcggttaatgccggcggctggttttgtcacgctgctcaccctcggccagatgctgttagtgcccgcagccaaggatctgatcccgctgttcgccgaggagtcgacgctgggcgcccactacggagcgctcgccaccgcaggagggtgcgcggtgttagccgggaatttactgctcggtcatttacttgaccaggcgctcattccgtcgccgcaggcggtttatccctggcttctgctggcgctgtttccgctgtgcagcgccgtcgccctgcgggcgatctgtcgcccgctggcggcaacatgacgcagagcgggtaacagcccgctctggaagtgaaccgacgataaagtacaccgcctggggaagataacgggcgcgccccgccttattttgccgccagctcgcgacgaataatctcggcgccggcgctcagggcgtgcagtttgccggtcgcgacatggcgcggcagcggcgccataccgcagttggtggacgggtagagtttgtcggcatcgacgaacgccagcgccttgcgcagggttccagccacttcttccggggtttcgatagcatggctggcgacatcgatcgccccgaccatcacctttttaccgcggatcaactccagcagatccatcggcacgcgcgagttgtggcactcgagagagataatatcaagggacgatttctgcagctgcgggaaagcctcttcatactgtcgccactcggagcccagcgtctttttccagtcggtattggccttgatgccatagccgtagcagatatgcaccgctgtctcacacttcagcccttcggtggctcgttctaaggcggcgatcccccagtcgttgacctcatcgaagaagacgttaaaggccggctcatcgaactgaataatatcaacccccgcagcctctaactctttcgcttcctgattgaggattttggcaaattcccaggccagcttttcccggcttttatagtggttgtcatacagcgtgtcgatcatggtcatcgggcccggaagcgcccatttgatcggctgactggtgagctgccgcagatagcgagcgtcctccacgaagaccggtttctggcgctccacggcgcccaccaccgttggaacactggcctcatagcggttacgaattttcacgatctcgcgtttggcaaaatccaccccgctgaggtgctcgatgaaggtggtgacaaagtgctgccgcgtttgctcgccgtcgctgacaatatcgatcccggcccgcagctggtcgtcgagggataaccgcaaggcgtcgcgcttgccggccagtaattcttcgctggacagtttccagggcgaccacagggtctctggctgcgccagccaggaaggtttcggtaaactgccggcggtcgatgtcggaagccatgttttcatagtcattagccttttatatgggtttagcaaagcgcgaaattagcagaccattgctcaagcaacgtcttgtgcgggttgataaaatgttgttgtgtaaatttcccctgctcaatcgccaacaggctgcgctcttcccggtcatagacgatttttgttaatgaatgatccaggtggctgagattgggctgatagtattgccccgccggggagttggcattgtagatctccgggcgatatattttctgaaacgtctccatcgtgctgatggtggcgatcagttccaggctggtgtaatcgctgagcagatcgccggtaaaataaaaggccaacggcgcgacgctgttttttggcataaaatagcgtacctgcagccccattttgctgaaatagcgctcggtcagcgagacgccttcctgagcatattcaatgccgaggaccggatgttcgttaccggtgcgatggtaaacatctttactggagacgctcaggcaaatcaccggcgccttgctgaagttggcgcgccaggcgctggattgcacaaaatccttaaagatattgccgtgcagctcgccaaagttttccggtacgctgaagcgactctggtccttattatgttccagaagcagtacgctaaaatcgtaatcccgcacataggaggagaagttattgccgacgataccggcatgacgctccccgctctttttatcgacaatatgcgtttgcaggatctcaatcaccgggaagctggcgctatcctgagcaatattcatctcgacagaaataatatccagttccaccgcatagcgatcgttatggggattatcccagtgggccaggctattaaaacggttattcatcatgattaacgtattgcgcagattttcctcacggttcacccctctggctaaattagcgaagttggtggtaatacgcgtattttccgcagggttataattttcatcaaaccgggtgcgcttaatcgtataggtaaatttattattcatggcgattgtccatcctgatggcgggcataaagcgaacccggcggaatactctccaccagcctggcgacgcggagtcaggccgggcgcgcttcaaccggtaaatgttgttgattcgttaatgaacctatttttgccagagtcagcgctggagggaaagcgacttaaattcaatgcaacatgagccatcctcatgttgctccaggcggtggccgatggccgacgcaggccgacgcaggccgacgcaggccgacaatattagtcaataaacgtttgttcaatggaagtaggcagggtacactctttaaccactataagatgggcttttacctgcccgccgtacccgtttagctggagcttttgtcgtacagaatgattgttgatatcagtattatgtcgatgtgcatggccgtactgctgattatgagcgtactgctgaattaagaggctcccgaacgcaatgacactcgctctcatctgacctccacattcgcgaggaaaaaagaagattcagaggattcgcgccgcctgggattgttcctcctgccggcaccctctactcttttgggacttgcttattgaggaatcccggatgaaaaaagctctgcttgccctgttcgctatcgccaccgttaccgccgccagcgcctttgcggctgataaaaccgacgtcccggcgcctgtcgtcgataacggagtccgcccgccgatggagagggatcgtggccccctgccgccgttcccgccgcagcttctgccgcacagaccggtgctgttttcagccacggtagcaaccgatacgccagcggaaaccattaacaaactgaccgcgctgatccccgccggccaggcgaaacactacgaagtgcacgttgaggtggtgccggttggcgagggaaccgacagacaatagcccaggggatatctacgctgtcatctgtcagcaataaaaaagctgccgcatatcgcggcagcttttatgtacttatttacagctgagcagctgaaaattagctacgcactttccggtagataaacagtaccaccagcgcaccgataaccgctaccacgaagctgccgaaattaaacccatcgaccttgccaaaaccaaacagggtactgatccagccgccgaccacggcgccgatgatccccaaaataacggtcacgataaatccgccgccatcttttcccggcataatccacttggctaaaataccggcaataagtccaaaaatgatccaggaaagaatacccatggttaaccgtcctcttgttacctttaagcatttagtattgaaaagagtagcataaataacgagagtggatcggtaataatataaatattagataattccctgccgacgcccggctgatcttgtgacaacatctctggctctggcaggccggctctcgcttattaccttaaaaaaagggaggctattcgcctcccgccatgcggcttatattaccgcggtggttagtcgtgatgaacaacataaccgcgactgttcgtcgaagatttcaatttgccagacctgatggcgcgtcccgacgtgcagcgctttgcagacgccgcgcacccggcccccgcgcgccgaacggatgtggttggcgttaacctccagccccaccaccttttgttcgccttcgctgcacagatagcctgccaccgaccccagggtctccgccagcaccaccgacgctccgccgtgcagcaggccaaacggctgctgtgtgcggctatcgaccggcatagtggcctccagcgtatcgtcggtaacggtctcaaagcgaatatcaagcagccctaccatgttcccctcaccgagccggttgagctgctccagcgtggcctgacgtttccaaatcatccgattatctccagtaacgcctgcagcgggtggcgaacgccgctgccttcaatacgcttcacctgactgcggcaggagtagcccgtcaccagacagcggtttcgcggcagccgctgcatcgcctgctgccaggagagcgcgtaaatggccaacgagttggcgtggtttttcacttcatgaccataggtgccagccatcccgcaacacccaacgctgacgttttccagcttcgcgccgaagtgggcaaaaatatctgcccactgctttgtcgccgccggtagcgcggtcacttcggtacagtgaccgaacaggtaccagggctcaccgcccagatcgggacgggcgtcgctggttagggccttcggcaaccactcatggactaacagcacctggaaatcgccgcgcttgtcgccgagcgtctgcttgtactcatcgcggtagcagagcaccagcgccggatcgacgcccaccagcggcatgcccagctgcgccacgcggttgaggaagtccgccgtcttctgcgcggtgcgcgcgaagcgggtgaggaagcctttgatatgctgcgccttgccgttcggcgagaacggcaggagcaccggctgatagcctaaggcctcgaccagacggataaagtcggccaccacctgggcgtcgtagtagctggtgaagggatcctgcaccaccagcaccatcttcgctttctgctcggcgctcagcgcttcgagctgctcaagggtcatattggcggaacggtggccggccatctgctgcttcagcgacggcgccgagagcagcggcagatcgaccatcccgatatgcttctccgacagctttttcagccaaggctggttaataaaaaagttaaaggtcttcggcgcctgcgccatcagcggcgcataagattcgaccgaggccaccagatgatcgcgcaccggccgcagatagcggctgtggtacagctgcaggaagcgcgagcggaactcgggaacatcgattttgatcgggcactgggtcgaacaggctttacaggccagacagccggacatcgcctctttgacctcatgcgagaagtcatattcgcctttgcgcgcatgccagctgttgcgcgtgcgcgccaccagcgagcgcaggctgacgccctgctccggcagcgccttctccagctggttgggatcgacgccgcggtcggccagcaggcgcagccattcccgcaccagcgtcgcccgccctttcggcgagtggatgcgctggttgctgactttcatcgacggacacatcgggctcttgacgtcaaagttgaagcacagcccgttgccattacactccatcgccccacgccagctgctgcgcaccgcgatggggatctgccgatcccaggtgccgcgcttcgccgcatcgactttcatcatcggcgcgtcgataccttccggaggacagattttccccggattcaggcggttatcgggatcgaagaccgctttgatcttgcgcagctcggcatacagcgtctcgccaaagaaggccgggctgtactccgcgcggaaccctttgccatgttcgccccacagcaggccgccatacttcgccgtcagcgctaccacctcgtcggagatctgcttcatcagcacctcctgctgcggatcgcacatgtccagcgccgggcgcacgtgcagcaccccggcatcaacgtggccaaacatgccgtagctcaggccgtggctgtcgagcagcgcgcggaactcgacgatgtaatccgccagatgttcgggcggtacgcaggtgtcctcggcgaaaggaataggcttggcggcgcctttggcattacccaacaggccgacggccttcttgcgcatggcatagatgcgctccacgccttcaagatcgtgacagacctgccagccaatgacgcccgcctcgctggcggccatcagctcgtccagccgctggcacagggtagtaacctgctggtcaatcagcgccgcgtcatcgccggcgaattcgacgatattgagcccgagcatctctttatccggtacgtcggtgatcagttcgcttaccgagtgccagacgatatcctcgcgcgccagattgagaactttagaatcgacggtctccaccgacagggctttcgcttcgaccataaagggcgcattgcgcagcgcagagtcgaaggagtcatatttgacgttgaccagacggcgcaccttcggcaggcgggtgatatccagccgcgcttcggtaataaacgccagcgtcccttccgaaccggttaaaatacgggtcaggtcgaactcgctcatctcatcgttaaagacgtgacgcagatcgtatccggtgaggaagcggttgagtttgggaaacttatcaatgatcaggtcacgctgcgccttgcagcgctggtagaccgtgttgtagatccggccaaccgtcgagggggtattgcccagcgtctccgccagcgccaccggcaccgcctgggtatcgaggatatccccgcccatcagcaccgcccgcaggccgagcacgtgatccgacgttttgccgtacaccagcgatccctggccggacgcgtcggtgttaatcatcccccccagcgtggcgcggttgctggtggatagctcaggcgcaaagaagtaaccatagggtttaagaaactggttcagctgatctttgatgaccccggcttcaacgcgcacccagccctcttcggggttgatttcgataatgcggttcatatagcgggacatatcgacgataatcccgctgttcagcgcctggccgttagtgccggtgccgccgccacgcggtgtgaagatcagcgatttaaaacgcggttcggcggcgacgcgcgccagcaacgccacgtccgccgtggatcgaggaaaaatgaccgcatccggcagcagctgatagacgctgttgtcggtggccatcgttagcctgtcggcatagctggtggcggtatcgccggtaaaaccctgttgctccagtacctgtaaaaaattcagcaccagttgaactacccctggcgcctgagaaatttgtgggatcatcacgcttgaccctgcctgactatgttgtgtttgaaaatattgtgttggtgctaactaaacgtttgcgtagcgcattcaactttttatcacatttttttcatatgcgcccacgtgttttctgtgcaaaatcagcccggcaaaattattgatattattatcagtatatggatttacgcggcgccagctgtttggcgcgactggaaaggtaaaatttctctatgattaatccccatcagcctcgggacattccgcaaatactgctgtcggtgctgttcctggccctgattatcatatcctgcctgtgggttgtgcagccgtttattctgtccttcgcctgggccggtacggtggtgatcgccacctggccggtgctgctgcgtctgcagcgtgtgctgttcggcaaacgactgctggcggtgctggcgatgaccctgttgctgtttctgctattcgttattcctatcgctctgctggtcaacagcctggtggataacagcgttccgctgatcaaactcatcagcagcggaaatgtgacgctgccggatttcgcctggctcaacagcgtaccgctggtcggcgataaactgtactccgcctggcacggtctgctggatatgggcggctcggcgattatggccaaggttcgtccctatattggcaccaccaccagctggtttgtcggtcaggcggcgcacatcggcaagctgctggtctactgcggtttgatgctgctgttcagcgcgctgctctactggcgcggcgagcaggtggcctacggtttccgctacttcgccacgcgcctcgcggccaaacgcggcgacgccgcggtgctgctggccggccaggccgtgcgcgccgtggcgctgggcgtggtggtcacggccctcactcaggcggtactgggcgggattggccttgccgtctccggcgtgccctacgcggctctgctgaccgtggtgatgatctttacctgtctggtccagctcggccctttactggttttggtgccgtcgattatctggctttactggagcggggacaccacctggggcaccgtgctgctggtctggagctgcgtagtcggcaccatggacaacgttattcgtccggtgctcatccgcatgggcgccgacctgccaatgatccttatcctcaccggcgtcattggcggcctgatcgccttcggcatgatcggcctgtttatcggtccggtgctgctggccgtctcctggcggctgtatgacgcctgggtgcatgaggtgccgccgccgccgaaagaccctgacgtcgtccttgaagagctcagtgagctggaggccggtcgcaagtaatgcctggcaggcggggagacccgcctgtttctttgcccgcatattgttaagaaaaatttattgatcgccggcaatgcgctggccccgcgcgcccttcacctcgctttcctcccccggtccttcacaacaatttaactattgagaggaatctgatcgacggcaaaggccccgctgcctactattagctcacggttataaatcaacaccttgatttataagcatggaaatcccctgagtgaaacaacgaattgctgtgtgtagtctttgcccatctcccacgatgggcttttttttgtcctgcgcatcacgacaccagatagcctgacaccggtaaaaaaaatccccggcatcgctgccggggatcggtcctgtcagggcgaacttattttttcagttccgccagacctaaccaggtttgtaccacggtatccgggttcagggacaagctatcaatcccctcttccatcagccaggcggcgaaatcctcatggtcagacggcccctggccgcagatgccgacgtatttaccctgtttcttcgccgcgcggatggccatcgacagcagggctttcaccgcgtcgttgcgttcatcaaacagctcagaaaccacaccggaatcgcgatccagaccgagcgccagttgggtcatgtcgttcgaaccgatggagaagccgtcgaagtactcgaggaactgctccgccagcaaggcgttcgacgggatctcgcacatcataatgatcttcagcccgttctcgccgcgcttcagcccctgacgctccagctcttcgaccaccgctttcgcctgggcgacggtacggacgaacgggaccatcacttcaacgttggtcagtcccatatcgttacgcacgcgcttcatcgcttcgcactccagggcgaagcagtcgcggaagctttcggaaacgtagcgtccggcgccgcggaagccgagcatcgggttctcttcttccggctcatagcgctcgccgcccaccaggttggcgtattcgttcgatttgaagtccgacagacgcacgatcacccgtttcggatagaaagcggcgccgagggtggcgatcccttcggtcaggcggccaacgtagaactctctcggcgaatcgtagcctttcatcagctcgcggatttcgttctgcaggcccggctcctggtcgtcaaactccagcagcgcgcgcggatgaacgccaatcatacggttgatgataaattccagccgcgccagaccgacgccttcgttcggcaggcaggcgaagtcgaacgcgcgatccgggttgccgacgttcatcatcaccttcagcggcagatccggcatgtcgccgacgctggagctcttgacgctgaagtcgagcagctcggcgtagacatagccggtgtcgccttcggcgcaggagacggtgacattctgattttcctgaatgcgatcggtagcatcaccgcagccgaccaccgccgggatccccagctcacgggcgataatcgccgcgtgacaggtacgcccgccgcggttggtgacaatcgccgaggcttttttcatgatcggttcccagtccgggtcggtcatgtcggtaaccagtacgtcgcctggctcaatgcgattcatctcgctgatatcgtggatcaccttgaccggaccggcgccaatgcggtggccgatggcgcgcccttcggcgatgatctgcccctgagcgtggagggtataacgctccatcacctggccgcgggaacgcacggtttcaggacgcgcctggacgataaatagcttaccggtgtggccatctttcgcccactcgatatccatcggacggccgtagtgcttctcgatctgcaccgcctgcttcgccagctcctgcacttcctcgttgcttaacgagaaaatatcgcgctgcgcctgcggcacatcttcgatacgcacctgtttaccgtgctcctgggtcggcgcgtaaaccatacggatctttttcgaccccatggtgcggcgcacgatcgccggacggccagcggccagcgtcggtttgtggacgtagaattcgtccgggttcaccgcgccctgcaccaccatctcgcccaaaccccatgcagaggtgataaacaccacctggtcaaagccggattcggtatcgatggagaacatgacgccggaggaggccagatcggagcggaccatcctctgcaccccggcggagagcgccacgccgcggtgatcgtaaccctgatgcacgcggtaggagattgcgcgatcgttaaacagcgaagcaaacacgtgcttcacggcaacgagcacggcgtcaaagccctgcacgttgaggaatgtctcttgctgcccggcgaaggaggcgtccggcatatcttccgcggtggcggaagagcgcacggcgaatgaggcctcggcgtcatcggcggacagcaggtcataagcatcgcgaatcgcgttttccagttcgctctggaagggggtatcgatgatccactgtcggatctgcgcgcccgctttcgctaatgcggaaacgtcgtcaatgtcggtttcatccagcagcgcatagatgcgctggttaacaccgctttggtcaaggaactgattgaaagcatcagcggtggtggcaaacccgttaggtacggaaacacccataccggacagattcgtaatcatttcaccaagggaggcatttttgcccccaactctgtctacatcattcatgccgagttggttataccaaagcaccagcggtgacgagccattgttggacatcgagacaatccttttgtgatttaataccagtgaaaaaaatttcacgatcgactgcaggattatcctgacatatttatgaagctgaaaaaaacggtgaatcgttcaagcaaattattttttcatttttcggactgttcccccgatattgctaactttatgatttttaggaattctgatggaaaacgctggaaataacggcgacaaaaagaaaatgaaccacccttttcataaaaaacaaaaatagcgtttcaattttaacaagagacaaatcaaacagggatatgcttaaatttaatatccgctttcaggcaattaaactcattataccggatggtcaaaatggaaagtgctgtagatcgccacgtattttatatttctgacggtaccgccatcacggcggaggtgctggggcatgccgtgatgtcgcaattcccggtcgccatcagcagcgtaaccctgccgtttgtggaaaacatcagccgcgcgcgggcggtgaaggagcagatcgacgccatctatcagcaaacgggtattcgcccgctggtgttctactccatcgtcatcccggaaatacgcgacattattctgcaaagtgaaggcttttgtcaggatatcgtgcaggcgctggtggccccgctgcagcaggagctcaacctcgacccgacgccggtggcccaccgtacccacggcctcaaccccggcaatctgattaaatacgatgcgcgtatcgccgccatcgattataccctcgcccatgacgatggcatctcgctgcgcaaccttgaccaggcgcaggtgatcctcctcggcgtctcgcgctgcggcaaaacacccaccagtctgtatctcgccatgcagtacggtattcgcgccgccaactatccgtttatcgccgacgatatggacaatctggtgctgccggcctcgctgaaacccctgcagcataagatgttcggcctgaccatcaatccggagcgtctggcggcgatccgcgaggagcgccgggagaacagccgctacgcctccctgcgccagtgtcggatggaagtgaccgaagtggaggccctgtatcgcaagaataaaatcccctgcctgaacagcaccaactattccgttgaggaaatagcgacaaaaatcatggacatcatggggctgaatcgcagaatgtactaatacactagtacattattaaaaatttgtttatgctatcacccgtggcctatacaggatcatgccctgctcttgcaataagcagggattggtttatcgtgatgcgcatcacttcccggcattttcgccgcggaagaaacagatttttgagaccccaatgaataaaacagacgaattgcgtaccgcgcgcattgagagcctggtaacgcccgcggagctggcccagcgccatcccgtgacggccgacgtggctgcccacgtctcggcctcccgccgccgaattgaaaaaatcctcaacggcgaagaccgccgactgctggtgattatcggcccctgctccattcacgacaccgacgcggcgctggagtatgcccgccgcctgcagggcatgcgcgagcgctaccagccgcagctggagatcgtgatgcgcacctactttgaaaaaccgcgtaccgtggtgggctggaaaggcttaatctccgatcccgacctcaacggcagctaccgggtcaaccacggaattgagctggcgcggcgcctgctgctgcaggttaatgagctgggggtaccgacggccaccgagtttctcgatatggtgaccggtcagtttatcgccgatctcatcagctggggggccatcggggcgcgcaccactgaaagccagatccaccgtgaaatggcctcagcgctctcctgcccggttggatttaaaaacggcaccgacggcaatacgcgcatcgcggtggacgccatccgcgcctcccgcgccagccatatgttcctctccccggacaagcaggggcagatgacgatttaccagaccagcggcaatccgtatgggcatattattatgcgcggcggcaaacggccaaactatcacgccgaggatatcgccgccgccggcgaggcgctacgtgaattcgatctgccggaacagctggtcgttgatttcagccatggcaactgccagaagcagcaccgccgtcagctggaggtgtgcgccgatatctgtcagcaaattcgcgcgggctccaccgccatcgccgggattatggccgaaagcttcctgcaggaaggcactcagaaagtggtccccggccagccgttgacctggggccagtcgatcaccgacccctgcctgagctgggaagacagcgaaagattattgagcgagctggctgcggccaccgccacccgcctgtaaccgctccgcccgccgcgcctgcggcgggcaattctcttcgctgactcccctaccaaatccggtaacacgataaataacgcttgccgtcaaaaacaacattattgataatgattatcattgttgccttgatttttattctgagagctatgacgcgtatggataacactgccacagctgaaaaaccaaaagacaatgccccttatcccgtggcgacggacagagagatcagcagtcgggttctgttaggcagcgaaggacgagtagtgattgagcatggcggccagcgctatctgctgcgccagacccacgccgggaagttaattctgaccaagtaagcgccccgctgaacgcggggcgaggcaagttagctcgagcagctcacttccagacgtttcccccagtccggcgggcggcggacgtagtcgtcctcgcgatcggtaaaggggtctgccagcgcggcatgcaggcgctccagctcgcccatatcgcccgcctcagcctgctcgatcgcccgctgcgccagccagttacgtaacaccagcgccggattcacgccctgcatcctctgctggcgctgcgcgtcgtccacctgttcatcacgcagccgcgcacgatacccggcaaaccagctgtcaaaggccgcgcggtcgataaactcatcgcgcagcggcgatgcggcgctgagctgttcgctgtggctcagcaggcggaacgtccgggtatagtcgctcttctcgcggatcatcagggcaaacagcccgtccagcaggtcgttatcccctttctgctggctgaacaggccgagtttatcgcgcatccgctggccataagcggtcagcaaggcgtgctgatactcatccagcgccgcgtttaacgcttcagcgctgataaacggcgacagcgattgggcgagacgctgcagattccacagccccaccgccggctggttttcaaaactgtagcgcccctgataatcggagtggttgcagatgaagtccggttggaaatcgtcaaggaagccatacgggccgtagtcgatggtcagaccgagaatcgacatgttgtcggtattcatcaccccatgggcaaagcccacggtttgccagctggcgatagtctgcgcggtacgcatgacaatgtcacggaaccataacaggtacttatccgcctcatcctgcagctgcggccagtggtggcgaataacatagtcggccagttgctggaccttctgcggctcacggcgatagtaaaaatgttcgaaatggccgaagcggacatggctctcggccacccgcatcagcatcgcgccgggctccacgcgctcgcggtagaccggggtatcgctggtcaccatcgccagggcgcgcgtcgtcgggatccccagagcgtgcatcgcctccgacgccagactttcccggatcgtcgagcgcagcacggcgcggccgtcccccatccgcgaataaggagtcaggccggcgcctttcagatgccagtcgtaacggcggccatccgccagctgctgctcgccgagcaggatcccgcgtccgtcgcccagctggccggcccaggcgccaaactgatggccgctatatacctgcgccagcggcgacatgcccggaagcagcgcttcgccgccccagacaccggccccgctttcaggcgcaaacagggcgtcgggcacccccagctgttgcgccagcgaggcgttgcgccagatgagtcgggcgttatccaacggcgttggtgacagggaagtgtaaaagtccggcagttcatcccgccagtgggtggtaaaagaaagggtcatggttcctcctctctccagtgtagtgcctggaacagcggattaacacgggcggagtgcagggttatcggcataaaaaagggaagcgttcgcttccctcttgcttctgaatgacgtcagattcgccgcgcctgccagaactttttgttccagtagacgttatccagcgaggaacgggtgacgccctggctggtggaggcgtgaataaactggttgtcggtatcgtagatgccaacgtgcaggccgctctcccctgagccggttttgaagaacaccagatcgccgggcagcagatcgcgcttatcgatgcgggtgccgatttccgcctgctcgcgggtttcacgcggcagctggagggcaaatttatcgcgaaacgtgcgcaccacgaagccggagcagtcaacgccgcgcggcgtcatgccgccgtagcgatacggtgcgccgcgccagctgcgcagctgctcgttcagattcgccaccaccgtgatggagtcagccagccgaggattcggcggcggtgcccgatggctgctgcagccggctaaaattaacgccgccgccaacatgaaccagaagcgcatttcagatgatccctctgtccctagtctctttatcgcaataatttagcttgtttatcaatatagtgacaagataactgcgtgctactgtgacgcgatgagcataatatgaccggccacctcaacgcgctggaacgggatcgcataggcggcggttaaattttcctcattcagcacctcggcggtctccccgcaggcgatggcttccccctggcagagcagccagctctgaccggcgtggcgcagggtatggttgagatcgtggctgctcatcaccaccgcaatccccgccgcgctcagctcgtgtaacagccgatccagcgccgcctgctgagccacatccagactgttcatcggctcatccagcagcagcagctgacccgcggaattactcaagggatcgatctgcaggatcactgccgccagccgcacgcgctgccactcgccgcccgacagctgattgaccggacggcccagcttattgtccagaccaagcctggccgcgatatcgctcagacgggcgctatcaccctgctgctgcatatgcagcgccaggtagtgccataccggcatggcgaacggcggggtctggtgttgactcagatatccgcgacggcgcgccagctccctcgccggccactcgtcaagcagccggccgttaaaatgaaccg

SEQ ID NO: 5359 - DNA, 121046 bp, Unknown
  gut microbiota DNA sequence
tatgcaccggaatacggatggtgcgcgcctggtccgcgatagagcgggtgatggcctgacggatccaccaggtggcgtaggtcgagaacttgtagccgcgacggtattcgaacttatcgaccgctttcatcagaccgatgttgccttcctgaatcaggtcgaggaactgcagaccgcggttggtgtatttcttggcgatagagataaccagacgcaggttcgcttcaaccatctctttcttcgcacgacgggctttcgcttcgccgatggacatgcgacggttgatatctttaacctgctcgatggtcaggccggtctcttcttcaatctgctgcagcttctgcaggccgcgctgcacatcttctttcacttccagcagcttctcagaccacggcttgttcattgccaccgcggcgttgaaccaggtttcgctggtttcgttgccggtgaacagggtgatgaagtttttcttcggcattttgcactgctcaacgcacagcttcatgatgatacgttcctgagtacgaacgcgatccatcatgctgcgcatgctgttgaccaggtaatcgaactgcttcggcaccaggcggaactgcttgaagacttcagacagcttcaggatctcttcctgggcggcggcatggctacgacctttggctttgatggtgtcgcgcgtcagctcgtactgggtacgcagctcggcgaatttctcacgggccagctctgggtcgatgctgttgtcgtcatcgctgttgtcgtcggcgtcttcatcttcgtcttcgtcttcgtcgtcatccatctcttcctgagacagctcggagccaacgtgggtggcggttggcgccatatcttcttcggcgttcggatcgacgaaaccggtgatcagatcggacagacgggcttcttccgcttcaacgcggtcgtactgctcaagcaggtaggtgatcgcttccggatattcggcaacggagcactgcacctgattgatgccgtcttcgatgcgtttggcgatgtcaatttcgccttcacgggtcagcagctctacggtacccatttcacgcatgtacatacgcaccgggtcggtcgtgcgcccgatttcggattccacgctggagagcacctgcgcggcggcttcggcagcatcttcatccgcggtgttttcggcaagcatcagatcatcggcatccggtgcttcttccatcacctgaatacccatgtcgttgatcatttggatgatgtcttcgatctgatcggaatcgacgatatcttccggcagatggtcattgacctcggcataggtcagatagccttgctccttaccacgttggacaagaagcttcagctgtgactgcgggttttgctccataagacggtatccacacttaattcgtttgattggtgtcggcagacgggctgtcgacatttaaagcgagggcgtacttatattattgccgctgcgcctctgcgcggctgtcgggggcttcccgatcgatactcggcacttaagccgttaaatacttttccttcacgttgttctgcgttttcttactgctttgatacaacgtgaaggatattgtctgtcatttattttttcgccagctcctggctgatggtccagagctcccggcgttcttcactgcttaaaccgtgtgtgcgatcgcgagctatcaactcttcctgtcgcagttccagcagtgaatcaaacatatggttgagcgagtcggtgaaggtttgttcagcgatgtctttatctgctatatcgtcccacatcgacagtttttcaagggttgccgcctcttttgtgccgcgatattgctctaaaagttgcccggttgtcagaccaggctgcgccagacagctcttcaccagttcgttgaacaggctcagtcccggcattttgcgcgagtccagtccctccagcggcgggactaacggcgccagatccgggttttgcaccagcagtcctatcagtatacgcatggtcgtgcgttttagctgcggtgcgggacgcggcgcgccattttccgcctgttttggcattaatcgttcaagctgcgcgtcatctaaaatgcccagcttattgcccaactcctgacgcaaatagatgcgcagcgtttcgcccgggacctgggttatcagcggcagcgccagcgtgctcagctgcgcgcgcccgtccggagtactcagatcgacctgcggcagcaggctgttaaacaagaacgtggagagcggctgagcctgctccatccgcgcctcgaacgccgctttgccctctttacgcaccagcgtatccgggtcttcgccgtcaggcagaaacataaagcgtagctggcgaccatcggtcatgtacggcagcgccgtctccagcgcgcgccaggcggcatcgcggccggcccggtcgccgtcgtagcagcagatgacgttattcgtcacccggaacagcagctggatatggtcggccgtggtcgaggtacccagcgaggccacggcataattaatgtcgtactgcgccagcgccacgacgtccatatacccttcgacaaccagcaaacgcggtggttcggggttatcctgctgcgcttcatacaggccatacagctggcggcctttatggaatatgtcggtttccggggagttcagatacttcggcagggcatcgcccagcacccgtccgccaaacccaatcacccggcctcgcttatcgcggatggggaacatcacccgttcgcggaagcggtcgtaactgcgtccctgatcgttggtgaccagcatgccggcatcaataagcgactggcggttttcctgattgccgccaaaccgttttaaaacgttatcccaacctgggggagcatagccgatggcaaagcgcgtaatcacctcgctgcttaacccccgtttcgccaggtactggcgcgcaggatcggcggcgggctgcatcagagactgttgataaaacgcattcagaccatccagtaactggtagaggttctgccgttgatggcgctctatctggctgggtccgttgcctgcttcataaggcacttcgaggttgtgcatggcggccagctcttcgaccgtttccacgaactcgagcttgtcgtagttcatcaggaagtcgatagcattgccgtgcgccccgcagccgaagcagtggtaaaactgtttttcaccgttgacggtgaaagagggggttttttcgttatggaacggacagcacgcgtgaaaatttttgccctgctttttcagctttacccgcgcatcgatcagatcgacgatgtcggttctggcaagcagatcgctaataaatacacgtggaattcgtccagccataagccccgttatttctgatgactataaacgaaaataagccgcgcattcctttcggaagcacggccttacaactacaactcggtctgaattgagagcgtcgctctcaacagattagtacagacgagtacggcgtgcgttttcgcgagccagtttcttcgcgtgacgtttcactgcagaagctttagcgcgcttacgttcggtagtcggtttttcatagaactcacgacgacgaacttccgccagaacacctgctttttcgcaggaacgcttgaagcgacgcagagctacgtcgaacggctcgttttcacgtactttaattaccggcatgtgcctctcacctttgattaattcggtttgccgctggccgcaatgccagcttatttcaaaatggtgcggaattttactgcaactactgctgctttgtaaagcaccggcgccttttttgaaagggacttttataagggtgaggagtatacacgaagagagcaccaggggtgagcaaagttttacatcgccggtcattggacctacactgcgcggtattgaagcgaggtaaaacaactcatgcgtgtactgggcattgaaacatcctgcgatgaaaccggcatcgcgatttatgacgaccagcaaggtctgttagccaaccaattgtatagtcaggtgaaactgcatgcggattacggcggcgtggtgccggagctggcatcgcgcgaccacgtgcgcaaaacggtgccgctgatccaggcggcgctgaaagaagccggtctgacggcgaaagatatcgacgccgtcgcctatacggcgggtccaggcctggtcggcgcgctgctggtcggggcgaccgttggccggtcgctagccttcgcctggaacgtgccggcgatcccggtacaccatatggaagggcatctgctggcgccgatgttggaagataatccgccggcgttcccgttcgtcgcgctgctggtttccggcggccacacccagttgattagcgtcaccggtattggtcagtatgaactgttgggcgagtcgattgacgatgcggcgggcgaagcctttgataagacggcgaagctgctgggactggattatcccggcgggccgatgctgtcgaaaatggcgtcccagggcaccgaaggccgctttgtcttcccgcggccgatgaccgaccgtccggggctggacttcagcttctccggcctgaagaccttcgccgccaacaccattcgcagcaacggcgacgatgagcaaacccgcgccgacatcgcccgggcgtttgaggatgcggtcgtcgatacactaatgattaaatgtcgccgcgcgctggagcaaaccggctttaagcgtctggtgatggcgggaggcgtgagcgccaaccgtaccctgcgggcgaagctggcggagatgatgcaaaaacgcggcggcgaggtgttctacgcccgccctgagttctgtactgacaacggcgcgatgatcgcctacgccggcatggtgcgtctgcaaaccggcgccaaagccgagctcggcgtgacggttcgcccgcgctggccgctggccgagctgcctgccgcctaacgcatcctgaaacaggccgacgtcacgtcggcctgccttcctgactactccatacttttacacagcgagcagatggctccctgatgcttgtgcgagtgcatcacgtccgggcgctcgtactcttcctcacagctaacgcattgatacacggtggtggaggcgttccccgccgcgtcatagcgcggctcggcgatgccgtcatccacctgcttaatatagtagcgcccgcgggtaaggagccccatcagcggggtcatgacaaaggcaacgaccagcgcaatcagcggcgagaacggcgccagcgtcgcccccagcagaccgaagaaggcgcagatcgacagcccggcggccagaccaaaggagaccacgcccaccgggttaacgttgtagatcatgccgcggcgatactccggctgcgccggcgccagcttgagcaagcctttattaaaggagatgtcggtcgccaccaccacgacccaggcgatagcgaagttggagtaaaagccgaggatccacgacagggcgctgaacatatcgccttccatcagcgccagggcaatcgccaggttgaccaccacaaaaataatccgtcccggatagcgtttggtggtgcgggtccaggcgctggtccacgccagcgagccggagtaggcattggtgacgttaattttgatctgcgagatcaccaccagcaccaccgccagcgtcagggccagccagccgggcaccaggttatcgaagacgctgacgaactgctgcaccggttcggtattgtgcaccgccgggaaacgggtcaacagatagaagccgaggaaggcgccgatgatctgtttgatcgcccctaacaccacccagcccggaccggcggaaaagaccgccagccaccagcttttacgattctccgcggtcttaggcggcataaagcgcaggtaatcaatttgctcgccaatctgcatgatcagcgacaggcataccccagcgccgagcatgatggcggtaatatccaccgtcgacgcgctgtttttaccggcgaaatgcaggaagccgtccaccagctgcggatctttgacaatcagccacaccaccggcaccaccatcagcaccagccacagcggcgtggtccacacctgcaggcgggtcagggctttcatgccatagaccaccagcgggagcaccatcagggtggcgatcagatatcccatccacagcgggatcccgaggcccaccagcaggccctgggccatgatcgagccttcgagggcgaagaagataaaggtgaagccggcaaaaataatgctggtgatcaccgagccgaaatagccgaagccagcgctgcgggtgatcaggtcaaggtcaatgttgtagcgcgcggcggtgatcgccagcggaatgccggtgaggaagatcaccagcgccgccaccaggatcgaatagatggcgttgctggtgccccaggccataccgatgctggcgccgatggaaaagtcggccagataggcgatgccgcccagcgcggtgaccgcgacgacgcccggaccccagcggcggaagctcagcggggcgtaacgtaaggtgtaatcttctaaggtttcccgggtaccggaagtccgcgttgtcgcgggtaattcagggttaagatccagtgatgacatagtcattccttaatggttaggcatgacttgaattagcaaaccttatgccatattgcagggcaggcgtggcgcggaggtggaggcaggatgatataaagagagagcagaggctgcaccatccggacgcgcttgcgcccggctggtgcaacaggcctatttgccaagcatgcctttgtcttcgaggaaggcgataatggtgctcaggccgtcgccctgcttcagattggtgaaggtccatgggcgatcgccgcgcatacgctgggtatcgctcgccatcacctccagcgacgcgcccacatagggggcaaggtcggttttattgatcaccaggaaatcggatttggtgatccccggtccgcctttgcgcgggatcttctccccttcggccacatcgatgacgtagatggtcagatccgccagctccgggctgaaggtggcgctcaggttatcgccgccgctttccacgaagataaggtcgaggttaccgaacttttcactcagcgcttccacggcggcgaggttcattgaggcatcttcgcggatcgccgtatgcgggcagccgccggtttccacaccgacgatgcgttcaggcgccagcgcgcccgcttcggtgaggatgcgctgatcttctttggtatagatgtcgttagtgaccaccgccagctgccaggtatcgcgcatcgctttacacagcgcttccagcagagcggttttaccggagccgaccgggccgccgacgccgacgcgcagcgggtgtttataagagttcatggcttctcctaggaacggaataatcgagagtattgggtttcatgccgggcagaggcgatggcggcgagcggggtggccgatccgatatcgccgtccggcgcggccagcgcgcggggcatctcggccgcgtagtggtcacaaagacgtaaaatcagctgctgggcggcctgctggccgaaggggaccagcttgacgccggccatcacggcgctctcaatccagctatagcccaggctgagggccatctcgggcagggcgatacgccagcgcacgccgagccaggccatcccggcgagctggctttgctggcacagggagcgccacggcggcggacagtccggctgccagtcgctcagcagacgggcaaacgccgcgccgcggttgcgctcttcctcccgcagttcacgagtttcccggcaggccagcagataggcggtccagcgctgggccgcagcgatatcgccttgttcgcaggcgcggtacaggcgggcgaacagcggcaggtcaacggtaaaaaagccttccgtcatctggcgtcgctgccagcgctcgaaggccgcgacgtccagcacccagccggcttccacagcccactccagcccctgggaccagctgtaaccccctaccggcaggttgctgctggccagctgcatcagccgcaggcgttgttccgctgtcgacatgctagtggctgtgagcgtggtggtcatgatgagcatgatgatgaccgtggctctcgctggcgtaagcgccggcttccggctcgaacggcagctggccaaaggtcaccgtcaggccgaactggcgcagcatatcgtccagcacgtgatcgtgatggtagcgcagctcgcccggcataatctgcagcggcacgtgacggttgccgaggtggtagcaggccttcgccagcataaaaggatcgtcgcagcgcactaccgacaccccttcatcagcggcaatcacctgcacaaactcggtgccttcttcgttgctgagcacatcgccgccgcgcagcagcaggccgcggggcagcagcaggccggcttcccggccatcgttgagggtgaccttaacccggcttttgacgcgaacatcaatcggcagcgtaacgctggcggtcgcggcggcggggatctccagacgttgagttaaataaagcatccgctctccttaaaacagaaaatatcgttgcgccatcggcagaacgtctgccggctcgctggtgataagttcgccatccacccgcacctcataggtctgggcgtcgacggtgatgttaggctgcaggctgttgtgcaccatgtcggctttctgcaccgtacggcagcctttcaccacggcgatcgcgctgcgcaggttcagccgctcggcaacgccattggctgccgccgcctgcgacaggaaggtgaggcggcagtgatggcgggcgctgcccagcgcgccaaacatcgggcggtagtgcaccggctgcggggtcggaatagaggcattgatatcgcccatcggcgcgatggcgatcatgccgcctttgatcacggtggccggtttcacgccgaagaaggctggtgaccagaccacgaggtcagccagcttacccacctcaatggatccgacttcgtgtgcgatgccgtgggtcagcgccgggttgatggtgtatttggcgatgtagcgcttcacgcggaagttgtcgttatccccggtctcctccgccagcgctccgcgctgcaccttcatgcgatgcgccacctgccaggtgcggagaatcacttccccgacgcggcccatggcctgcgaatcggaggaggtgagcgagaaggcgccgagatcgtgcagcacgtcttccgcagcgatggtttcccggcgaatgcgcgactcggcaaaggccacgtcctcagcgatgtccgggtccagatggtggcagaccatcagcatatcgagatgttcatcgatggtgttgagggtgtagggcagcgttgggttggtggacgacggcaaaatgttcgggtgggcgcaggcggtgatgatgtctggcgcatggccgccgccggccccttcggtatggaaggtgtggatggtgcgcccgccgatggcggcgagggtgtcttccacaaaaccggattcattcagggtgtcgctgtgcagggcgacctggatgtccatttcatcggcgacggttaacgcacaatcgatcgccgccggggtggcgccccagtcctcatggatcttcaggccaataacgcccgccgccacctgctcgcgcagggcatccggctgagaaacgttgcccttgcccagcaggccgatattgaccggcaggctgtcggccgcctgcagcatgcgtgagatataccacgggcccggggtgcaggtggtggcatgggtgcccgcggccgggccggtgccgccgccgaccatggtggtcacgccggagaccagcgcctcttccgcctgctgcggacagatccagtgaatatgggtatcgatcccgccggcggtgacaatttttccttcggcggcaatcacttccgtcgaggcaccgatggggatggtgacgttgggctggatgtcggggttaccggctttgccgatggcgaagatccggccgtccttcacgccgatatcggccttaacgatcccccagtgatcgacgatcaacgcgttggtgagcaccaggtcgacacagtcggcggccagcatctgcccctggcccatgccgtcgcggatcactttgccgccgccgaatttgacctcttccccgtaggtggtcagatcgtcctccacctcgatccacagctcggtatccgccaggcgcaccttgtcgccgacggtggggccgaacatatcggcataggcctggcgtgaaatattactcatcgtttacctccagagggcccatgacctcgccgcggaagccgaagacggcgcggtgaccggcgaaggccaccagctcgacctcgcgtttctggccgggttcaaagcgtaccgccgtgcccgccgggatattcaggcgatagccggcggcctgctgacggtcgaacttcagcgccgggttaacctcggcgaaatggtagtgcgaaccgacctgaatcggccgatcgccgtggttctcaacgaccacgcgacaggttgcccggccggtattcagggctatctgaccgggcttaacgtgatattcaccggggatcatggcgctacctcagataatcgggttgtgaacggtgaccagcttcgagccgtccgggaaggtggcttcgacctggatatccgggatcatttccgggacgccctccatcacctgctcgcgggtcaggacatgacggccttcctccatcagcgaggccacgcttttgccgtcccgagcgccttccataataaaggcgctgatcagggccacggactccggatagttgagcttcaggccgcgggccaggcgacgctccgccaccagcgcggcggtaaacagcaacagcttgtctttttctcggggggtcagttccataacgttctcttaagtcagccagattcggggaagtacgggagatttaccggtgagatgagggcgcagaaactgccatacgtcgcgcatcacccgctggcaaatcagattatcgtcactgaggaaacgcaccgtcagcaggcggtcggtcaggctggcgccggcgtagaggccgagcggcgccagcgcgtcgcgcaccccgtcgagcagggcatcggtagccggatagcacagcaaagtgccgacccagggacgttcggcgacgctggagagctctccctcctgcagctgcaggcgctcgaccagcagcggctcatcgtccacccatacctccagccggttgctgagggtgccgtggctgaaggtttcgccaatcaccgggcggccaaggcagagcagatcccaggccagcagcctgctggaggcgcaaagatgaaaggtagtaaacagccgggcattcgccccgggaaagaagatggcatcctgcgggagccactccagggtcgcctgcggggcaagggtcaactgctggcgaactagcgcttgcgcgccgctgctgcggtaaaacttgctggcgccaggcatggttatcagcgtatggcagccgggggcaaggtgcgcgctaattgtcagctcatcaccgccgacgatgccgccgggcgggtgaagcagatagaggtgacaggtctcttcttccgggtaaaacgggcgctggacggtcagcgggccgacgtgttgggcgctggcgagaacggtcttgccgccggcctggtgaaagcggagatccagcgtagcctgccagccttttttgagtggtggtaacacggtgccgtgcaatgttgcgcccctgcaaaatcaagataaaacagcagcaatgagtattgatcggcgggagtttatcccggtcatacgaaacgcttatgtcatccgtaacccggagcgtcgcgacgggcgcgaggggaaagcggcataaccgctccggattattcacccggataatctttgccgtcaatatcctgatccgcagcctgggcgcggcggaaaaggcggcggatcgggttgcgctgcgccgccagccgccagcgcaacttttgcctttccatgctgctaacgtattgttacaaaagggggaggcggcgatgatcgcctttgatggcgaggaggcgtaaaagggcggatgaaaggcgcgattagcgcaggggagttccccggctggcggagccgggaggggagattacttctgctctggcgtttttttcttcttcacgcgggtccagattttgctctcctggcggcgccacagacgctgaatgttgtcgtgatggcgcaggaggatcaggcaggagagcatcgacaccggaaaggtgtactgcggtttgaaccaccagacgtagaacggggcgatcagcgcgctgacgatagcgcccagggaagagtaaccgctgagcaggatggtcagcagccaggtcccggccatcaccccggtcagatcgagcccgatgggggcgatagcgccgaaggccgtggcgacgcctttaccgccgcggaaatgaaagaagactggccagatatggcccacgcaggcggcaatcgccactaaccccagccagaacggcgtaaggcccagcgcccaggcgccccacaccgggagcatgcccttcagtacatcaaaaataagtaccgctacggccgccccttttccgccaattcgtagtacgttagtggccccggggttgcctgagccgctgtcgcgtgggtcgggcaggccagcaaggcgacataccagaatggcgctggaaatggagccgcagaggtaggcgaggagtaccagtccaggcgcgattgcactcataacgctgttccgttttgaaaatgtcgttgtattctctgcatctgtggataatacgcataattcgccggaagtggtatccggtttagctaaaaagcaggcagggcgtgatggatattgtatttatagagcaactttcggtaatcaccaccatcggtgtttatgactgggaacaaaccattgagcagaagctggtgttcgatatcgaaattgcatgggataaccgcaaggcggccgccagcgatgatgtcagcgattgcctcagctatgctgatatcagcgagcgcgtgatcgcgcatgtggagggggggaaatttgcgttagtggagcgggtggcggaagaggtggccgacctgctgctggaaacattccagtcgccatgggtgcgcataaaagtcagcaaacctggcgccgtggctcgcgcggcaaacgtcggggtgattattgaacgtggccttaatctgaaacaaaacttttcaggtcatacttgttaaacaaattgcgtttataccggtcatagcatccggtcatcaggcaattttactggcgatgtccttccagaacggtggacgaatccgtgtgtacttactgtacgctgcggattacgcgcgctctggcagccgggttgtgcctgttgaacgataccgtgttcctggtttttttcattttacttttttaaagggtttaattggatgagcgatatacactcgctgctggtggcggcaatattgggtgtggttgagggtttgacagagtttttacctgtttccagtaccggtcatatgattattgttggtcacctgctggggtttgaaggtgataccgcaaatacctttgaagtggtgattcagttaggttcgatactcgccgtggtggtgatgttctggcgtcgcctgttcggcctgatcggcatccatttcgggaaaccgccggcgcatgaaggccagggcagcggccgtttgtcgcttatccatatccttctcggcatgatccccgcggtggtgatggggctgattttccatgacaccattaaatccttgtttaacccggtgaacgtgatgtacgccctgattgtcggcggcgtattgctgattgcagcggaagtgctgaagccgaaacagccgcgcgcggtcgggattgacgatatgacctaccgtcaggcgttcgtcatcggctgctttcagtgcctggcgctgtggccaggtttctcccgctcgggggcgactatctccggcggcatgctgatgggcgtcagccgctatgcggcctcggagttctctttcctgctggcggtaccgatgatgatgggcgccaccgtgctggacgtctacaagagcatcggcttcctgaacatgggcgatgtcccgatgttcgccgtcggcttcgtgatggcgtttatcgtggcgctgattgcgattaaaaccttcctgcagctgatcaaacggatctcgttcattccgttcgctatctaccgctttatcgtcgcggcagcggtgtacgtggtcttcttctaaggcctgcgccctcagccttgcggctgggggcaacgctgttccttccactgcgctaccgccgcaattctccgccgcgtcagctcctcgcgaatttccgcccctttaaagcccgccgccacgacctctttagtggagaccgactgcgccacttcccaggcctccagcagcaggcgcccctgcgggtaatcgctggcctcgaaaccggtgcgtccgcggacgtcggcttcgctggtgagcgcgatctgctgcacgcgctgcggtttgcgccacgcgtcaatgctgtcgaagagtttgacaagggttttcggctgcagaattggcagggtgtggattaggtcatggtactccgccaccagtttcgcgagatcgcggatatcgttcggcacccgcagacgcgcgcagagctgctccaccagcttgactcccgccggaccatggccgtggtgacgcggccagagcgccttcggcgtcagccctttgccgaggtcatggcacagggtggcgaaacgtacgtcgacatccggcgacagcatcgcggccatcgtgacggtcatcagggtgtgcaggccggtgtcgatttccggatgccatttcgccggggccggcacgccgtacagggcgtcaatctccgggaacagcaccttgagggcctgacagtcgcgcagcgtctggaaaaagacctgcgggttgcgagtagttaatgcgctttccgtctctttccacacccgctccggcgttaaatgcgccagctcgccggcctcaaccatcgcggccatcagggcctgagtctcttcggcaatgcgaaaaccgaggtgggcgtagcgggcggcaaagcgcgcgacgcgcagcacgcgcagcggatcttcactaaacgcgggagagacatggcgcagcaggcgctgacggagatcgttctgtccgccgtaggggtcgataattgcgccgtcggcatcctgggcgagggcgttgaccgtcaggtcgcggcgcagcagatcggcttcgagggtgacgtccggggcggcatagcaggtaaaaccggtatagcccgcgccggatttgcgctcggtgcgggccagggcatactcttcccggctttgcggatggaggaacacgggaaaatcgcggcctacctgttgatagcccgcgtctagcatctgttgcggggtggcgcccaccaccacccagtctcggtctttgaccggcagccctagcagcgcgtcacgcaccgcgccaccgaccagataactcttcacgcctgattctcccgtatccgtttttcgcaagatgatacgtaagtctggcagagaagacgaattagttcatccaccggtctttacgtttgcggcttggcaccagatgcggcagcaccagaccgagcagcagaccgacgcccagcacaccgccgccgtacataaaccactgcatgataatggtgcgctgtttatcatcaagctgcagatttgccgcattcaccttcttctgcgcgacaaccagctcgtttttcaacttttggttctcgtccttcaacgcgttaatcacgctgtcgctgccggcgactttcttctgcatatccgccgtgcgctggttccaggtggcatcgatgttattcagcttatcggtcagcgtcttgacctggttttccagatccgggacgcgggtgcgcaggctgggctcgttgctcagctctttcagcgggatccaggcggtacggccgttgctatcgcgaatttgcgcgtaactggtgctgtcgttcgtttgcagtaccgacacttcttccccggcgttgatggtgccgaccagacgataattatcgcccgggccgctgcgaacccaggtgttcagctcatcggaaacgtagcgcttttcttctgcgtgaaccgccgtggcggcgctaagcgcgagcaaagtaaaagtaatcaggcgtaattttggcatcaggtcatcgtttggtcataaaaagtggaacgatagtagaggcatcgccagagcgacgcaaagttttccgccacaatcggaatcatccaagaggtggcccggcaaaaagcgcgttgcatggcgattcaccgcaaaatactatctactgacaaaaaatatcgtcgtaagttcgccgcaatttgtcggcgcagcacagaagcggaagaattcagtcatggctcaagaaatcgaactcaagtttatcgtcgctcaggatggggtagagacgctgcgcgagcagctcaatgcgctcgaggcgaaacatacgcccgcgggccagttgctgaacatttattacgaaaccgccgataactggctgcgtcgtcacgatatgggcctgcgcatccgcggcgatcaggggcgttatgagatgacgctgaaaatcgccggtcgggtggtcggcggcctgcaccagcgcccggaatataatattccactggataaaccggagctggcgcttgagcgcctgccggcggaggtctggccgcaaggggaacttccggccgcgctggcggagcatgtccagccgctgttcagcaccgattttgcccgtgaacgctgggtgatccaggaaggaaagagtgagattgagattgccctcgatcgcggcgaagtaaaggcgggcgaacatcaggagccgatctgcgaactggagctggagctgctcgccggggagaccgccgatctgctgcgcctcgcgcatcgtttgctggagagcggcgtcctgcgtcaggggagcctgagcaaagccgcgcgcgggtatcatctggcgcaaggtaacaatgagcgtccggtgacccggctggcggtgctgccggtggcagcgaaggccagcgtggagcaagggctggaggcggcgctggagagcgccctggcgcattggctgtatcacgacgagatctggctgcgcggcaacgcaaaagccaaagcggaaattctgctggcgatagcccgcgtgcgccatgccctcgtgctgttcggcggcatcgtgccgcgtaaggcgaccacccacctccgcgcgttgctgaacgacgccgacgccgttctgctggctgcggacaccgccgacgaagcgttattccgcaccgaggtcgttggcgccaaactggccctgaccgaatggctggtccagcgcggctggcgtccgttactcaacgaggcgggagagaaaaaaatagccggctcgttcaaacggtttgccgatattcacctctcgcgggtggcggccgagctgcgcagcgccgtgcagcatctggcggtagaagatgccgctgaccagttgccgaagctgtcccgcgacatcgacagcgtccagctgctggcgggcgcctatggcgacgccgtcgcgccgtggctggagaactggcaggaacttcagcgtgcgatagagcatgacgaccgcagcgtgtttgaatatttccgtcgccaggcgctggctgccgagccgttctggctgcatagtggaaaacgataattacaggccagggagcccttatgatgccgctttctccgcagttacagcagcactggcagacggtcgctgaccgtctgccaacggattttcccgttgccgaactgagcccacaggccaggtcggtgatggcattcagcgattttgtcgaacagagtgtgatcgctcagccgggctggctgaatgagcttgcggactccgcgccggcggcggaagagtggcggcattacgaagcctggctgcaggagcgcctgcaggccgtcactgacgaagcggggttgatgcgagagctgcgtctcttccgccgccagatgatggtccgcatcgcctgggcgcaggcgctgtcgctggtgcgcgaagaagagacgctgcagcagctgagcgtcctggcggagaccctgattgtcgccgcccgcgactggctgtacgccgcctgctgtaaagagtggggaacgccatgcaacgccgagggtcagccgcagccgctgctgatcctcgggatgggaaagctgggcggcggcgagctgaacttctcttccgatatcgatctgatctttgcctggccggagcatggcgccacccgcggcggccgccgcgagctggataacgcccagttctttacccgcctggggcagcggcttatcaaggcgctcgaccagccgacgcaggacggctttgtttatcgggtggacatgcgcctgcggccgtttggcgacagcgggccgctggtgctcagctttgcggcgctggaagattattaccaggagcaggggcgggactgggaacgctacgcgatggtgaaagcgcggatcatgggcgataacgacggcgcctacgccagcgaactgcgcgcgatgcttcgccccttcgtcttccgccgctatatcgacttcagcgtgatccagtcgctgcgtaacatgaaaggcatgatcgcccgtgaagtgcggcgtcgcgggctgaaagacaacatcaagctcggcgccggcggcattcgtgaaattgaatttatcgttcaggtctttcagctgatccgcggcggtcgcgaacctgcgctgcagcagcgcgcgctattgccgacactggcggcgattgatgagctgcatctgctgccggaaggcgacgcgacgctgctgcgcgcggcctatctgttcctgcgccggctggaaaacctgctgcaaagtatcaacgatgaacagacccagaccctgccacaggatgaactgaaccgcgccagactggcgtgggggatgcataccgatgactgggagacgctgagcgcgcagctggcgaaccatatggccaacgtacggcgggtgtttaatgaactgatcggcgatgacgaggctcagtcgccagatgagcagctggccgagtactggcgcgagctgtggcaggatgcgctggaagaagatgacgccagtccggcgctggcgcatttaaacgacgccgaccgccgcagcgtgctggcgctgattgccgatttccgcaaagagctggatcggcgcaccatcggcccgcgcggccgccaggtgctggatcagctgatgccgcatctgctgagcgaaatctgctcgcgcgccgatgcgccgctgcctctggcgcggatcacgccgctgttgaccggcatcgtcacccgcaccacctatcttgaactgctgagcgaattccccggcgcgctgaaacacctgattacgctctgcgcggcatcgccgatggtcgccagccagctggcgcgccacccgctgctgctggatgagctgctggatcccaacaccctctatcagccgacggcgaccgatgcctatcgcgacgagctgcgtcagtatctgctgcgggtgccggaagaggatgaagagcagcagctggaggcgttgcgccagttcaagcaggcgcagcagctgcatatcgcggcggcggatatcgccggcaccctgccggtgatgaaggtcagcgaccatttaacctggcttgccgaagcgatcctcgatgcggtggtgcagcaggcatgggggcagatggtggctcgctacggcctgccgacccacctgcacgatcgccaggggcgcggcttcgccgtcgtcggctacggtaagctcggcggttgggagctgggctacagctccgatctcgacctggtgttcctccatgactgcccggcggaggtgatgaccgacggcgagcgggagattgacggccgtcagttctacctgcggctggcccagcggatcatgcatctgttcagcacccgcacctcgtccggtattctctacgaagtggacgcccggctgcgcccttccggcgcggcggggatgctggttaccaccgctgacgcgtttgccgactatcagcagaacgaggcctggacgtgggagcatcaggcgctggtgcgcgcccgcgtggtctatggcgacccggcgttgcaggcgcgctttgacgccattcgtcgcgatatcctgaccaccccgcgggagggcgcaaccctgcagaccgaggttcgcgagatgcgcgagaagatgcgcgcccacctcggcaacaagcatcccaatcgttttgatatcaaagccgatgccggcgggatcacggatattgaatttattacccagtatctggtcctacgctatgccagcgacaagccgaagctgacccgctggtctgataatgtgcgtattctcgagctgctggcgcagaacgacatcatggacgaagaggaagcgcgcgccttaacgcacgcgtacaccaccttgcgtgacgcgctccatcacctggccctgcaggagctgccgggacacgtggcgccagaggccttcagccgggagcgcgagcaggtcagcgccagctggcagaaatggctgatggcttaactataaaatcgggtgtgctattatcgcgcgcaaagtttgcgtctcgcaggagagagtcatgaaagtaacgctgccggagtttgaacgtgcaggagtgttggtggtgggtgatgtgatgctggaccgctactggtacggccccaccagtcgtatttccccggaagccccggtgccggtggtgaaggtggaaaatatcgaagaacgtcctggcggcgcggcaaacgtagcgatgaacattgcctcgctgggggcaacctcgcgcctggtgggattgaccgggattgatgacgccgcccgcgcgctgagccaggcgctggccaacgtcaatgtgaagtgcgacttcgtctccgtcccgactcacccgactatcaccaagctgcgggtgctgtcgcgcaatcaacagctgatccgcctcgactttgaagagggcttctccggcgtcgatccgcagccgatgcacgagcgcattcagcaggcgctgggctctattggcgcgctggtcctttcggactatgccaaaggggcgctgaccagcgtccagaccatgatccgactcgcacgcgaagcgggcgtgccggtgctgatcgatccgaaaggcaccgatttcgaacgctatcgcggcgcgacgttgctcaccccgaacctctctgagtttgaagcggtggtgggcaagtgccaggatgaagcgcagatcgttgagcgcggcatgaagctcatcgccgaattcgaactgtcggcgctgctggtgacgcgctctgagcaggggatgacgctgctgcagccggggcgtccgccgctgcatatgccgacccaggcccaggaagtgtacgacgtgaccggcgccggcgacacggtgattggcgtactggcggcgaccctggcgtccggcaacaccctggaagaggcctgctatttcgctaacgccgcggcgggcgtggtggtcggtaagctgggtacatccaccgtttcccctgtcgagctggaaaacgcggtccgcggccgggctgagaccggctttggcgtgatgagcgaagaggagctcaaacaggcggttgcggcggcgcgcaagcgcggcgagaaagtggtgatgaccaacggcgtcttcgacattctgcatgccggtcatgtctcctatctggcgaatgcgcgcaagctgggcgaccgtctgatcgtggcggtcaacagcgatgcctccaccaaacgtctgaaaggcgaaacccgcccggtgaacccgctggaacagcggatgatcgtgctgggggcgctggaagccgtcgactgggtggtctccttcgaagaagatactccgcagcgcctgatcgctggcatcctgccggatctgctggtcaagggcggcgactacaaaccggagcagatcgccggcagtgaagaggtctgggcgaacggtggcgaagtgctggtgctcaactttgaagatggctgctcaactaccaatattattaagaaaatacaaaaagatagcgacaaataagcttttcgctattcaccggtttgtacggtgaagcatcacggcctgcgatagacgtatcgcgggccgtttttatttaatcatgtggaaaatgatttagcgcaataaataatcatgttaagcgcatttttcgtacaaatcgcgttaaggtaagcgtaaatactgaagtgagtaaaaggcatatgactgatcagaacatccaccgctgaaggagtatgcgcatgaaccataacgatatgtattcaatgaagaattttgattttttggcgcggagtttcgccagaatgcacgcccagggccagccagttgatcttcaggccattgtcggcaatatggatgaagaacatcgtgaatggttttgccagcgctatgaactgtactgtcgccaggtgagtagtcaggcggaagccgcccattaagccaaacgcaaaacgggccccaaggggcccgttttttactgctgctcttcgctgcccggcgtcgccgccgggcggttttcgaggtcattcaggcgctgctccagcagcgccagtttttcccgggtccgcagcagcacctgagtctgcacgtcaaactcttcgcggctaaccagatccagacgggtcagctgcgactgtagcgcctggcggattttcttctcaacatcctcacccagatcgcgaagtccttttggcatcgactcatggacctggcgggcgatttgttcaatttttttcgggtcaatcatggtggtttcctgctcgggtcggatgattgatcattgtagtgcgaaccaggccgcctataaaccagaaatgtttgaagcttatgcattgccgaggatagtcaatagcgttatagttatctcgcttattctcagggcggggcgaaattccccaccggcggtaaatcaaccatggcgttgaaagcccgcgagcgcttcccgtgactacgggaaggtcagcagatccggtgtaattccggggccgacggttaaagtccggatgggagagagtaacggcacagtcgggcccaggcccgctcgcgttgacttttgccgctaaaccggcgctcctaagactgccctgattctggtaaccataattttaatgaggtttttttaccatgaatcagacgctcctttcttcttttggtaccgcttttgaacgtgtggaacacgctttgaacgccctgcgcgaaggccgcggcgtgatggtgcttgatgatgaagaccgtgaaaacgaaggcgatatgatcttcgccgctgaaaccatgaccgttgagcagatggcgctgaccattcgtcacggcagcggcattgtgtgcctgtgcctgaccgaagaacgccgcaaacagctggatctgccgatgatggtagagaacaacaccagcgcctacggcactggcttcaccgtgaccatcgaagcggccgaaggtgtgaccaccggcgtctccgctgccgaccgcgtgaccaccgtccgcgcggccatcgccgacggcgcgaaaccttccgatcttaaccgtccaggtcacgtcttcccgctgcgtgcgcagccgggcggcgtactgacccgcggcggccacaccgaagccactatcgacctcgtgaccctggctggctttaaaccagcaggcgtgctgtgcgagctgaccaatgacgatggcaccatggcccgcgcgccggagtgcatcaagttcgctcagcagcacaatatggcggtagtcacgattgaagatctggtggcctatcgtcgcgaacatgagcgtaaagccagctaaatagcggttcgctacgcccgagcacagcccacttgttagtgggctgtgttgtttctgcgctttaaccgatgcccatcgtctggagtaccaccaggctcagccccatgaccgacatcccgcacaggacgccgtagcttggattgctttgcggatcgatctctttcgccagcggcatcagttcatcgaccgacagcgccaccataattccggcgacggcagccatgatcgcgcccatcaccagcggcgagaccaggctccccagaatcaaccacgccagcacgccgcccaaaatttccgccatgccggaaagcccggcccagagcaccgctttgctgcgcgagccggtggcggcatacaccggtccggcaaccgccagtccttccggaatattgtgcagggcgacggcaagggcgacgcccatgccaagctcgaggttgttgctggccgtgacataggtggcgatcccttccggaaagttatgcaggctgatccccagcgtcagaagaatagcggtgcggcgtaagttgcgcgggcgcggcatggcgggagtcatcagatcctgcgggtgggcgtgcggcagcaggcggtcaaggccaaagtagcccagcaggccgacaacaaacattccgtagccgagcagcggcgacatgccctcggcggccagcgcggcaggcagcatttccatcaacgaaatcaatagcataatcccggcggcaaagccgagggagaagccaagcaggcggttagagggtttctggccaatcacgccgaatatggcgccaatgaaggttgcgctaccggctaacagcgtcaatattaagggtgatgacatcgcttctctccctgtgaaaataattacatacgagtatattgcctgaggatgcgcgtacgggacacgtccctttaccgcgaattacattcaaattttctgacgatcatcatcatggttatctgagtttatcctggcgcaaaagcgcgtaatgtgagcacatcacattgacaccctaaggatatcatcatgtcccgtacccgaatgcccgcgttgtttctcggccatggcagcccaatgaacgtgctggaagacaaccgttatacccgcgcctgggctcaactgggcgaaaccctgccgcgtccgaaagcgatcgtggtggtctctgcgcactggtttacgcgcggtacgggcgtaacggcgatggagacgccgaagaccattcatgacttcggcggttttccgcaggcgctgtatgacacgcattatccggcgccgggctctccggcgctggcgcaacggctggtggagctgctctcgccggtgccggtcaccctcgatacagaagcctggggatttgaccatggatcgtggggcgtgctgattaaaatgtatccgcaggcggatatcccgatggttcagttgagcatcgacagcaccaaaccgccggcctggcatctcgaaatggggcggaagctggcctcgctgcgtgatgaaggcattatgctggtggccagcggcaacgtggtgcataacctgcgcaccgcccgctggcatggcgagaacacgccgtacccttgggcagagtccttcaataactacgtgaaagcgaatctgcaatggcaggggctggacgagcaacacccgctggttaactacctggcacacgaagggggctcgctctccaatccgacggcggagcatttcctgccgctgctgtatgtcctggggacgtgggatggcgttgaggcgatgacgatcccggtcgatggcatcgagatgggctcgctgagcatgctgtcggtgttggttggcgcctgatgatagcgcgctccggcggcatttaccgtcgccggagcgcggcattattcgacgaaaatgtgcggatagaagcgcgacagatcctgggtgatcagcgcccggtcttcgcgaataccgatccctgcaggctggtcgttgatgagccagctgccaatcagcgtatagctatcgccaaacttcggcagcgggtaaaacgcctgcacgatggtgccttcttccccgtacgggccttctactgcctccaccactttgccattttcaacgatcgacacgttagcgccttcgcgggagaagattggcttaatgacgtacttctccatctccgggtgagcatcttcgctgaagtaggccgccagcagattagggtgattggggaacatctcccacagcatcggcagcagcgccttgttggagataatgcttttccacgccggctccagccagcgtacgccagcgtcttccagcttggtggagaacatctcccgcagcataaactcccacggatagagcttgaacagattgccaatcacctgatcctgcagatcggtaaactggcctttttcgcccaggccgatatcttcaacgtagaggaattccgtcgccagccccgcttcagcggcgcagtcctgcagatactgcacggtaccgcgatcttcaacggtatcgcggcagcaggccatatgcagcagctgaaagccaaactgctcgcgcagctcgccgaagcgatcgatcagcttttcctgcaaactgttgaactggtcgctgcccgccggcagcttgccggcgttgagctgatcttccagccagatccactggaagaaggccgcttcatacagcgaggtcggggtgtcggcattgttctccagcagcttcggttcgccgatgccatcccaggccaggtcgagacgtgagtagagcgacggctggttggttttccacgactggcgcacaaaaccccaggtgtgtttagggatgcggaatttggtcatcagctcatcgctggcgatcactttttccaccacctggaggcacatctgatgtagctcagcggtgaccgcttccagcttttccacctgcgcgagggtcagcttgtaatacgcctcttcgctccagtagggctcgccgtacatggtatggaagttgaaaccgtactcggtcgctttctcgcgccagtccgggcgctcggtaatactgactctttccatgttgcttagccgcccattgagcgagaagaggacgttgagcctgcggcgctacgctgcatggtcgactgtttcgctaccgactcgccaaagccgccgcgggtgacggtggtggttgtggctggcttcggcgccatcgcagttttcggcacgttcatggtgcggcccggctgggcggcaccatagctcttgccgctggcgtcagtgtactgaccgtaggccgggctggccggatttttcgagctgaacagcggctgctgttgcgccatgccgccgcccatcaggcggcccatcatgtagccggccatcagcggcatccagaagctgccgctgctttgcgcctgcgcctggttttccggggcgacgcccgcctgggctggcgtctgctggcactggccttcgccaaactcggcgacgcagtcttcgcgggtggcatacttcggcgcagtgcgctctgcctcttttaccgcgttggtgtaggccgtggtgcattcggctgctttgccagggttggcggcggagcagtcatcggcgttctggtacagcgacaccgtttcgtcgcttttttcacaaccggcgagcataaagaccgcggtaacggccagcgcgaccggcgtcagatggcgtgcgctccagcttttgcggaacgacgaatgattaatattttttgtccgtttcatatttgtcttccaggacccagtggtatggcgtgtgttaacgctcaggatagaggatgagtggtggaaaatgaagcgaagaggggcgctaagcgggggatctttacgttgccttacgtttaacgcatcgcctgtccgacggacaggcgatgcgcatcacagtatgagaattactgacggaacggattgctgccgctgctctgggtggtccgtgcggacgccggcttcaccgccgcggtagtgttgccgtagccatcagcggtggcatcctgttgcggattttccggcgcgacgctatctgcggaggtggagatgggtttacccagcgtgttgttcagggcgaccagatcctgctcgttcagggtacctaacgccgacttaatgttcagctcgttgatcaggtagttgtagcgcgcattcgagagctgctgcttagcgttatacagcgtagtggtggcgtcgaggacgtcaacgatagtacgcgtacccaccgagtagccagcttccatggcatccagggagctttgcgcagagaccaccgcctgtttgtaggcgttgatgctgctgatggaggcattcacgttgttaaacgatgaacgcacagtctgcacgacgctgcggtgggcgctttccagctgctcgctggcgccaacgaagttgtattgtgcctgcttgacctgcgaggtcaccgcgccgccctgatacagtggcagagagaagttcaggccgatttggttctgcccgttatcactgtcgttgtaggcgagcggggtattggttttcgaaccgttgtaacgcgtattcgagaccccggtagaggcggaaaggttcagggtcggcaaatggccgtcctgcgcctgacgaatctgctcgcgggccaggtcctggctcagacgcgcctgcagcagtgacaggttgcggttctccgcttccttcagcagggcgttgaccgcctgcggcttgttggttttgaagccgttcacgttcagggaggccagctccggatagtaattaccggtgacttgacgcagtccttcgacggcgttgtcgagatcgttacgcgcggtgacttcgttcgccagcacggcatcgtattgtgaacgggcgttctgtacgtcggtgatcgccaccaggcctacgttaaagcgctgcgtggtttgatccaactggcggtaaatagcctgtttctgcgcttcggtataggagagcgtgtcgatggcggccagcactttaaaataggccgtcgcggtattcagaatcagtgtttgctgatcggtctgatacgtgacatcctgaatccctgccgttttttcctgcagcgtcagggcgcgccatttcgacatatcaaacagaacctgcgttaactgcagcgaaccgctggtgacgttagagttgacgccgttgctgtcgcgatagccattggtataggtataatccgctcccagcccaagctgaggcagtaatggactgcgcgcttcgttgatcttttcgaacgcggcgtcacgatcggctgccgatttacgcagatcggggttgctgatgcgtgcctgctggtaaacctgaagcaggttttccgcctggctcatggcgctgaacccggtcaggctcaggccgataagaatggggagcaatttcttcatttgcattccttgttgtgaagcatttagcgctggtctaattctaagaaaaattccgctgattgtatcgattctgccgccgtaaaaagttggcgttacgtgccatccggcggtaatttgcaccaatctaacatacgggccgtaaaacggtagccaaacggtttggaaatccctaatttcagattcgcaggacatgacaatgagcaaacccacgcagcagggaattaccttctccaaaaatgatgtagaaattattgcacgcgaaacgctatatcgtggttttttttcgctcgatttataccgttttcgccaccgcctgtttaacggcggcatgagtggcgaaatcacccgtgaaatttttgagcgcgggcacgccgccgtcttgctaccctttgacccggtgcgcgacgaagtggtgctggtcgaacaaatccgtatcgccgcctatgataccagcgagagcccgtggctgctggagatggtcgccggcatgattgaagcgggtgaaacggtggaagatgttgcccgtcgggaagcgctggaggaggccgggcttgaagttgggcggacgaaaccaatattaagctatctggccagtcccggcggcaccagcgaacggttatcgatcctggtgggagaagttgatgcatcgacggcaaaaggcattcacggcctggccgaggaaaacgaggatattcgggtgcatgtggtgagtcgggagcaggcttaccagtgggtagaagaggggaaaatcgacaacgcagcctctgtcatcgccttgcaatggctgcaattgcattatcacaatttacgaaatgagtggacaaaatgaagcgttatacacctgacttccctgagatgatgcgcctgtgcgagaccaacttcgcgcagttgcgccgcctgttgccgcgaacggatgcagcgggtgagaaggtaagctatcaggtgggaagcgcgcagtatcggttaacgatagttgaatcgacccgctacactactctggtggcaatagagcagactctgcctgcagtgagctactggagcctgccatcgatgaccgtccgcctctaccatgacgccatggtggccgaagtgtgttcgagtcagcagatctttcgcttcaaagcgcgatatgattatcctaataaaaagttgcatcaacgcgacgaaaagcatcaaattaaccagtttttggccgactggctgcgttactgtttagcacatggagcgatggcgattccggtttgttagcgtcgttaaacctaaggacaccatttggaaagcctgttaaacctacctctggctggtgaggccagagtcaggatattacaaattactgatactcacctgtttgctgaaaagcatgaaacgttgttaggcatcaatacctgggatagctatcaggccgtactgtcggccattcatgcctcacagcgtccatgcgatctgattgtcgcaacaggcgatctggcgcaggaccactcctccgcggcctatcagcattttgctgagggcatcgcgagttttgctgcaccctgcgtctggctaccgggcaaccatgatttccagccggcgatgtacagcaccctgcaggaggcgggcatttcccctgccaagcgcgtgtttctcggcgatcgctggcagatcctgctgctcgacagccaggtgtttggcgttccccatggcgagctgagcgacttccagctggagtggctcgaacataagctggcggaggcgccggagcgctataccttactcctgctgcaccatcatccgctgccggccggctgcagctggctggatcagcatagtctgcgcaatgccggcgcgctggacagcgcgttgagcgcctggccgcgggtgaagcatcttttgtgcggccatattcatcaggaactggatctcgactggaatggccggcgcatgatggcgacgccgtcgacctgcgtccagtttaaaccgcactgtgccaatttcactctggatacggtgtcaccgggctggcgctggctggagcttcaccctgacgggacgctgaccaccgaagtgtgccgcctggaaggcgccgcgtttcatccggatattgcttcagaaggctactgatggcgacgctcctttatctgcatggctttaacagctctccgcgctcggcgaaggcgacggcgttaaagacctggctggcgcagcactatcctgagatcaccatggtggtgccggagttgccgccttacccggcggaaacggcggagctgttggagtccatcgtgctggagcacggaggcgagccgctgggggtcgtagggtcgtcgctgggcggctactacgcgacctggctttcgcagtgctttatgctgccggcggtggtggttaacccggcggtgcggccgtttgaactactaaacaattttctcggccacaatgagaatccatacaccgggcagcaatatgtgctagagtctcgccatatttacgatctcaaagtcatgcaaatcgacccgctcgaagcgccggatttactctggctgctgcagcagaccggggatgaagtgcttgattaccgccaggccgttcattactacgcctcttgccggcagacggtagaggagggcggtaatcacgcatttgtcggctttgacgatcatttcactcagattatcgaatttctcggcctgcgctaaacggccctgaacgacctacgaatacacaccatgacgcaatcttcatataatgctgatgccattgaggtactcaccgggctagagccggtgcgccgccgtccgggcatgtataccgacaccactcgtcctaaccatcttggtcaggaagttattgataacagtgtggatgaagcgctggcaggccacgccaaacgcgtggaagttatccttcatgccgaccagtccctggaggtcattgacgatggtcgtgggatgccggtcgacatccacccggaagagggcgtgccagcggttgagctgatcctctgccggctgcatgcgggcggtaagttttccaataaaaactatcagttttccggcggcctgcacggggtggggatctcggtagtcaacgccctgtcaaaacgcgtggaggtcaacgtgcgtcgcgacggtcaggtctacagcatcgcctttgaaaatggtgaaaaagtggaagacctgcacgtcaccggcacctgcggcaaacgcaataccgggaccagcgtccatttctggccggacgaaagcttcttcgacagcccgcgcttttccgtttcacgtctgacccacctgttaaaagcgaaagcggtgctgtgcccgggcgtggaaattgttttccgcgaccaggtgaacaacagcgagcagagctggtgctatgccgatggcctgaacgattacctgagcgaagcggtgaacggcctgccgctgctgccggaaaaaccattcgtcggcgccttctccggcgagacggaggcggtggactgggcgctgctgtggctgccggaaggcggcgaactgctgaccgagagctacgtgaacctgatcccgactatgcagggcgggacgcacgttaacggtctgcgtcaggggctgctcgacgcgatgcgtgagttctgcgagtaccgtaatatcctgccgcgcggcgtgaagctgtcagcggaagatatctgggatcgctgcgcgtacgtgctgtcggtgaagatgcaggatccgcagttcgccgggcaaaccaaagagcgcctgtcgtcgcgccagtgcgcggcgttcgtctccggcgtggtgaaggacgccttcagcctgtggctgaatcagaacgtgcaggccgcggagctgctggcggagatggccatctccagcgcccagcgccgtctgcgcgcggccaaaaaagtggtgcgcaaaaagctgaccagcggtccggcgctgccgggtaagctagcggactgtaccgcccaggatctgaaccgtaccgagctgttcctcgtcgaaggggattcggcgggcggctcagccaagcaggcgcgcgatcgcgaatatcaggcgatcatgccgctgaagggcaagatccttaatacctgggaagtctcttccgatgaagtgttagcttcgcaagaagtgcacgacatttcggtggcgattggtattgacccggatagcgatgatttaagccagctgcgctacggtaaaatttgtattctggcggatgcggactccgatggtctgcacattgccaccctgctgtgcgcgctgttcgtaagacatttccgtaccctcgtgaaagaggggcacgtctatgtggcgctaccgccgctgtaccgtatcgacctcggtaaagaggtttactacgcgctgacggaagaagaaaaaaccggcgtgctggagcagctaaagcgcaagaagggcaagccaaacgtccagcgctttaaagggctcggtgagatgaacccgatgcagctgcgcgaaaccacccttgacccgaatacccgccgcctggtgcagctggtgataagcgatgaggacgagcagcagaccacggcgataatggatatgctgctggccaaaaagcgttcggaagatcgtcgcaactggctgcaggagaagggcgatatggcggatctggaagtgtaagtctgtacgctgcgccagacgtaaaagggagcctcaggctccctttttcatggcattactgagtcggcggacttaaacgccagcctgcagaatacggatgctggtctccagcacatcgcctttgaccgcttccgaccaggctttcatgtgcggggtttgcaggtgtgcttcaagatgcgcgacgctttcccactgctcgaccatgacgatagagtcgggcgctgtggtctggaagctgacgccggcggcatgatccaccagcggggcatagccgtggcagccggcctcctgcaaaacggtcggaataattttcgcgaactgatcgagaaccgcctggcggtggtgctggcccgggcgggtacggatttctgcaatcactgttaacatggttaactcaactccttctgtgtggatctcgtcatactccaggttcgaataactcgaaatatgtagagctagacctctagttaaccaaaaatttccgccagatgcttgcgatattctgcgatataccgtgggacatcaggcattttaatcacgtcgttggcgataaaggttggcaatgcctccatgccgaggaactgattggctttatggaacggcaggtaaacgccgtcaacgccgacgccgtggaagaactggtctttgtcggtgaaggcttccatcggcgcgttccaggtcagagaaagcatatattttttcccctgcaccaggccgcctgagccatattttttgctggcgtcggagcgggtacggccatcgctggcgtacagcgagccgtggccttcggtaaagacgtcatccatatattttttcaccgtccacggagcgcccatccaccagcccggcatctgccagatcaccacatcggcccacaggaaattctgtacttcttcttttacgtcgtactcgctttcggcgcgaacgcttttaacatcgtgcccggcgtcgcgcagataactctccgcgacctcggtcagggtgtcgttcagttgaccattagagtgcgcgaactttttcgccccattgataatcaggatgttgctcattttttaccctcatatatgaaaatttgccgacgatcttaccccgcgaagcggggcagtaaaatgagcaaaatgtgcaaagtcttttgccaaatgagcaataatctcgctaccagtacacgcgggcctcgaagccgccgtcgcgcgcgttggcaaaatcaacctgcatgccgtgcagcgaggcgatgcgccggacgatcgacaagcccaggccgctgcccggcgcctcctgccccggcgggcgataaaaacgctcgccaatgcgcgagagcgcctgcgggttaatgcctgggccgttatcgcgcacccggaactcgcgggcgttgagcgtgatatcgacctggctgccgcacgggctatatcgtacggcgttatccagcagattgcgcaccagcagactgagcagcagcggctggccggtgcggacgatatggctggcattaagatgcaggcgcagctcaatcccggactgctgcgccgggtgatacatctccatcactgccgactgcagcagatcggcgatagcgacctgctgcacatcatccagttgggcgagcgagtccagccgcgacagcgtcagcagctgatccaccagtcgggtggcgcgatcgatcccctggtggagctgatccaacgctttctcacgcccttcgggatcgtccagggagagttgggcgacttcggtctgcaccttcagcgccgccagcgggctgcgtagctcatgggcggcatcagaggtaaaccgacgctcgcgcagcatggcgtcgtgagtgcgtcggaacagctgattcagcgcttcgaccagcgggcgaacttcggcggggatcttctccacgctgagcgaatccgccgagtccggcgcgcgcaggcgcagcgtgcgcgccagatttttcaatggcgccagctcgcggcttaacagcacgatgagcagcacgaacatcagcggcagggcaaccatccacggggtgagctgcgaggtcacgatatccatcgccatttcgcgccggtaatcccactcctggccgacggcgatgcggtagcggccgtcggcggtggttaaccacaggaaacgccactcgtcatcgtcgtcacgcagatagccatcgctgaatccctcgcgctgcgaattccactgaatatcctctccgttctcgccgtcattaagcaccattttgccgtcgcgggtgaagatggcgaacgccagcgcgtcgtcgtcgatgtgcccgtggcgtacctttttcttttccccgagcaaggcgggcggggcgcgcagttcatcgaaatgcatgacgctcaggcggcgagcgaacagcagctgctgggtatcgaacagcttatccagctttttgctggtctgctgccaggcgataacgctggccattccccaggcggcggtggtcagtacggcaaacagcagcgtcaggcgcaggcgcaggctcaggcgggcaagtcgtttcatgcgtcacccagggtatagccgatgccgtggacggtacggataaagtcgctgccgagcttgcggcgcagatgatggacgtgaacttccacggcgttgctggagacctcgtcgtcccaggtgtagagcttttcctcgataagcttacgcggcaatacgcgcccggcgttgcgcataagcagttccagcagggcgaactccttcggcttcagcgccaggctttcgccgtcgaggctggcggttaagcggttcggatcgaggatcaccttgccgtggcgcagttcgctgctgctctggccgtgcgcgcggcggatcaacgcttcgaggcgcgctgccacctcaatcagggcgaaaggtttgcacaggtagtcatcggcgcccaggcgcaggccctccacccgctggctgagggcatcgcgggcggtgaggatcagcaccggctcatggcggcctttatcgcgccattcgcgcagaatatcgaggccatcgatgccgggtagggtgaggtcaaggattgcggcgtcgtagggggcgctgtataaggcatttttgccctccagcccggcggtaaaccagtcaatgctaaagcccattttgctcagcccggctttgatgccgtcgccgataagcttgtcatcttccaccagtaatatgcgcatgtttccctccgacgatcccgtttctttgcgcagtaaaccgcgttgaagcgggtgatgtacagcattaaaatttcttttttccgcttaagaagtcgttaagttttgtcgggcgtaataggagccataccaacacaaaagggagaatataagatgaaaaaaattgctgcgatgaccgcgattattgctttagtttccatgccggtactggccgccgggcagggaggattcaccggaccgtctactaccactaccacccaggctggcggcttcaccgggccgagcggcgcggtgaccaccgtggcgaacgccaagtcgctgcgtgatgacacctgggtgaccctgcgcggtaaaatcgtcgagcgcatctctgatgacctgtataaattccaggatgcttccggggtgatcaatgtcgatatcgaccacaagcgctggaacggcgtgaccgtcggcccgcaggacacagtagaaattcagggggaagtcgataaggactggaactcggtagaaatcgacgttaaacagatccgtaaaatcgcgccataagtctccgtcggataagcgcaagatcggtcaggaatcgcgatcctcgctctgtcagagtatgtcgcgaggaggagacgatgaacgatattaaggccagcccggcgtatgtcgggcgcttccagcgcgtctgtaggtacattgcgcgccatcttgatgagccgctgtcgctggagacgctgagcgcgatagcgcacagttcgccttaccattttcaccggcaatttagcgcttataccggcattccattgtaccggtatattcagtggttgcgtctgcgacgcgcctgttggcgcctggcgttcaacccccgcgataaagtcatcgatattgcccttgatgccggatttcagaatgcggagtcgttcagtcgtgccttccgtaccgcgtttgaccaaagcccgacccaattccgtcaacaaccggactgggccgagtggcatcgacgcgtaccgaaacatacgctacaggagcaaacgtcgatggacgtcaacattatttcgtgcccctccacccggatagccgtactgcaacatcgcggtagcccggaccttgtcaacgccaccgccgcgcgttttatcgcctggcgtaagacgagcggactatcgcccgtcgccaccagcgatacctgggggatcgcctgggacgatccgcagaccaccccgcaggaggcatttcgttttgatatctgcggtacggtcgatcggccggttggtgaaaacgcctttggcgtgattaacggcgaaatccccggcggacgctgcgccgtcgtgcgccatcacggctcgctggacacgctggcgaacagcgtttggtttctctatcgcgactggttacccgcttcaggcgagacgttacgggattttccggtgtacttccgttacctcaattttgtccatgaggtggctgagcatgaactgcaaaccgatatttatctgccgctggcctgattaagcgtgacggaatcctcagccgatctcacggcctgtgactcagggcgtgagatcgggtattatcgcgggtagttttgccgtccgaacggtcggtacccagattgaggatccacgattaatgagcgatatggcagagcgccttgcgctgcatgaatttacggaaaatgcttacctgaactactccatgtacgtgatcatggacagggcattaccgtttattggcgatggcttaaaaccggtccagcgtcgcatcgtctatgcgatgtccgagctggggctgaacgccagcgcgaaattcaaaaagtccgcccgcaccgtcggcgacgtgttgggtaaatatcacccgcacggcgacagcgcctgctatgaagcgatggtgctgatggcgcagccgttctcttaccgctatccgctggtggatggtcagggaaactggggggcgccggacgatcccaaatctttcgccgccatgcgttacaccgaatcccgcctgtcgaagtatgccgagctgctgctcagcgagctggggcaggggacggtcgactgggtgccaaactttgacggcacgctgcaggagccgaaaatgctgccagcgcgtctgccgaacatcctgctgaacggcaccaccggcatcgcggtaggcatggcgaccgatattcctccgcacaacctgcgggaagtggccaaagcggcgattacgctgattgagcagccgaaaaccaccctcgacgaactgctggatatcgtacaggggccggatttcccgaccgaggcggagatcatcacctcgcgggcggaaattcgcaaaatctaccagaacgggcgcggctcagtgcgcatgcgtgcggtgtggagtaaagaggacggcgcggtggtgatcagtgcgctgccgcatcaggtctccggcgccaaagtgctggagcagattgcggcgcagatgcgcaataaaaagctgccgatggttgacgatctgcgcgacgaatcggaccacgaaaacccgacccgtctggtgattgtcccgcgctccaaccgggtggatatggaacaggtgatgaaccacctgttcgccaccaccgatctggagaagagctaccgcatcaacctcaatatgatcggccttgacggccgcccggcggtgaaaaacctgctggagatcctcagcgagtggctggtgttccgtcgcgataccgtgcgtcgccgtctaaaccatcggttagagaaagtgctgaagcgcctgcatatcctcgaaggtttgctggtggcgtttcttaatatcgatgaagtgattgagatcatccgcactgaagatgaaccgaagccggccctgatgtcgcgctttggcatcagcgaaacccaggcggaagcgattctggaattaaaactgcgccacctcgccaaactggaagagatgaagatccgcggcgagcagagcgagctggaaaaagagcgcgaccagctgcaggcgattctggcgtctgaacgtaagatgaacaacctgctgaaaaaagagctgcaggccgatgccgatgccttcggcgacgaccgtcgctcgccgcttcacgagcgtgaagaagcgaaagcgatgagcgagcatgacatgctgccgtctgagccggtgactatcgttctgtcgcagatgggctgggtgcgcagcgccaaaggacacgacattgacgcccagggcttgagctataaggcgggcgacagctggaaagcctcggcgaagggcaagagcaaccagccggtggtgtttatcgataccaccggacgcagctatgccatcgatccgattactctgccttccgcgcgtggccagggtgaaccgcttaccggcaaactgaccctgccgccgggcgcgaccgtggagcatatgctaatggaaagcgacgatcagaaactgctgatggcttccgacgcgggctacggtttcgtctgtaccttcaacgatctggtggcgcgcaaccgtgccggtaaagcgctaatcaccctgcctgacaacgcgcacgtgatgccgccgctggtgattgaggatgagtccgatatgctgctggccatcaccgccgccgggcggatgctgatgttcccggtcagcgatctgccgcagctgtcgaaaggcaagggcaacaaaattatcagcattccggcggcggaagccgcagccggccaggacggtctggcacatctgtttgttctgccgccgcagagtacgctgaccattcacgtcggcaaacggaagatcaaactgcgtccggaagagctgcaaaaagtcaccggcgagcgcggccgccgcggttcgctgatgcgcgggctgcagaaaattgaccgcgtggaaattgactcgccgcgtcgtgccgcggcaggcgatagcgaagagtaagcgcgtctcctcccgtctttgacgggaggagacgaaaaaatgccgcaaaatcgttgtttattcaggcgttgcgattaacaatgtccatcatcagggacccaggaagaacggtcccggcctgcgcagaacttgtgagcctgccttctgccagcagcgaataattctaagcggtttgggttttagaggtagctatgctattcatttttcgagtaattttcgtggtcatttattgcatcgtagtgtgcgtacttggctgtctgtactgcttgttcagcccacgtaatccaaaacacgttgccactttcggccatctgtttggccgtttatctccggtatttggcctcaaggtagagctacgcaaacccgccgacgcggaaagctatggcaacgcgatctacatcgctaaccaccagaacaactatgatatggtgacggcgtcgaatatcgtgcaggctccgacggtcaccgtaggtaaaaagagcctgctatggatcccgttctttggccaactgtactggctgacgggcaatttgctgattgaccgtaataaccgaaccaaagcgcacggcactattgccgaagtcgtcaacgcttttaaaaagcgtaaaatttcgttctggatgttcccggaagggacccgtagccgcggccgcggcctgctgccgtttaaaaccggggcttttcacgcggctattgccgctggggtgccgattattccggtgtgtgtctcgaatacatcgaataaaataaagctcaatcgctggaacaacggtctggtgattgtggaaatgctgccgccggtagataccactcagtttggtaaagacaacgtgcgcgcgctggcgacgcattgccgcgagctgatggccgccaaaatcgctgatctggacaacgaagtggccgagcgcgaagcggctggaaagcaataagacaggaaacgccgccaacgcgcgcgtattgctggcgggaaacgaattccctttttcatttgtcagtatgtcatggagttaatatgtcactcagtcggcgtcagtttattaaggcttccggcgtagcgctgtgcgctggcgccgcgccgctgaaggcccatgccgccggccagcagcctgcgctgccggttccgccgctgctggaatctcgtcgcggccagccgctgtttctgacgctgcagcgttcccactggtcgtttacccccggcacccgcgcccccgtctgggggatcaatggccgctatatggggccgacgatccgcgtctggaacggagacgacgtcaagcttatctacagcaaccgcctgacggagaacgtggcgatgaccatccgcggtctgcaggtgcctggcccgctgattggcggcgcggcgcgcatgatgtcgccgaacgccgactgggcgccggtgctgcctatccgccagagcgcggcgacgctgtggtatcaggccaacacgccgaaccggatggcgaaacaggtttacaacggtctggcgggcatgtggctggtggaagacgaggtcagcaagaacctgccgatccctaaccactatggcgtcgatgacttcccggtgattattcaggataaacggctggataacttcggcacgccggaatatagcgaaccgggcagcggcggctttgtgggcgacacgctgctggttaacggcgtgcagagcccgtatgttgaagtgtcgcgcggctgggtgcgcctgcgcctgctgaacgcttccaactcccggcgctatcagctgcagatgagcgatggccgactgctgcatgtgatttccggcgatcagggattcttgccggcgccggtttcgctcaagcagctatcgctggccccgggggagcggcgtgaaattctggtcgatatgactaacggcgatgaagtatccattacctgcggcgaagcggcgagcatcgtcgaccgtatccgcggtttttttgaaccgtcaagcatcctggtctccacgctggtgctgacgctgcgtccgaccgggctgctgccgctggtgaccgacagtctgccggtgcgcctgctgccgaccgagctgctctccggtacgccgatccgcagccgggatatcacccttggcgacgatccgggcatcaacggccagctgtgggatccgcagcgtatcgatatcacggcgcagcaggggacctgggagcgctggacggtgcgcgccgaccgcccgcagtcgttccatattgaaggggtgatgttccagatccgtaatgtcaacggctcgtctcctttcccggaagatcgcggctggaaggacaccgtgtgggtcgacgggcaggttgagctgctggtctattacgctcaaccgtcgtggccgcacttcccgttccagtatctgagtcagacgctggagcttgccgatcgcggctcgatcggccagatgctggtgaatcccgcgccgtaacctctttgaccctggccggcgcacggtcagggtttgagaaaatcctccttcatttccactatcattccggcttataatccacgcccttttggttatttttttatcattttccccggaagcaatatgagcgcaatatccctgatccaaccggatcgtgaccttttttcctggccgcaatactgggctgcctgttttggccctgcgccttttttaccgatgtcgcgtgaagagatggatcaacttggctgggatagctgcgacattattctggttaccggcgacgcctatgtcgaccacccgagcttcgggatggctatctgcggccgcatgctggaagcgcagggtttccgggttgggatcatctcccagcctgactggaacagcaaagacgactttatgcgtctgggaaaaccgaacctgttcttcggcgtgaccgccggcaacatggactcaatgatcaaccgttacaccgccgaccgtaaactacgtcatgacgatgcctatacggcgggtaacgtggcgggcaaacgtccggaccgcgctaccctcgtctatacccagcgctgtaaagaggcgtggaaagatgtgccggtgatcctcggcggcatcgaagccagcctgcgtcgtaccgcccactatgattactggtccgacaccgtgcgccgctcggtgctggtggactccaaggccgatatgctaatgttcggcaacggcgagcgtccgctggtggaagtggctcatcgcctggcgatgggcgaaaccatcgaccagatccgcgatgtgcgcaataccgccatcatggtgaaagaggcgctgcccggctggagcggcgtggactccacccgtctggatacgcccggtaaaattgaccccatcccgcatccgtacggtgaagatctgccgtgcgccgataacaaaccggtcgcgccgaaaaaacaggaagcgaaaagcattactgtgcaaccgccgcggcccaaaccgtgggaaaaaacctatgtgctgctgccttccttcgagaaggtgaaaggcgataaggtcctgtacgctcacgcctcgcgcattttgcaccacgaaaccaaccccggctgcgcccgggcgctgatgcaaaagcacggcgagcgctacctctggatcaacccgccggcaatcccgctctccaccgaagagatggacagcgtcttcgcgctgccgtacaagcgggtgccgcatccttcctatggcgatgcgcgtattccggcgtatgagatgatccgcttctcaatcaacatcatgcgcggctgcttcggcggctgttcgttctgctcgatcaccgagcacgaaggacgcataatccagagccgttctgaggattcgatcattaatgagatcgaagccattcgcgacaccgtgcccggctttaccggggtgatctccgatctcggcgggccaacggccaacatgtatatgctgcgctgtaaatcgccgcgcgctgagcagacctgccgccgtctctcctgcgtctatccggatatttgcccgcacatggataccaaccatgagccgacgatcaatctttatcgccgcgctcgcgaactgaagggcatcaagaagatccttatcgcctccggggtacgctatgacatcgcggtcgaagatccgcgctatatcaaagagctggcgacccaccacgtcggcggctatctgaagatcgccccggagcataccgaagagggaccgctgtcgaagatgatgaagccgggaatgggcagctacgaccgctttaaagagctgttcgacacctattcgaagcaggcgggtaaagagcagtatctgatcccgtactttatctccgctcatccggggacccgtgatgaagatatggtgaacctggcgctgtggctgaagaagcatcgcttccgtctcgaccaggtgcagaacttctatccgtcgccgctggcgaactcgaccaccatgtattacaccggcaagaacccgctgggtaaaattggttataagagcgaagaggtggtggtgccgaagggcgataaacagcgccgtctgcacaaagcgctgctccgctaccacgatccggcaaactggccgctgatccgtcaggcgctggaggcgatgggcaagaagcacctgattggctcccgtcgcgactgcctggtgccagcgccaaccctggacgaaatgcgtgaagcgcgtcgccagaaccgccatactcgtccggcgctgaccaagcacacgccgatcgcccatcagcgccagacgcctgccgctgcgggcgcgaaaaaacgcgttaagccgaaggccgtatcacgctaagcggctggcccggcgggatcgctcgccgggaacatctgtgaaaaaaggagagaggtgatgacgccggtcatcctgtcgcgacaacaactggaccagctctgggagatagaccgcagcgaaattatcgatacgctctaccgtctcgataacggtcagctgcgggcttatcgggaatattatgacgtgcgtggctgggaccctcacgatcgtcaggtttatactccgattcacgaggcctgttacgatcgcggcggtatttttttcgccttttttgacgatgagcagatgattgccgcagcggcgctggatacgctgcctcgcggcatgaatggcgagctgcgccagctattattcttttatgtcggggcgggaaagcgcggccagggctgggggcggcgactgtttcagtatgccctgcaccagctgccagaaatgggggcgtccggcctctatatctcgtcgatccccaacaaaaacaccgtcgatttttatctggctcagggatgtcgcttagcggataagcccgacccggcgctgtttgcgctggagccagaggatattcatctggtctgccatcgcctttaacgctgaggcgctaaaggcgatggcaagagagagcattacccgccaaactgatccgggtcaggaccgagacgtttaccctggtccagcttcgcgatcgctcccagctcatctttgtcgagacggaagtcccagacgtcaaagttttccgcaatacgcgacggcgtgacggatttcgggatcaccaccagaccgctgtcgagatgccagcggatgacgatttgcgccggcgttttgccgtacttatcggcgagctggtggatgactttttgatcgaagacgccttcgccgccctgggccagcgggctccaggattcggtctggatcttgtgggtggcgttccacgcgtgcagctgacgctgctgcataagtggatggagttctatctgattgatcaccggggcgacgccggtttcatcaatcagcttctgcagatgcggtacctggaaattacacacgccaatgcttttggtcagcccctgctgctgcagctcgatcaacgcctgccaggcctcgacgtaatggccgatagccggtaccggccagtggattaaatagagatccacatagtccagcttcagtttgctgaggctctctttcagcgcctcgtgcggccgtttttgatcgtcgttccacagcttagtggtgatgaagagctcatcgcggttgacgccagcgctgtgcagcgcattgccgacgccggtctcattttggtacgcggcggcggtgtcaaaagagcgataaccgacttccagcgccttatgaatggcggagacgacttcctcgttgccagctttccacacgccgagacccagctgcggcatcaggttgccgtcgtgcagttttataacggttggatgtgtcatgccttcctcctgttaatgaactcggcgaagcaggatccgccgaggggtagcattaagtctggacgaaatagctaaaaacggtagtaaaaacacctctccccggcgtttgtttaacgtaaggagaggtgaatcaggcggggagcgcttagcgtgcagcctcgtagatacggcggctgacgtccagggtgatatcctgatgttcgcccagtttagtcatgccgtgctcttccagtttcgccagcagcgccgggatggagctaccgtcgagaccgtaatcggaaaggcgggtcggcacgcccatctgctcgaagaactgacgcgttgcggcgatggcggcatcgatacgttggtcgtcagagccttcggtaatattccacacgcgctcggcatactgcagcagcttctcgcgcttggcatcgcgtttctcattccacagcgccggcagcacgatagccagcgtctgggcgtgatccaggccgtgcatcgccgtcagctcgtggccgagcatatgcgtcgcccagtcctgtggcacgcctgcgccgatcaggccgttcagcgcctgcgtcgccgcccacataatattggcgcgcacgttatagttctccggttcctgcagggctttcgggccatcctcgatcagggtcaggagaatgccttcggcgaagcggtcctggattttgccgtcaaccgggtaggtcacgtactgctcgagggtatggacgaaggcgtcaaccacgccgttcgcgacctggcgcggcggcagggtataggtataaaccggatcgaggatcgcgaactgcggctggacgtgcgaagacataaacgcgcgtttgtcgccggtggttttccgcgatatgaccgcgcctttgttggattcagaaccggtcgccggcagagtcagtaccgagcccattggaatggcgctggcaattttgctgccataggtttccagaatttcccacggatcgatatccgcgtcgtagtgggctgctgcagcgataaacttggtgccatccagcaccgaaccgccgccgaccgccagcaggaaggtcactttctcttcccgggcgagtttcaccgcattcatcagggtttcgtaagacgggttcggctcgatgccgccaaattcaaggacatccaggccattcagagcggtgaggacctgatccaggacgcctgtttttttgacgctgccgccgccgtaggtgatcagtacgcgggcttccgccgggatctgttcacgcagcttttcaatcgcgcctttgccaaacagaatgcgggttggggtatgcaggtcgaaattattcattgcttaagtcctccaaagagtaaaaccgtcgacagggacgataccgctgcccgatgaaggttattgtggtcctggcgccgttgaccctcaatgcacattcctgccgatgtcttgcctatttctccatatggctggagaatttgtagcggcctgcgcacaatgtacaggtgaagaaacatcgggagagacggtggcaatgcaacacgcagagatatgtcggacattaacggagaagattaacctgctgaaagataagcacgaaatgttaagttcgttgctgcctgacgtccgtttgctgtacggaacgcaaccggggccccggacgccggtgatgtatcagccggggatcgtttttctcttttcgggccataaaattggttatatcaatgagcggacttttcgctacgatacaaacgaatatttactgctgaccgtgccgctacctttcgagtgcgaaacctttgccaccccggaggtgcccctcgccgggatgcgcctgaacgtcgatatcctgcaactgcaagagctgctgatggatattggcgaagatccgctgtttcagcccgcggtcgcctccagcgggataaactccgcggtactctcggaggatattctgtgcgctgccgaacggctgcttgacgtgatggagcggccgctggacgcacggatccttggcaagcaaatcgtccgcgaaattctgtattatgtgctgacggggccctgcggcggcgcgctgttggcgctggtcagccggcagacccacttcagcctgataagtcgcgtgctcaagcatatcgaaagccagtacaccgaaaacctcagcgtcgatcggctggcggcggaagcgaatatgagtgtgtcagcgtttcaccataattttaaagcggtgaccagcacttctcctttgcagtatctgaaaaactaccgtttgcataaagcacgaatgctgatgatccatgacggcatgaaggccagcgcggcggcgatgcgcgtgggatatgaaagcccttcgcagttcagccgcgagtttaagcgctacttcggtttgacgccgggagaagacgccgcgcgtattcgcacgatgcaggggatgtaataccgggaaagggcggccgggcgggcgcaggcccccccggcaggtaagcgtcaggcgctgcaatatttctttttaatgaccacgaacagcgtgccgagcaggccagccagcagcagggcaatcggcaggatcatcagacaggtcatcacctgatcttcatggcgcttcacaaacgggatcatgctcagcgcatagccaagacccgtcaccacacagacccacagcagggcgctcagccagttgaagaactggaagcggcggttcggcaggccagaaatcccggccatggttggcagcagggtgcggacaaacgccagaaaacggcccgcgagcagcgccagcaggccgtggcggtcaaacatgcaggtggcgcgctgatggtacttatgcggcagatgcgccagccagcctttcaccgtttgcgtattgcccagccagcgcccttgcacatagctcagccagcagccgaggctggcggcggcggtcagaatggcgatagtgggcacaaagtccatgacgcctttagcaatcagcgcgccggcgagcagcagcaggctgtctcccggtaaaaaggaggcgggcagcagcccgttttccagaaacagggtcgcgaacataaccagatatacaacgcccacaacgtgagggttcgccaatgcggcaaaatcatgttgccacagcgcggcgacaatctcttgaatgacaaccatggactttcctaagtggtaccgtattgttgactagtgtactcctgaagaggcccgagcaccttgatcccgggcgcaacaaaagcggccgctttgctaaaaagcgtccgctattgttgccactgactgtcactttacacgatacgcgcgaagcccgctgctaaatccgcctgcagatcgtcaacattttcgagaccaatgtgcaggcggatcagcgtgccgctgaagtcgacttcagcatccggtcgaatgtgggcgatttgctccggctggttggcgagaatcagcgactcaaagccgccccacgaataggccatactgaacaggctgaaattgtcgaggtactccgccagttcggcatcattgaggcgcttgctgagcacaaacgagaatagcccgctgctgccggtgaaatcacgtttccagaactcatgacctttactgccgggcagggcggggtggtttacccgcgccacctgcgggtgctgcgccagccactcggcgatgcgcaggctgctttcatgatgctgacgcaggcgcacgcccagggtgcgcaggccgcggctggtcatataggcagtatcggcgtccagcatttgccccatcaggtaggcattttcacgcagctgcggccagcagcgcgcgttcgccaccgcggtgcccaccatggcgtcggaatggccgatcaggtatttggtgcctgcctgaatggaaatatcaatgccaaaatccagggctttaaacaggatccccgccgcccaggtgttatcgatcatgataatcgcttccggggcgacctgacgcacggcggcgactatcgccggcacatcgtgcacttccatggtgatcgagccgggcgattcgaggaacaccacgcgggtctcagggcgaaccagacgggcgatatcggcgccgattaagggatcgaaccagctggtggtgacgccgagtttggcgagaattttggtacaaaagtcctggcttggctcataggcggtattggtcatcagcacatggtcgccttgctcgacaaacgccaggatagtgttagccaccgccgcggcgccgcaggggaagagggcgcagccggcgccgccttccagctcgcacatcgcttcctgcagcgagaaatgggtcagggtgccgcgacgaccgtagaacagctcgccgttggcccgattgcgggtggcgtgctttttggcctcgacggtgtcgaaaaccagcgatgacgcgcgctggataacgctgttcactgagccctgggtgtactttttgctccgcccggcgttgaccagcgcggtatcaagatgtttatcagccatgttgacgaacctgtttttatacgtctggacgtctaaactaacatgaatctgcttttctgtaccagcgcaccgccgatacaggcgaaaattttaccaggcccgcggttagccgcttttttactgcgtaagcgcaaggaaaataaacgtgatttgctgcacagtgtaaatactaatgagaaccactatcaattcgatgtcgttttgatattattgtgggcagattttgtgattatcgtcgtggagatagagcgtgggtaataatttgatgcaggcggatctctccgtttggggtatgtatcatcatgccgatattgtcgttaaggtggtgatgattggcctgattctggcgtcggtcgtcacatgggccatcttcttcggtaaaggggcggaaatcctcgccagcaagcgtcgcctcaaacgtgaacagcagcagctggcggaagcccgctctctcgatcaggccagcgatatcgccagcgcctttgaggcgaaaagcctcaccacccagcttatcaatgaagcgcagaacgaactcgaactctctgccggtgccgaagacaatgaaggcatcaaggaacgaaccggttttcgccttgagcgccgcgttgcggcggttggtcgccatatggggcgcggtaacggctatctggcgaccatcggcgccatttccccgtttgtgggcctgtttggtaccgtctggggcatcatgaacagctttatcggcatcgcccagacccagaccaccaatcttgcggtggtagcgccgggcatcgcagaagcgctgctggcgacggccatcggcctgttcgccgccatcccggcggtggtcatctataacatcttcgcccgcatgatcggcagctacaaggcctcgctcggcgacgtcgccgctcaggtactcctgctgcaaagccgcgatctggacctcagcgccagcggcgtgaagccggtgcgcagcgcgcagaaattacgggtaggttgatcggctatggcgatgcgtcttaatgaaaacctggacgataacggcgaaatgcatgagatcaacgtgacgccgtttatcgacgtcatgctggttctgctgattatctttatggtggccgcgccgctggcgacggtcgacgtgaaggtcaatctgcctgcctcctccagccagccgcaaccgcgaccggaaaaacccatctacctgtcggtgaaggcggataagagcatgttcctcggcaacgacccggttaccgaagcgaatatgattaacgccctggatagcctgaccgccggcaaaaaagataccaccgtcttcttccgcgcggataaaaccgtcgattacgagacgatgatgaaagtgatggataccctgcatcaggcgggctatctcaagatcgggctggtgggcgaagagaccgtcaaagcgaagtaacctccccctttccacttttcttctcaggctggccttgcgccagctttttaataggtgacgcaataacttgtaagaccaatcttatagatgtgtgacaactttctcagttaacagaaaacataaacccgatgcgaaaaatgacaataggatagtttttatcctgcctctacagtgaataccacttcatctgagagggattatattgtgaatcacgataataaactgtcatttgcggagaagctgggatatggcatgggggatgcagcctgcggtatcgtttactcttcggtaaccatgtttctgacatggttttatacggatatttacgggctttctgctgccgcagtcggagtgatgttcctggtgacgcgggttctggatgcgattaccgatccgctaaccggcattgttgcagaccgtgtaaagacccgctggggccattttcgcccgtggcttatctggtttgccgtaccttatgccgtgctggcggtaatgaccttcacgactccggaatttggcgcatcgggtaaactggtttatgcctacctgacctacaccttactcatgctgtgttacacctttatcaatattccctactgcgcattgggcggagtcattacgcgtgatgagaaggatcgcctttcagcccagtcatatcgttttacgatctcatctctggccggtctgatggtttctgtcgcaaccctgttcctggtggattttttcggtaaagaaaataagcagtttggttttcaggcgacaatgggaatcatgggcgcgatcgctattgtaatgctggctttttgcttcttctctaccaaagaacgcgtggctccagctgttgaacagcaggggagcatacgcgaagacctccgtcagctgctggcgaatgaccagtggcgtattgtggcgataattacttttttctccagtatggccggggttatgcgcagcgccgccacgctctattatgcaacctacctgatgttaggcggtgtggagtcagcggcgggaacggccatgaaatcagcatttgtttccaccagtgtcgttggcacgattatcggcagcatcgccgccggatggctggccaagcgctatcgcgcggtatcgctgtttaaaaatatcaacctcctgctggtcctggttggcgtcgtaatgttctttgtgccgccgacctggctgccggtggtgttccctttatacttcctggtcggcttcttccatcagatgtaccagccgtttaaatggaacatgatggccaacgctgccgattatggcgaatggaagtttggccgtcgcatcacgggattatcctattccggtaatctgtttgctttgaaaatgggcatggcggttgctggcgccgccgtaggtttttcgcttgggctatttggctatcaggcgggcgtaacggcgcagactccgctggcgacaatgggaattgtggggctgttaaccctcggtccatcactatcttacctgctcctgtggtggctggcgcgtttctataagctggatgacaaaatgatgcagacaattcagcgcgagctgtccatgcgtcagcagcaggggcattcagagacgcatttgccgctaaacgccgttccggaaaaggcttgaggagatgcgaaatatgaccccttctgaataccagaatcctatcttatgcgccgattattccgacccggatatcgtgcgcgtaggcgatgatttctttatggtctcttccagttttaaccatgtgcccgctttaccgatcctgcattcaacggacctggttaattggactatcatcaaccacgttatggatgaactgccgctacctggttatgaccggtatcagccgggtaagggcgtatgggcgccgtcgattcgctggcacgatggcaagctgtgggtctgcttcagcacgccagatgaaggtatttttatctgccataccgaggatccgtggggggaatggagcgctccgcactgcctgcgcgaggccagaggttggatagatccctgcccgttctgggacgacaatggtcaggcctggttggtacatgccttcgcccatagccgcagcggcatcaagcataaactgcagttgtttgcgatggcgccggacgccagcgaattgctgggcgaagggcagattatctatgacggctgctgcgatttacctacccttgaggggccaaaggtttatcaacgcgccggttggtactacatctttgctcctgcgggcggggttgaaaatggctggcagacggtactgcgcgcgcgccagatgacggggccctgggaagccaaaaacgtgcttttccagggaaacacctcgataaatggaccacatcagggcggctgggtggagggtgaggagggcgaatgctggtttgttcatttccaggacttacacctctatggccgcgtggttcacctccagccgatgtcctggggtaacgatggctggccgcgtatcggtgagcagattggcaactgcggcgtcggacagccggttttacgttggccgcgtcctaaagggttaacgccttcaccggcattggcgccgcaaaccagcgactattttgcgcaaggccaaccgggaatacagtggcagtggcaggctaaccccagccctgagtggctgctgccagcgaaaggcgaacttcgattacgctgcgtcccattatccgaagtcgatggacagagagcgttatactgggcgccgcagctgttgctgcagaaattcccggcgctaacttttagcgcgaaaacaagcgtaacgttatatgccgctcaggacggtgatgccggaggcctgatcgtatacggcgaacgctacgccgctttgctggtggagtttgggcaagggggttaccggctcgtgtggcgacacggttggatgagcgatgcgggcgtggtgcgcgaaactcgtcaggttcttgctgagcttaagtgcggcaagtgtcagctgcaggtggccgtaggcgaaggcggcctgtgtcaattttcctggcgagccgaggaggagtggcggaaggttcctctttgttttgctgccgggaagggaaaatgggtcggcgcgaaatttggcctgctggctgcttcaatggttggcctacaaagcgagggctactccgctttgcaggactttgaggtcatactttaaagaaaccgtttctggccgcctgtagatgacgctggcggctgatgttgcataagcgtaaccctgttgcgatataatggcggccgtttatgttaactgacaggatcttatggaacgctttctggaaaatgctatgtacgcctcgcgctggctgctggcgccggtttattttggcctctcgctcggtctgattgcgctgaccatcaaattttttcaggagatcttccacatactgccgcatatttttagcgtcagtgagtcggatatgattctgaccctgctgtcgctggtggatatgaccctggtgggcggtttgctggtgatggtgatgttctccgggtatgaaaattttgtctcgcagctggatattaacgagggtaaagaaaaactcagctggctgggcaaaatggacgcgacttcgctgaaaaataaggttgccgcctccatcgtggcgatctcctctattcacctgctgcgggtgtttatggatgcgaaaaacgtcccggacaataagctgatgtggtacgtgattatccacctgaccttcgtgctttcggcctttgtgatgggctaccttgatcgtctgaccaaagtgaaacactgatcccttctctcccggcggtgttagccgctgggctgtttctccccgtttcatgcttttctgggctggcgtatgtccgggcttctgctttgcttaaagagcgcttaacaacggaggcagggtaatgacgcgattaacggccaaagatttcccgcagcagttgctcgaatattatgactactatgcccacggcaaaatcagtaaacgcgagtttctccagctggcggggaaatatactgtcggcgggatgaccgcgctggcgctgtttaatctgctgaagcccgactatgccctggcagagcaggtaccgttcaccgacccggatatccgcccggagtatattcattatccctctcctgacggtcacggcgaagtgcgggcttacctggtgacgccgacaaaaatagccgacaaagcgcccgctgtggtggtggtgcatgagaaccgcggcctgaacccctatattgaagatgtagcccggcgggtagcgaaagcggggtatatcgcgctggcgccggatggcctgagcgccgtcggcggctatccggggaatgatgatgaaggccgcgccctacagcagaaagtcgatcccgtgaagctgatgaatgatttttttgcggcggtcgcgtttatggcgaactatccacaggcgacggggaaggtcggtatcaccggtttttgctacggcggcggcgtcagcaacgcggcagcggtggcgatccccgagctggcctgtgcggtgccgttttacggtcgccagccgccgctgaaggaggtcgataaaattaaagcaccgctgctgctgcactatgccggcctcgatagcggcattaatgaaggctggcctgcctatgaacaggcgttgaaggaacaccataaagtctacgaggcctatttctatcagggcgtgaatcacggctttcataatgattccacgccgcgctacgatcgggctgcggctgatctggcctggcaacgcacgctggcatggtttgagaagtatttacgctagcgcaaccgtcataaatagcgctaccgctcgctcaaaaaaacgctatataatttattatataacgattgggagggcgcgatggaaaatcattttggcaaaggcttaatggcggggctacaggcatcctatgctgacaccgccgcgcatgcggcgaatttttgcgccgactataaacgcgggtttgtgctcggctactcgcaccgcatgtttgaaaaaaccggcgaccgccagctcagcgcctgggaagcggggatcctcacccgtcgctatggccttgacagagatatggtgatggatttcttcaaagaaggtgggtcgggtatggcgatgcgctattttctggcgggctatcggctggaaagctaaacaggacggcttcgcaggcggaaccgtcctgtggtgggaaccctttcccgtcaacgggaaagggtgaagaccttacgcctggcgcttatcttccgtttgggtgtcaaagtctcgggcatcatggcgctcatgcagctgctcattgagcgggccgttggtgcggttgacgatgcgtccgcgcttgacggccgggcggttgccgacatcctgcgcccagcgcagcacgtttttatagctcccggcgtcgaggaactccgccgcgttatagacattgcccagcactacgttgccataccacggccagacagccatatcggcgatggtgtactcctcgccggccacatagcgaccgcgggcgagctgtttgtccagcacgtcgagctggcgtttggcttccatcgtaaagcggtcgatcgcgtactcgatcttcactggcgcatagttatagaagtggccgaagccgccgccgaggaacggcgccgcgccctgcagccagaacagccagttgagggtttcggtgcgaccggcaggatctttcggcaggaagaaaccaaatttttccgccagatagagaagaatgttgccggactcaaatacccgggtcggcggcgtggtggaatggtcgctgagggccgggatcttcgagttcgggttgatctcgacaaagccgctggaaaactgatccccttcgccaatgcgtatcagccaggcgtcgtactccgcgccgctgacgcccagcgccagcagctcttcaagcatgatcgtcaccttctggccgttgggtgtaccgagtgagtatagctggagcggatgggttcctaccggcaggacgcgttcatgagtcgcgccggaaacgggacggttgatgttggcgaacgcgccgccgctgttttgcttccattcccacacttttggtggctggtagttttgctctgacatgctggtttgcctttttcgtggatgtacaaaaagtgtagcaggtgacctcaggccataatccgcgcggcccacacgctgacatcatcgccgctgcccagatccggctgcaccaggccgttgaccataaaggtcggcgagacatggatgccgttctgacgggcgtatttactgtgccacttgatcacgtcctgcagctccgggcgggcaaaggcggcccccagcagcacgtgactgtagcgttcaatgcgctcaatgatttgctgcggcgtggcgttcatgttcggcccgctgcagtgatcggtaaactcaaactcttcccgatggtcggccacggcctgcatcaccttatgcgcctgctctctgccgtgcggcagggtggacgcggcgaggatgcagcggacgataaccccggagaacagatgccacggctgcgactgcaggcgtatcttgattgtcacgttatcggcgccgacctcatcgagcagatcgtcgagtttattaaacgcgcggacagagtaggggcaggtgggctcaaggaacacctcaaacgtccgcgggccgtgtccccagaccagcggttgggcattcagatgcgagggtgtgctcattgtcgactcctgatgttgcgttgtttttttgttatatcaccgataacgatatcacttttgtttccggctgcagggttattttccttaacggcacgattagcgaaacgaatgagtggtatcatcgttacacctctgtctggtaagtgcctgcggcaggataagaagagggagttttgtttcgccaactgcccgggctgcattaatttgaggtcaggctaaatgagcaaaggatcgacaagcagtgacgccccgtttgggacattgttaggctatgcacccggtggcgtagcgatttattcatcgaattacagtagcttaaatccgcaggactacccggatgacgcgacgtttcgcagctacatcggcaatgagtatatggggcataaatggcagtgcgtggagtttgcgcgccgctttctgttcctgacctatggctttgtcttcaccgatgtggggatggcttatgaaatcttctccctgcgtttcctgcgcgaagtggtcaatgacaatattttgccgctgcaggccttcgccaacggctcccgccgtccgcctatcgctggttcgctgctgatctggcagaaggggggcgagtttaagcacaccggccatgtggcggtgatcacccagcttgtcggcaataaggtgcgtatcgccgagcagaacgtgattcactcgccgctgccgcagggccagcagtggacccgcgagctgaccctcgaggtcaacgacggccggtacaccatcaaagatacctttgccgataccgaaattttaggctggatgatccagaccgctgataccgaacacagcctgccgcagccggtgctgccgggcgaggcgatggccatcaaaggcgcgcggctgccaaacaacggccagtttcgcggtaaatggctgaacgagaaagacccgttgcagaaagcctacgtggcagccaacggtcatttcatcaaccaggatccctatcagtatttcaccatcagcgaaagtgccgaacaggagctgatcaaagccaccaacgagctgcacctgatgtatctgcacgccaccgataaggtgatgaaggatgacaacctgctggcgctgttcgatattccgaaaattctctggcctcgtctgcgcctctcgtggcagcgccgccgtcatcatatgatcaccgggcgcatggatttttgcatggacgagcgcgggctgaaggtgtacgagtacaatgccgattccgcttcctgccataccgaaggcgggctgatcctcgaacagtggctgaagcagggctactacggcaccggccacaatccggcggaaggtctgctcgatgagctggcgggggcgtggaaacacagccgggcgcggcccttcgtccacatcatgcaggacaaggatctggaagagaactaccacgcgcagtttattcagcgttcgctgacccaggccggttttgagagcaaaattctctttggtcttgatgagctgcgctgggacgctgccggtcagctgatcgacgccgacgggcggctggtcaactgcgtctggaaaacctgggcatgggaaaccgccattgagcaggtgcgcgaagtcagcgccgaggagtacgcggcggtaccgattcgaaccggacatccgcagaatgaggtgcggctgattgacgtcctgctgcgtcctgaagtattggtattcgaacccctgtggacggtgatccccggcaacaaagccattctgccggtgctgtggtcgctgttcccgcatcatcgctatctgctggataccgattttgaggttaacgacgagctggcgaaaaccggctatgcggtgaagcctatttccgggcgctgcgggaacaatatcgacctgatcggccctcaggatgaacttctggataagaccagcggccagtttgtcgatcgcaagaatatctaccagcaactgtggtgcctgccgaaagtggacggtaagtacattcaggtgtgcacatttaccgtcggcggtaactacggcggtacctgcctgcgcggcgattcgtcgctggtggtgaaaaaagagagcgatatcgagccgttaatcgttttgaaagacaaagcatgacgtacgaaacccgggtagcggcatacccctgtccgggtgacaacgtactgaaaaggatagccccggcatggtaagcgccgccggggagcacctgcaacaaagccaagataattaacacaacaacaagacagaaaaggaaaatagtatgcacgatcggcgtctcgccgcccgcgcgggtgaactcaagccctccgccgtccgcgaacttctcaagcacagtaaactgcccggcgtgatttcgcttggcggcggcattccggccccggaactgtttgataccgaaggcctggagctggcggtgcagaaggtgatgagcgagcgttttaatgacgcattccagtacggtctgacggaaggctacccgccgctgcgccaggcggtgagtgaaatttgccactcccgtggcgtcgcctgttcagccgcccaggtctatatcacctccggctcccagcaatcgctggatatcgttgcccgtacgctgctcgatccgggcgatactatcgtcgttgagcgtcccacttatctggcggcgctgcaggtatttcagctggcgcaggccaatattctcagcgttgacaccgacgatgacgggatgctggtggagcagctggccgacctgctggagaccacccgcgtcaaagctgtttacctggtgccgacgttcggcaatcccggcggcaaaacgctgagcgaggcgcgtcgtcgccggttggttgagctggcgaaaaaatatgatttcgtcattctggaagacgatccctacggcgaaattagctttacagacgccgttcggcgcccgctctatcagcatgctgtcgagctgagctgtgaagatcaggtggtttacacctcgactttttcgaaaatcctcgcgccagggatgcgcatcggctggatcgtcatgccggactggctggcgcagcagacggtgattgtgaagcaggcggcggatctgcataccaatatgctgtcgcaggtgatcactgcggaatacctcagtctgaaccggctggataaccagattgcgttgattcgcgaagactaccgcaagaagtgcgtggcgctggccgatgcgctggaaagccgccttggcgagcacctggaattcagccgcccgcagggggggatgttcctgtgggcgcgtttccgctatccgttcgataccatggaatggatgaagaaaacgctggaaaacggcgtggtgtacgtcccgggtgaagcgttctatcacgataagccggatacccgtaccctgcgtctttcttactccacggtgtcagaagccggattgctgacggccgttgagcggctggcggcctccctgtaacgtctctgctgtgcgccgcttttcggcggcgcgcagccctgcgtgacgttaacgtccagcgcagggtcaatccgtttcggcgatccggtcatcgagccagaccagcatcagcgctgcgagaaaagccagcgcaaaggttccaataaacaaccacatagacgtccctcgcgggttaattattttgctgattctaccggagagcgatcgttgcggtcggcgatggagattttagttccggcggaatggctggcgagagagaaaaagtcatcggcatcaatatcgaagttaagaataatttccctgtattttccaccgttaattaacgctttggcttctttaacactactggcaataatgacaggcatcagttttatctcattttgaaaactgtgaagcaaaataagagttagttcgtaccagatcaactactttttatcgtattccgccgcagaaaaaacgtcgtactgtgacgcgacgacgaccggatattttgtgacagcgatccggtcatcaacagcacaatcttattcgacgctggcgatatgctgcaattttgccaactcgtcaggatgatttcccctgttgtttttcgcgcaatatctcgccgcagcgctgcttgtcctgacgcagcacctgctgttcctgcgggctgagctggcgccaggtatccagcatccgctgccccagcgccggaaggtaatgggttttatgcagcgcgtagtcagaatttcccccctcgacgatattctgcatatcgtggaggaactggcggctgtcgtcatgatcgattatgcaaaataccgcccggtagtaagcttcatcttcctcggtgtaatgcggggtgaaccaccagaccagcagcgcgataagcgccagtagcgggataattaaggataattttttcaacatcagtttttcggccggagacaatcagccgtcagtgtacctgcaacgacggcctgatgtaagcgccggccccggcgggccggcacaggctagtagccgaccgggtagatgcggccggtctgaacgccttcaatgctgcggcgataggcctgcgccacggcggcggcgggaacgctggggaagcctgggaaaaagtcgccgtaggccgccagcgactcgctgagcacggtggggctgatgagattgatgcggatcccgcgcggcagctcgcaggcggcggcgcgaacaaagccttccagaccggcgttgaccgtcgtggcattgaccccctgagcaatgggttcctgcgcgacaataccgctgaccagggtaatcgaccccccgtcgcgcagaaaatgctggccgaccagcgccaggcgaatttgccccagcagcttgtcctgcagaccgaggttgaactggctgtcggtcatggtgcttaacggcccaaagtgcagattgccggtggtggagacgatggcatctacttcacccgtttgggcaaatagcgcctcgacgctctcctgcgaggtgatatccacctgataatctccccgggtgcggccgacgcggataacgtcatgtctctgactcagttcttcgctgaccgcgcgaccgatggtgccgctggcaccgataacgataattttcatggcagactcctgatgaggtgagaggctattttttaataaaagtaatctcggataaactggctaaaagttagaacattactaaccagaggttagcaatatggacaaattacgagggatggagacgtttattgccgtggtggagtgcggcagctttaccggggcggcgtcgcgcctggggctgtcggcggtgatggttgggaaatatatcgcccagttggaaagccagctggcgacgcgtctgctggagcgtaacacccgacgccagagcctcaccgacgccgggcgagtctattttgacgaagcgaaacgggtgatggagcaggtctccatcgccgaaagcgcggtcgagcggctgcggctggcgccggccggcaccctgcgggtgagcgctcccacctcgttcggcgccagcgtgatcgcgcccctgaccgccaccttcctgcaggtctggcctgcggtccgggtggaactggatctgactaaccggatggtcgatctggtggatgaggggttcgatctggcgatccgtatcggcgagatccatcaggaggatctggtggctcgctacctggcgccgtatcggatggtgatctgcgccgcgccggcttatctggcgcgttacgggacccccgggacgccagaggatctcgccgatcatctctgcctgtcccatacggtctggaccgcccgcaacgagtggcggctgccgggcgtagagggagaagtgcgctggaaacgcgatgcggttttgcgctgcaacgatggctacgcgctgcgccaggcggcgatcgccggggccgggctgctgatgcagccggaggtactgctggccgatacgctggccagcggcagcctggtgcgcgtgctggaggcgtggactccgcagccgcggcctgtgcatctgctctggcgccaggatcgtcggcccctgccgaagctgacgcagtttatcgcccaccttcagcagggaatggccgacgcgctgacaacgacccgcgcgtcggaataatcactccgcccgcagcgcctgctgccagtcggcaatcagatcgtgaggatcttcgatccccaccgacaggcggatcagctgcggtgtgataccgttcgccaggcgtttctccagcgggatcgaggcatgggtcatgctgaagggctggctcaccagactctccacgccgcccaggctctccgcaagcgtaaaccagcgcagcttgctgatgatgcgctcggcgtaaccttcatcgcccttcaccaccaccgaaatcatgccgccgggcagggccatttgctggcgcgccagctgatgatgcgggtgcgaggccagccagggaaaccagactcgctccacttccggctgctgttccagccattcggcgagctgcagcgcgttcgcgctgtggcgctccatccgcagcgccagggtacggatgccgcgcagcgtcaggaagctgctgaacgggtcaagcacgccgcctaccgcattctgcagatagccaagcttttccgcgagcccggagttatcgccaaccaccgccaggccggcgacgacatcggaatggccgttgaggtacttggtcgcggagtgcaccacaatatcaaacccatgctccagcgggcgatggatcgccggcgaagcaaaggtgttatcggcgacgctgatcaggttatggcggcgcgcgatggcggcgatggcgctgagatccgcgagcttcagcagcgggttggtgggcgtttccacccagatcatgcgcgtatcggggcggatcgccgcttcaattcccgccaggtcgtcgggtttcacccagctcacctgcagaccagcgctacggcggcgaacgttttccagcaggcggtaagtgccgccatacacatcatcgaccgccaccagatgactgtccttatccagcagctccagcacggtggagatggcggccagcccggaggcgaacgcgtagccgcgcgtgccgttttccaggtcggcgatcgccgtctccagcgcgtgacgggtgggattcccgctgcgggaatattcataaccggtatgctgccccggcgctggctgagcaaaagtggaggtggcataaatcggcggcatcactgcgccatggctgtcggtgaaggttccgctatgtacactcagggtgtggatagatgacataaaaaattccttattgtgcgactcggttacgccaggcggtcaatacatcgctgcgggtgaccaggccaagaaaacgcgtgttgtcagcgatcaccgccaccagaccgcgatcgagaatggcctgcagttcactctctggcgcacgcttatcgagagtttcaacatggcggctcatcgcttcgctgaccggcagggagaagcgttggcgatcgccctgtacgtggcggatcaaatcccactcatcgacgatgccgaccacgcggccatcctccagtaccggcagttgggagatgtcatacagccgcatgcgggtaaagaccgcggccagggtgtcgtccggcgcggccgtgacggtagcgccttcgtcatggcgcagggcgataaaatcactgagatcgccctgttcggggcgggcgatcagtccttgctggcgcatccagtcgtcgttgaacattttggacaggtatttattgccgctgtcgcaggcgaaggttactacccgtttcggacggctttgtgcccggcagtagcgcagcgcggcgctgagcagggtgccggtggaagagccggccagcacgccctcaacctgcagcagctggcgcgcggtgtggaacgcttcgcggtcgctgacgcgatacgcggtatgtaccccctccagcctggccagcggcgggataaaatcttcgccgatcccttcgaccagccaggatcccgtttcgccgtagcgtccggtatcgacctgatcggcaaggatcgaacccgccggatcggcgagaataaattccgttttcggcgagtgctcagcaaaccaggcctgaagcccacccagcgtgccgccggagccgacgccgacgacgatggcgtcgatgtcgccctccagctgctgataaagctccggcgcagtggaggtggcatgggccagcggattggcgtcgttattaaactggtcgatataaaatgcgcccggcgtttcatcggcaaggcggcgggcataatcctggtagtaggccgggtggcctttattgacgtcggagcgggtgagcagcaccgtcgcgcccagcgcccgcaggtgaaagattttctcgcggctcattttgtccggcaccaccaggatcaggcggtaatttttctgcgccgcaatcagcgccagaccgaggccggtattgccggcggtggcttcgataatcgttcccccgggcgccagttttccctggcgctcggcttcattaatcatcgacagcgcaacccgatctttaattgacccgccggggttctgattttccagttttaaaaacagactgcagggcccggtatccagtttgtgcaactggagcaggggagtatgaccgatcaggtcgctcacggaatgaaacagtgacataaccatttacccactcgtttaagatatttttgcatactagaactgtgaaaacggttatttaaagaatatttctctgtcatttagcgcaaaatggaatataagatgctatttggccatctggagggaaagcagggcagccacctgggcggatcgatttccagaaaagggcgtttttagccgcttttagcgggaaaatggcgattttaatcagtgtgttatctgatatctgaaaatgtgtttgcgaaaagattctatggagaataggcctgcgcttgtcgttaactagcagcgggctggccaggagaaaaacgcagcagggaaatcacgggttaacgcagttcgatggagagtccggatgcagaaaagcaaaaacccgccttgtgggcgggttctttaaatagtggtgcccggactcgggaacattcagtactctattaacttgaaatttatcataaatctgtttttggttgattatcaaaactcagatttagacccataattttactttcaaatcaaaatactagatttgaatatttaaaggcatgtccggttcgatactccgattcgattccttataaatttatcgtaatgacatctgcgttacgcgtgttgtatacttaatatccacagaaacacaagaggacaagacgatgccagccgcaaacagcatgtccataaaacgcgaaacgttaaatctgcgcattaaacctgccgaacgcgatcttattgatcgggcggcgaaagccagagggaaaaaccgcacagactttgtgctggaggccgcccgcgctgccgctgaggaagcgctgattgagcaacgcatcattatggccgatccgcaggcttatcaggaatttctcgctcgtctggatcaggctcctgcacctaatgccgcactgcgtaaaactatgcagacccctgcgccgtgggaacaggaagaatgatctcggcaccagaaccgcttcatgccgggcatattcttaccccgttttgctgcggtatagattccatggatcactggctgaaacagcgggcgatgaaaaatcaggttactggcgcatcccgcacctttgtctgctgcgacgacgcgaaggtgatggcttactactcactggcttccagcgctgtgacgacaaatactgcgccgggtcgttttcgccgcaatatgcctgccccgatcccggttgtggtactgggtcgtctggcggtggataaatcactacatgggaaaggtgtcgggcgggccctggtacgtgatgccgggctgcgtgtgattcaggtggcggagactatcggcattcgcgggatgctggttcacgccctgtcggatgaagcacgggatttttacctgcgggtggggtttgagccgtcgccgatggatccgatgatgttgatggtgacgttgagggatttggttaatgcctgatgggtattatttataattacaagggaatctgaagtgtttgttaaacccgtagcgattcagtcccacatgtatcgtcggtcagattatcaacctgggaccacggtcccatctgctcattttagtactatttagtctgtgactatggtcccaactgacggtcagaaggcttccaactgtatgtcaaatttatgcataacagtctgaaccaagtaatgcagatttgtcgtaccgtgactggctatcaagctctttgaacgcgaatagacgtggatgcagatctaagtaataagctccccgctgtagctgggaaaatccgacaaaggatgttctatatggactcacaggatgtattgtatatcgtccgatgttacggcgtcgtcaagcggtcctttaccgctccaggtcaccaattagcatatggaagcttaaaggtcgccgatggcgaactagataaggttgcctgcaaaattcaccgcacaggtgaaaacagcccagttagtcacgacaagccataaaattaaaatgaattgacgacgccgtgcaaatcacattttatcgccgctatgaacgctgtgttccggaaacggcaaaacggggaggggatgaataaacctgcatgttctaagtaataatttgttgctatgttgaacgcgaaggatgataattgctaacaggaagctaatattactaaagggaaatttagatgccttcaattctcgcaaggttgtcagtttgtattattctgtcattgtttatggtttcttgttcgggaagttttgataaaactattgattatcaagacgctaaacagatgcccggctatgggtatatagtcatggatttcagactggcaaatgaaatggcgtatggcaatggctatattccaggaaaaacaaactatacaatttcttataaaaataaaggtgatattttttttgttgatattcagcatgctgattttcgtaatagaatattaaaggcatacataccatatatgaaaggctataccttaataggtatagggagaagttattggtatcctttttttagatgtgataaatgtgacaatgagccacagttaaaatttttatatataaacattgtaaaatcagtggatgaagcatggtgtagtgaaacaacttataaaaatttacgatcatttaatgcaatggacggttgctcccaaatggtaggtgtagaagaatctagaaaagttacaggagatgttcttatcaccccagaattaaaatctgatttccaggggatgttcaccccttatctgaagccaggacgttaatcacgaggctcttaagttgatctcctcccagaaaagagtgacaggataaactgaagtctacggtttttcttccatctcacagagaggcatatcgccatgaaaaagacccgttataccgaagaacagattgcatttgcactgaagcaggccgaaaccggcatctgtgtcggggaagtctgccgaaagatgggcatttctgaagccatttttataattagaagagaaattcgctgctctgggcgtaactgaacttgaattgcgtcgtctgcggcaactggaggatgaaaatcagcggctgaaaaagcttgtggctataagacctaccggggcggagtcagctcaccctcagttgtaccctcgcaatggacatgatgcgggttgaagttgattgagttgggtggagttaagggattgaagagatgttgatttctgcgggcttggaatgcaaaaacggacctccgtggaggtccgttgctatgaatttggtgcccggactcggactaacgccgcaggcgttgaacagcgcgcgtgccgcgctggccccgaaggggtgagccgctgtgcggcgaataatcgaacgcagttcgatggagagtccggctacagaaaagcaaaaacccgccttttgggcgggttctttaaatagtggtgcccggactcggaatcgaaccaaggattcgtttctacgactgcgaaatcaccgaataacagtaagttacctttacgcttcgattccgactgtaccactgttttgtaccagcaatcaagattgcgttagacacaattactgataacgtggtctgctaacttgtcatgttcagcaatcattttatccatcaagtctcgttggtttttggcccatcttcctgccgtgagaactaagtttgttggacgtacagtctgaagatacttcagaggaacactttgtatgatgctgtcaggtgccatgacgttcatatcttcaacctttgcaactggatctttagtaacgaagtcaggtacagcattataagaaccaatagtacgtaagcttgggatcaagttgttttcaacagcatcactgattacatttctgtgggctaaatccgctccaacttcagccgagacactagatccctgaggttttctcatgtcgaaaccattgaaaacccatccagcaaactttggtttaccttttgttggtaaaaggctgtccgccgcgtttccactaagatagcgtgaagtaccttgatcccagtcggttgcaaacttaggtagcatttcaccaatcaagccaatgcaatacgctgagaacatatctgcggtacaaggaacaataaagtaatcggaacagtagagggctgaacgaaccaatgtattgaaagatggcggtaaatcaatcagtacataatcatacttgatgtcggttgcttgctctgctgcctgtgaaatcagatgaggcatcaagaaacgatagatgcttgtacctgcaatcagatcggtaccaacattgagtgtgtctgacaggttgttaagccaaaaatcccctgcaacgatatcaaattgtcctgagccttgcggcatggggtatttgggatggctgataataacttcgggttgtctattttgctgaatgtaaggctgcccgaatgctcgtatggtctgtccaaaaggtacttgggcatttttttctaaaagccgagcaaagttctcatcacccaaagtggctatagaaaggttgcactgcggatcaaagtcaatcagtagaacggatttgcctttggctgccaaggcaacgctaaggttccacgtaagtgtagttttacccacgccgcctttgttattaaaaagagataaagtaaccataacgtactgttgcccctaattttatcgtttagggaatcactttagcataagctcttacccgtggaagggcatatcaaccgaattcctctttgaaatacgacagtaatcaaagaggagtcagattcatgctgtggtcagatgatcacatcacgttgcaggaatactcgccacttcccccacttatcattttgagcgtgaattttttatctgctgtgtagtcaacgttgaacgcaatgcccagactggagaatgtcaggctgtttaccccctcattatcctctgcacccatgaagaacttagccctccgtgttccgtttggggtagacaagtcggcccaaccaacttgctcctgttgcttgagcgtgatgtccacagtggtgttgttttcgcatgagagctttacatatacgtcgtcagcggctgttgcggtggtggaaatgcttgcgagcagtatggcgattaagctgattgtttttctcattgaataattccttttgattgctgtttagttgtcagattgattacgcacaatccggtaaatgctggtgataccgattcctagctgacgggatatttcgggtttgcttagcccttgatccagcatctcgataacttcctgagatttgctgcgagccgtagcctttctgcctttgtactttcctttgattttcgccagtgctattccctcggcctgacgttccagcatcatttcacgttcgaacgtagcaatagccccaatcatggtcagcatgagctttccggttggtgtggccgtattgatgccgatgttgagaatattcaacgccacgcctttagcttgaaggtattccgatatctccaacaaatggcgggtgttacgtgcaagacggtccagtttcgttacctgtactgtgtcaccttcacgaacaaactcgagcattgcctgtagctctggacggtcatctttcgccccactgattttttccctgaatatcttctcgcaaccggacaaggcttcgagctgtgtatccagactttgcccggtggtggacacgcgggcgtagccgactgttgccatgcagactccttaccctgccaatagaccatgctacgatgcaaagacctgccaaaacgccaaaacaaccctgtggcatggccttaacgggcattccatcgttgtgtcagcggcagatctttagggcatgggctattggtatgggtctagcggtagtaggggattagaggaaatcttcttctgaggcgtagcctgctgccattccccggaagaagactgttgcaaaggtcgtcagggccattatcagggcttcaacaagcaaggatttccagttcatagccagcctctttctgcgaatgaaactgtttgaccaccgcccacgacgatgtgatctaccagtcggacttcgattagctccataactttctgaatattgagcgttatcgctttatcctgaacggatggctcggcgttgccagatgggtgattatgggaacagataacagctgcggcgttgagcttaagcgcctgccgggcaatctcgcggggatagactggtgttgtcgctatgctgccgtggaacatttcctgatagttcaggacgtgattccggttgtcgaggaatatcacgctgaacacttcctgctcccggtcgccaagctgtaaagccaggtagctcgcggtgtcctgcggtgatgccagtgtgtcggtacggtagagccgttgagtgaggatttcgcgggcctgattaatgatttcatcatgcatgattcagcctcctgtggtgatctgcatatttcttgtacctgtggagcggggaatcttggaaaggcggcttggacgagcggctttggatgcctgccagacgatctatacgggcccgtgagctgcgtttaggagtgattcatgcccttaagtgcagaaaggtcgggagaggcctacagggcgtctggtggcttctgacgtgaaaagaacttttgggggagtggaggcagcaaaatcattaagctgtcgctcagttcgatgtatggatatgacggaaactttgcacttttgggaaatgcgagtttgtattgatagcttaaggataattatctgtaggatgctatgattaagatgaatttgagtaataaaaaatgataaaaccctataaacctatataagtgtcttggggttaggttacaaaggttacaacgtttgggcagggggaaaagcctaatcccttaggcttttgatgtaacttttaagcaacttttctgtttatatgccgtatgacctcaattttgcacgctggaagcatctgtcacggcatatatcaaaggggatctccagcctgtctagcagtttacccatttcactgaggggctgctttggacttttcagtaggaaactgcattcgttatgggctgcgtcataggccttttgggccgacttgctacttatctttaacgttgatttagaaaggctgatacaggccattcgcaggcagtgagcatagcaatcctcaatactgacgaagcgctttagctggcggacggcctccagccatacttccatctcttcgtgtctgaccctgattagctttacgtcgggtagatttttccgcagccaccgatctcgccgtttatcattgagctgataacgcgtcgtccggtgggcttcctcgtcaaattcaataatgaactggcgtttagcggtttttccttttgccatatcggtgtaccactgctcggtgaggaagaaatccacccgataacggtcaatttgcttttgctgtataagctcatagtggacgaaatgcggctgttcctttagttcgactatcaaatcgcgtaatttgacagcaaattgcccctcaagacggctttcaccgggcctcactggcagtgtcagacctgatttttgctcaatcgcatcaatgagaggtacgttctggctgggatgaacgctgtaagtcagcattgcaagggcatctccagcggaaagccagccgtttttgtcgggaatttcagcgtcaataaggccggatgtgcagcacgacaggacatcctcgggagccttgagcaatctggcatgtgtccgctgtacccattgagtaaatctggctgcctgaggcgtcactttccgcaagaaagcaacggaaatttgggggcccccgccaactatccgccagtcattatctggaatttttagcatatcgatcatctccgtagttaatctgctgattcatggcttgtaccgttagaggctccagtccttgattcggtgaagatttaactttgggatagtctcgatagctgccagcttcgtttctactggcttgtcaccataattaccgctttcattttgctgtgggccgatgtggcctgtgatgctatcgcgaatgtccatcgcaattccggctcttcggcagttcgtgatgaaggtatggcggaaactgtgcgttggtgatatttcgtcacgctcaatgccgttgtttctgatgtaacggctaaatcgtttagcgaaattggttgagtacttttgctcagcaagggctttgtcggaaaacagaaagccattcctgcggctgacgaactcagagaagcccagctctagaacatgcaacggtactgggacatagcgtgtcttgcctgtcttgatggactgcgtttcgttttcctgtaatttcatacataaaacgccatcgcgatgctgaatatcacgcttgtgtagctgggccacttcttcaacgcgacaacctgtgtagtaaaggatgatgggaacccagtaatccatatcttcgtaaggtgctgcctgtccggagaatacaggaccggaaaatatccgggtcagttcctgcgaagtaaaaggtttatcgctattgtcgcgggctgtgcgggcaggtttacgtacatcccgcacgacattgtgtttaagccagttaacgtatatagcgtgttcgaagaatgacgacaggtgattgagcatgtttctgacccggtctggtgtcagatgccctttgttctgtagggccagcttctggctcaatgttaacgctcgttctttcttggtcagatttttcgggtacttcgccaaagtatcccgaaatttaacaatatgatcggcggtaatgtcgtcaagtttaggattgccgtttatctcaacaaagcggtccgctgctgctgcgtaatctttgacgtgtgccagagcttttttatctatggtttcagcatcggaagggcatttgaactctttgtatgcttcaaataattgggtgaaggttttttggggcgcttttgcttctggtagcgaacttagccctttggcctctgcgagtcgtttggggtaaaggctgaaaatgaacacattcgttaaatcattgctgcgttcagccagtcgccgggcaaggcggttacgccagaatggcggcaattcgatgctgctccattcctgtgcttcctgaagctcaagagccatcaacttgcttagggcttcatcattcacgtgcccggcttgttcgctggattcctgtctatcaagttcttccagtatgtcgcaaatccgctcgatgccggggcttcggatcagtccatactcgtaatcgtcaatcagatatcgctctttgatgaggtcatcctgcggcatgacatgggatgtccacaggttggcgattgactcgatatctttatcggtgaatgacagttcagcttttagctgcctttcggctttagcaatggcattttcgaatcttaaccatacagccggagcttttgacagagcttcgttatagtcggctgtgccaagagattctttcagctctactttgtcgcccatgagatgacggagcctcgcggggatgaccctgcgaacaccatagaattgggacttgtctttacgtttatagaggcctttcataatgaccattttgtaccacctttttgtaccaccgggaagcggggccggaggagagataaagacggtaactactggtaaaccaacaagttgttgactcagaaagcaaaaacccccgcctaagcgagggttataaatgagtggtgcccggactcggaatcgaaccaaggacacggggattttcaatcccctgctctaccgactgagctatccgggcaacggggcgcattaaaccgtaatcgccgcgcctcgtcaacgaaatttatctgttttgcagcagactgaacaatctatcaccacattgcgctaaaagcacgcgttttcaggcaaaaaacagcgtccaggccgcggaaatcggcatcgccagcaccagcgcaggcagcatattcactacggcaaacatttttatcccgcagatgcgcagcccggtggccaccagcagcatgccgccgacggcgctgaaatccgccagcatcatcggcgtggtaagcggcataatgatcgccgcgcaggctgcaagagtcagctggataagcagcatcggtacgctgatggcggcgacggcaatgcccagggtgcaggcgaagatggtggcggtgaaaaagtcgagaaacgctttggcaatcagaatgctggcgtcgccggtcatcccttcgcgcatggcgccgaagacgccggtgccgctggcgcagaacaggacgataatcgccacatagctctgaatataagactcatgagccgaagcctttttcttgcctttcgctgacatcaactgctggagtttactgaccagcgtattgatgcctttttccatattgcatatttcgccgagcagcgtccctaccagggtcgacagcaccatcaccggcagattggcgcacttaatgaccagtaaaatgccgatgcccaatgacgccaggccaaaaatagaggtcattgcggtgcggatccgttccggcaaccgttggctgagtaaggcgcccagcacaccgccgaccagcaccgcgctggcgttaataaaaggtcctgtaaccacgctgactcctgttaaaaatccctgataaccgcattattatggcgttaacttaccgggaaagcttgtgtatccgtgatataagtgcatacggttttcatcttgcgcctgttcgggaaaggtgccatgattgcgcgaattttctcctccctgatatgaggccgccgatgacgacacagccattatctcgccagcgacgccgcgcccagatgcgcgggctgcctcatcttgctacgcttacccctctgttcaccatgcggtgaaggacacgtatgctcactgtagggcaacagtaagatcggacgcgtctgcttttactgatgtccggcggtcggagctgaatccgtcagacccggacacatcgttgggcaaggtctcccttgtctgagatttttacactcccgatacgggcatttgcgcttatgaaatccatgcacattgccgccagctgcgagctggtcacccgcttgtccacccaccgtcgcgttgtggcgctggacagtaccgattttaccgatgtggcggcagtcgtcatctccgtggccgacagtcgcagcggcatccttactctcctcaggcgtagcggatttaacctgccggtctacctgctgagtgagacggcggtcgacaagccggagggggtgcaggcggtgatcgccggtaaagatcaggagtggctggagctggaggcggcggcctgtgattatgaagcgcgtctactgccgccgtttttcaataccctgacccagtacgtcgagatggataacagcacctttgcctgtccggggcatcagcacggggcgtttttcaaaaagcaccctgcaggccgtcagttctatgacttttttggcgaaaatgtctttcgcgccgacatgtgcaacgccgatgtgaaattaggcgatctgctgatccacgaaggatcggccaagcacgcgcagaagttcgctgcgaaggtgttcaacgcggataaaacctacttcgtcctcaacggcacctcggcggccaacaaagtcgtgaccaacgcgctgttgacccgcggcgatctggtgctgttcgatcgcaacaaccacaagtcaaaccatcacggggcgctgatccaggcgggggcgacgcctgtttacctggaagccgcgcgcaatccgttcggctttatcggcggcattgacgagcgctgctttgatgagcattacctgcgggatctcatccgcgaagcggcgcctgagaaagccaatgcctcccgcccgtttcgtctggcggtgatccagctggggacctacgacggcacggtctataacgcccgccaggtggtggataagatcggccacctctgcgattacatcctgttcgactcggcgtgggtgggctatgagcagtttatcccaatgatggccgactgctcgccgctgctgctggagctgacccccgacgatccgggtatttttgtcacccagtccgtgcacaagcagcaggccggcttctcacagacgtcgcagatccataaaaaggataaccatctgcgcggccaggcgcgtttctgtccgcacaagcggctgaataacgcctttatgctgcatgcctccaccagcccgttctatccgctgtttgccgcgctggacgtcaacgccaaaattcatgaaggtgagagcggccgccgcctgtgggccgagtgtgtggcgctgggcatcgaggcgcgcaaagcgatcatcgctaactgcaagatgatccagccctttattccgccgacggtggcggggcgcccgtggcaggatcacccgaccgaggcgatcgcccgggagcgccgcttcttcagcttcgaacccgacgcgcgctggcatggttttgaaggctacgcggacgaccagtattttgtcgacccgtgcaagctgctgctgaccaccccgggcatcgacgcggagagtggggagtacagtgagttcggcattccggcgactattctggcgcattatctgcgtgaaaacggcatcgtgccggagaagtgcgatctcaactcgattctgttcctgctgacgccggcggaaagtgccgaaaaaatggcgcagctggtagcgatgctcgggcagtttgaacagcatattgaagcggatacgccgctggccgatgtgttgccgaccatctataacaaatatccggtgcgttatcgcgactataccctgcgcgagctgtgccaggagatgcacgatctgtacgttagctttgacgtgaagagcctgcaaaaagagatgttccgtaaacggagcttcccaagggtggtgatgaatccccaggatgccaaccacgagtttattcgcggcaacgttgagctggtgcgtctgagcgaggcggaaggccgcgtcgcggcggagggggcgctgccgtatccgccgggcgtgctgtgcgtggtgcccggcgaggtctggggcggcgccgtgctgcgctatttcctcgcgctggaagagggggtcaatatgctgcctggcttctcgccggagctgcagggggtttacagcgagacggatccggacggcattaagcggctgtatggctacgtgctgaagggataaaaaaacgccccgccgaacaggcggggcgttttacttttgccgatcacacgctctgctgggcggcggtcggttgtctgacgtgtttgtatttgaacagcgccacgaaggcaaaggccagcaccagcgaatagccggcgaaaatcagccacacgctctgccagtcagtgatcccctcgacggtaaagtgttcgacgactttgccgctcaccatcccgccgagaatacagccgaagccgttggtcatcatcaggaacatcccctgagcgctggcgcggatttccgggcgcacctctttctcaacgaacaccgaaccggagatgttaaagaagtcgaaggcgcagccgtagacgatcatcgacagcaccagcagtacagtgccgaacggcgtcgggtcgccaaaggcgaacaggccgaagcgcagcatccacgccacaatactgataagcatcacattcttaatgccgtagcggctaaggaagaatgggatggtcaggataaacagcgtttcggaaatctgcgaaatcgacatcagcactgacgcgtgctcgacgataaagctgccggcaaacagcggatctttatcgaagctgtgcaggaaggtgttaccgaacatgttagtgatttgcagctcggcgccgagcatcatcgagaagataaagaagatagccatacgcttgtttttaaacagcgcaaaagcgttcaggccgagcatctccgcccagctttgattgcgctgggcgttggcgaccggaatatgcggcagcgtcagggtgaacagagtcagcaggaccgacagcgtcgcgccaatgtacagctgcatatggctcagttcaaagccggagaagctcacgccccacatggcgaggataaagccgatggtgccccagatacgaattggcgggaaatcggtgacaatatccagccccgccgactgcaggcggtagtaggagatggtattgatcaagccaagcgtcggcatgtaggccagcgagttaagcaggatcacgaggaacatctcgcccggcgtggtgacctgcgccgcgaggtacagcgttaacgcgccgaccaggtggcagatggcgtatacccatttggcgctgatccacttatcggcgacgatgccgagcagcgtcggcatcaacaccgcggcgataccgagcgagctatacactgcgccgattgccgcgccgtcaaacttcagcgtgacaaacatgtacgagccaagcgtggtgagccagctcccccaaaggcagaactgcaggaacgacagtattttgagctgcagcttaagattcatgtagttatcctcacgaatgtgggcttgttatgtttttaaaataacattaatcccgttattttgatgcgattctatcattcactagcttaatgcttctgttaactgccgcagaaaaccgaaagatattacagagtatggcggagaataagcgcggcctcagcgcggggctgaggccggagtcgggaggagggctatttacggcggtagcttttctgcgccgtattaactttgtacagatagcggcgcgattccgccgacggatggcgggtggtcagcgtctggtagacgtcccctggcgccatgctgttgataatattggccgcctgcactttatcgctggagaagacccgcagtacgctgccggcgccgccgttataggcagtgatcaccgcgtagcgacgcgaggtggggttatcgatgccggcgaggtaaatattgttcagcatcgccaggtaggcggtaccggtgtcgatgttattcgccgggtcaaacagatagctgcggcttggcaggccggatttaccctgggagcggaagacgtctctgccggcgctgtgctggaccacctgcatcagccccatggcgtcggcatggctgaccgcataggggttaaaggaggattcggtctgcataatcgcgaggatcagcgactcatcaaccccatacttacgcgaggcctgacgcaccatgccgaggtatttatgcgcacgtttgtcgaggtggttcggcaccaggttaatggtgatgctgtagaccacgcgcaggccgttgttgcggctcttcagacgggtttgcagcagatagtcggcaaagcgcgcggcgcgccactcccagcgaatcgacgccccggtgttatccaccacctggccatagaggaacggctctttggagatctggatgtcatcgacatcggaatagaggtcaatggagttggggtcatcgcccatcaacagggttttgacgatagcctggcgcagtcgtccgcgagggtcggtgccggcaatggtctcgacggtgatcgtcccttcatcgaagttgatgtggctgcgggtttgatactggtcggtgtacttgacgtagtcctttggcccggcgagcaggacttcgttgtacccccaaatgttctcgatgttgtgggcgaactggcccatcaaaatatcgaatccgttcgtgtccttgacccaggcctcgttgtattcggcgccttttttattggagctggaacacgaaacgagcaacggcgcaatcagcgcgagcgctaagtattttttcatcattccgggcgtgcgtgttgtgtttgtttttttaaaggccgcagggcccttactgtttttccggcggcgtgtagccttcgatgtgcacgtctttcccttcaaacaggaactgcaccatctcctgctcaagcagtttgcggtgctccgggttcatcatgctgagctttttctcgttgatcagcatggtctgcttgtgctgccactgcgcccaggcttctttggagatttcgttgtaaatacgctttccgagctcgcccggatacagctggaaatcctggccgtccgcttcacgctgcaggaaggtacaaaaaatggttctgctcataattaatcctctttgatagccgaaaaatttataccggcgctccggcttttagctgttgcaacaagcgctccacgggggccgccagaccgaccgacggcggctgcgctaagttataccagagtgcgttgccttcatccatgcatgcgccagatgagtgcactgtaagccacatcggcacaatatccaggtggaaatggctgaaagtgtggcgaaaagcggttaattgcgtcagattatcggcctttatctggcgctgcgccagccactcgcgtagctccgcttcgtctgcaaactgcggaaaacagaacaacccgccccacagacccaccggcggacgctgggaaagaaacacctcgtcgccgtgctgcatcagcaggaagtagccggtgcgttccgggagggtctgcttcggttttttgcccggatattccgcccatgaatggttcgcgtaggccacgcagccgttgctcagcggacacagctcgcacttcggcttcgagcgggtgcaaaccattgccccgagatccatcatcgcctggttgaagcgctcgacgccctctgccggggtgacctcttcgctgatgtcccacagccgtttttccacctcttttttccccggccagccgctgacagcatagcagcgggcgagcacgcgcttcacgttgccgtcgagaatcggataatgctgaccgagcgaaagggataaaatcgcccccgccgttgagcgcccgacgccgggcagcgccgccacttcgtcaaaggtccgggggaattcgccgccgtgcagtgtggcgacttgctgcgcggctttatgtaagttgcgcgcccgggcatagtagcccagaccggtccacagatgcagcacttcatccagcggcgcgttggcgagatccaccaccgtggggaaacgcgccataaagcgttcaaaataggggattaccgtggtcacctgggtttgttgcaacatcacttcggagagccatactttgtagggcgtcttggcgatttgccagggcagggttttacgcccgtatttgtcgtaccagtccagaacctgggctgaaaattgcgtggcgagaaaagtcaaagctacggctccgggatcgcgattacaggggggcagattgcagcataagggcgagtggctgtaaacccttgcatccgccgggtaactttggataatgcccgttttccgaacacattcacaagcagaccaaacttttatgaaaaacgacgtcatctctccggaattcgatgaaaacggtcgcccgctgcgccggattcgtagcttcgtccgtcgccagggccgcctgacgaaagggcagcagcatgcgctggataacatttggccggtgatgggcgttgaattcaacgatgcgccgctcgatttcgccgccctgtttggccgtgacgcgccggtcaccttagaaattggcttcgggatgggcgcctcgctggtggcgatggcgaaagccaaaccggaacagaatttcctcggcattgaagtacactccccgggcgttggcgcttgtctggcttctgcggaagaagaaggcgtacaaaacctgcgcgtaatgtgtcacgatgcggtggaagtgctgcataccatgatcccggataactcgctgaatatggtgcaactgtttttccctgatccgtggcataaagcgcgtcataataaacgtcgtatcgtgcagccgcctttcgctgagctggtgaaaagcaagttgaagctcggcggcgtcttccatatggcgaccgactgggaagcctatgccgtgcatatgctggaagtcatgtcctcgctggaaggctatcgtaaccagtcggcaagcaacgattacgtaccgcgcccggaatcgcgcccggtaaccaaatttgaacagcgtggccatcgtctcggccacggcgtatgggacttaatgttcgagagggtgaaataatggccaagaatcgtagccgtcgtctgcgtaaaaaaatgcatatcgatgagtttcaggagttaggcttctccgtcgcctggcgtttcccggaagggaccagcgaagagcagatcgaccagacggtcaacgatctgatcgaagaggtgatagagccgaacaagctggccttcgacggcagcggttatctctcctgggaagggctcatctgcatgcaggagattggtaagtgcactgaagagcatcaggctatcgtacgcaaatggctggaagcgcgtaagttagaggatgtgcgcaccagcgaactttttgacgtctggtgggactaagtttgacaagggtcggcaattgccggcccgttttgtcttaagggagttttatgatgcgtaaaacgctgctggcggtggcgctctccgtcaccgctttgtctgcccatgcggactaccagtgtagcgtcacgccgcgtgacgatgtgatcctcagcccgcagcaggtgcaggtgaaaggggaaaacggcgatctggtgataaagccggacggcaatctgacctttaacggcaaggcctatgcgctcagcgccgcccagcgcgaacaggcgcaggattatcaggccagcctgcgcagcagcctgccgtggattgacgaaggcgcgcgttcgcgagtcgaaaaaagccgcaaggcgctggataaaatcattaccgaacaggttggcgccaacagcagcatgcacggtcgcctgaccaaactggacgcgcagctgaaagaacagatgaaccgcataattgagcgccgcagcgatggcctgaccttccactataaagccatcgaccaggtacgcgccgatggccagcagctggtgaatcaggcgatgggcggcattctgcaggacagcattaacgagatgggcgccaaagcggtgctcaaaggcggcggtaatccgttacagggcattcttggcagcctcggcggcctgcaaacggcgattcaggaggaatggaaaaaccaggaggccgatttccagcagtttggtaaggacgtctgcagccgggtggtatcgctggaggacagccgcaaagcgctggttggctcgctgaaataatgccatggcggtccgcttcccggcaggaccgccgctgcgtttactcgttcagaaacaactcaagcagggaattcaggaacagcttaccgtgctcggtaatctgccagttctgctcgtcttcctgcaggtagccctgggctatcgccgcgtccagctgcgggcggatcgccgcttcctcaagtccggtatagcggctaaattcagcgcgcggcgcggcctccagcaggcgaaaacggttcataaagaactcaaacggtttatccgcttcttccacatcatgctgacgctcaaggtaacggccttccatatacccgcgcgggtggcgggttttggcggttcgcagaatgcgtccgtcagggaaggtgatcttgccgtgcgcgccgcagccgatgccgaggtagtcgccaaagcgccagtagttgagattatgctgacactggaagcctggcttagcataggcggacgtctcgtactgctgatagccggcggcgctcagcagctgatgcccctgctcgaaaatatcccatagcgcgtcgtcatccggcagcaccggcggccgggagccgaacaaggtgttcggctcaatggtcagctggtaccacgacaggtgcggcgggttgagggcaatcgcctgacgcagatcgtccagtgcctcctccagcgactggtccggcagaccgtgcatcaggtcgaggttgaagctgcgcaagccgaggccgctggcgagacgtgctgcgcgcttggcttcctccgggccgtggatccgccccaggcgctgcagcttcggttcgctaaagctttgtacgccgatggagatgcggttcaccccggcgcgctgataatcaacgaagcgatcggcctccacggtacccgggttggcttccatggtgatttccgccccggcggccagcggcaggcaggcgcggacgccatcgagcagggtttgcatggccgggccggacagcaggctcggcgtaccgccgccgataaaaatagtgcctatttcccgtccctgggcatagtgcgcatcagcctgcagatcgttcagcagatgctggacgtagtcatcatgcggcacctcgcctttcagcgcatgcgaattaaaatcgcagtacgggcatttctgcacgcaccagggaatatggatatagagactcagcggcggcaaattagccattacgtaatgcttccagtaacagtttcagcgcctgcccgcgatgggaaatggcgctcttttcttcacggctcagttcggccgcggttttaccttctgacgggacgaagaagatcgggtcgtaaccgaagccgccatgaccggcggcttgtcgggtgattaccccaggccagctgccgtggcacaccagcggcgtgggatcctcggcatggcgcagatagaccagcacgcagtggaactgggcctgacgctggtcgtccggcacgtcttttaacgcgtcgagcagcttctcaagattctgctggtcgctggcatcgacgccggaatagcgtgcggagtaaatacccggcgcgccgccaagagcatcgacggccagaccggaatcgtcggcgatggccggcaggccggtgatctgcgccgcgtggcgcgctttcagaatcgcgttttcaatgaaggtcaggccggtctcttccgcagagtccacgccaagctcggtctgagcgacgatatcgagaccaaaatcttccagcagcgaggccagttcgcgcactttgccggcgttgccggtagcgaggacgactttttgcatgatgaatcctgtttattcagttagcgccgcgaccgcagtcgggatctgttgtggggcgatgattttaacttgcttatggcggcccagctcgcctttttcaatcagtacctggcttttggcgacgcggaactgtttggcgagaaatttcaccaggtgggcattggcctggccatcaacgggcggggcggtaatggcgactttaagctcgtcgccatgtacgcccacgatgctatcgcggctggccttaggctgaatgtacagcctcagcaccagcccgtcagcgcaggtttcaacggcactcatagcgccatccacagccccggcagcagtacattaccggtggcctgcagcacttcggcgatgcccatattgattacgtacaacagcaataccagcaccatcggcgagaaatcgataccgcccatcgacggcagcaggttgcggatagggcgcagcagcgggtccgccagctgcatcagcacatactccaccgggctacggccctggctgacccagctcatgatcgccatcaacagcagtacccagaagatcaacgagccgatggttttcagcagaataagcagagcggagatccagatgatcggctggaaggtgatcaccataaacagcacgatcgctttgatgacgcagagaataaatgccaccagcagcgaggcgctgtcaatcggccccattgctgggataatccggcgcagcggtccgacaatcggctgcgtggctttcaccacaaactgcgaaaacgggttgtaaaagtcgcagcgcgcccactgcatccagacgcgtaacaacacgaccatcgtgtaaagctcaatgaccgttgaaagcaggaaagtcaacgtcttcatggcgttcctcagattccttattatttgctgtagtcgcgcgcaccaaaaatggcagtaccgatgcgcaccatcgtgcttcccgccgcgattgcggcttccatatcgtccgacattcccagagacaacgtatcgaccgtggggtaccgcgtttttaatcgcgcaaatgctaccgccatttgccgggcgacggcaaactgccttacatattctgactcaggcgcggggatggccatcaggccgcgcagttccagatgaggtaactcagcgatctccgccgctaagccgtcgagcgcttccagcgggatgccggatttgctctgctcatcgctgatgttaatttgaatcagcaccttcagcggcggtaaatgcgccgggcgctgctcgttcaggcgggtggcgattttcagccgatcgacggtgtggcaccagtcaaaatgctctgccaccaaccggcttttgttggactgcagggggccaataaagtgccactgcagcccgctgacgccagcctgctggaaatggttaatcttctccacgccctcctggacgtagttttcaccaaatgcccgctggcctgccgcaatggcttcttcgatcgcgctcgcaggtttcgttttactcactgcaagcaatgtcacttcttctggcgcacgcccgcatcgggcggcagcaccggagattttgtcccggacctgtgccaggttatgcgcaatatcgttcatattccgaggatgagttatgaagctggaagaaatcgtagcccttagtgtaaagcataatgtctccgatctacacctgtgcaattccgccgcaccgcgctggcggcggcagggcaggctgcagcccgcgccctttcccgcgccggatattgcgaatttactcaacgactggctcgatgccgcacagttactgcactggcaggaacacggccagattgactttgcgctgaacctggcctgcggtgcgcggctgcgcgccagcgccttcgcccatacgcgtgggatatcgctggtgctgcgtctccttcctgaacagtgcccgcgtctggatatgctcggcgccccgcctgcgctgagcgaactgctggcggaagagagtggtttgctgttggtcaccggagcgacgggcagcggcaagtcgaccaccctggcggcaatggtggggcacctcaatcagcatcttgatggccatattctgacgcttgaagatccggtggaatttattcatcacagcgagcgctgtctgatccagcagcgggaagttggccgtcactgtccttcgttcgcctcggcgctccgcgtggcgctgcgccaggatccggatgtgatcctgctcggggagctacgcgacagcgaaaccattcgcctggcgttaaccgcggcggagaccgggcacctggtaatggcgacattacatacccgcggcgcggcgccggcggtggagagattgatcgatgtctttccggcggaggagaaagatcaggttcgtagccagcttgccggaagcctgtgcgcggtgctggcgcaaaaattgttacctgcacgtcagggcgggagagttgcgctatacgagcttctggtcaacacgccagcggtggcgaatttgatccgtgaaggaaaagtacatcaattgcctggtgtgatgcagaccgggatgcaggccggaatgttgacctttacccagagttttcagcaacgtgtcgctgcaggcgcgctataagatgagaaagagattgatatgacaggttaaatgatatgttagatgaatgtttatttgttgtttattaatattatttggtaatacaaataacttttgattataaattcaaataacacattcagattagatatgtcgacagtgaatacgcatttccaggaaaaaagtttgattatcttttgacagctttgagtcattcgatttatgctgtttgtgggaataggatgattctcatggaataacgtttcagtttgtaaattaccttggtggtttataaattcacgactgtttgtatctttttttattcatttaaccaccatggcggtgggtaacagctaaggagagttttaagtgattaatttaaatggaaattcatcatcttctcgtcaggtaacctttattacccacccgtctattcaaagcaaagcctttgccagctatctgagcgaaaccctgatggcaccggtggttttacaaaatattaataaaccgctggcgcagcgtttggcaaaagattctgtaatattatttgatattgcagtgtcaaataagaaattaaacggggtgtggcgggatattattcgcctgcaggcagataatcctcgtttgttgattattaatagcgcacaaaagtatgagttatacgaaatggcgcagtggccggctttatatggcgtgttccgtcatgacgatgatgaatcgcgcttaattgagggcgttaaggccgtgctgaacggcgagcagacggctgaattgagcgtgatgcacccggcgatgtacgctgcggaccatgcatcgactccagtagagaactcgccgctgaccgagcgggaatgcgagatcctcaacgaactgcgctgcggcgcgacgaacctggatatcgcccgcgcgctgtttatcagcgagaacacggtgcggacgcacctgtacaatgtgtttcgtaaactgagcgtgaaaaatcgcacccaggcggtgagctgggctaacgaacatctgcgccactaagcgggtaaacgtgcgccgtcagcggtccgccggcggcgcaggagggcagagtttaaaagctctgctcgaagtagctttccagtatgactacggcagaggctgaatcgacgctgcctttattcagcgcccggtagccgccgtgttcaaacaggcccgcgcgggcctcaaccgtactcagccgttcatcgtggagaaggatcgcgacgccaaagcggccatgaattttattggcgaaattacgcgcgcgcgccgtcagcggttgctcggtgccgtccatattgagcggcaggccgacgattaccgcctcaggctgccactctttaagcagtttttcgatgacgttccagtccggtttaccgtcctgcgccttcagcgccggtaatggtcgtgcggtcgcggtgatgcgttgtcccaccgccacgccgatgcttttggtgccaaagtcaaagccgagaaaggttccgctcatcacgcatgccccgcgacgcctggcatcgtcacaatgtcgataccaatcagtttagccgcctcgcgccagcgatcggcgatcggcgtacggaaaagaatattctgatccgccggggcggtgagccaggcattatctaaaatctcctgctccagctgccctttctcccacgaagagtagcccaacgcaaccagcacgttgcccggctgccgatcggttcctaaggtttcaagaacatcccgcgaggtggtaatcaccgtgttatccgagatgcgaatgctcgaggaaaagtcagagggcggggtatgcaaaatgaagccgcggtcttccgccagcgggcctcccagcatcaccggtttatccagacggatctctggattgcgcggctccgggacaattttgagcttctcaaggatcccttccacctgcagattttccagcggcttattgataataatgcccatggcaccctcgtcgttgtactcgcagatatagactacggagcggcgaaaaatggggtcctgaagcgcgggcatggcaatcagaaagtgatgctgtaaattcattgtcagaggttcgttcctggttcaaaaaagcaacacccagtatgcgggcaaagtagaatggtgtcgatgcactttatctggctggcgcccgagtggcgtcaggctggcaacgtttcacgagcgcggtaatccgcgctcgctgcgccaaaagcggacgttggtccgccgtcgtgcttatttatcgatacgtctttcgatagcgtccatcagcataccggtgatcgaaatatccgggaaggcggcttcgatttcgcgtacgcaggtggggctggtgacgttaatttccgtcagacggtcgccgatgatatccaggccgacgaagataaggcctttggccttcagcgtcgggccgacgcggcgggcgatttcccagtcgctttcggtcaacgggcgggcttcgccgcggccgccggcggccagattgccgcgggtctcgccaccctgcggaattcgcgccaggcagtaaggcacgggctctccatccactaccaacacgcgcttgtcgccatctttaatggccggcagatagttctgcgccatgcagtagcggctgcccagttcggtcagcgtctcggcaatcaccccaaggtttggatcgccggctttaacacggaaaatagaggcgccgcccatgccgtcgagcggtttcatgatgatatcgccgtgcttttcccagaaggctttcagctgggctttattgcgggtgaccaacgtttccggagtcagttcagagaaccaggcggtgaacagcttctcgttacagtcgcgcagactctgcggcttgttgacgataagcgtgcctttctcttccgctcgctccaggatgtaggtggcataaataaattcggtatcaaacggcggatccttacgcatcaggatgacgtcaaggtccgccagcggcagatcctgctcgccggtgaagtcataccatttatcgtagttctgttcgacgctcagcgtgcgcgtccgggcgcgggcttcgccgttgatcaaatagaggtcgttcatctccatataatggagttcatagccgcgacgctgcgcctccagcaacatagcgaagctggtgtctttcttgatgttgatggttgcgatgggatccatcacgatgccgagcttgatcatggttcttctccgttaacgcctcaacctaagtcgccaaaacgcacctgtagggcggtgatggcggtgagcgcagtagtctctgtacgcagaacgcgcggtcccaacaggatatcagtaaactggtattgcgcggtcatcgctatctcttcagccgacagcccgccttccgggccaatcagcagacggacgcgttcaaccggcagcggcagcgtgttaatgctggcgctggcgcgcgggtgcaggttgagcttcagcccgctgtcctgctcggcgcaccacgcctccagctgcatcgccggacgtatttccggtaccacgttacgaccgctctgttcgcaggcggcaatagcgattttctgccactgctggatctttttctgcaaacgttcggcatccagtttaacgccgcagcgctcggaaaacagtggcgttatgaggcttaccccgagttcgatcgatttctggatggtgaattccattttttcgccgcgggacatcacctggcctaaatggatatgcagcggcgattcccgatcgtcaggttcgccactgagcacctcaaccgtaacgtttttcttaccggcctcggtgatgaccgcgtcaaacacctggttactgccgtcaaaaagctgtaggtgctgaccggcggtcatgcgcaggacgcggccgacgtggttggccgcgtcatcgctcagcgcgatctggctgccgacaatgaggcgttctggatgatggatgcgaggaatgcgcatgcttgatattccgttcgttgcgcagatgccagcttcccgccatcgggcgggaagcacagggctgcaaattaacaattgccgctagtgtaggttagctcttttgcgcctggcaagcctgctggacatacggattatggttgccctgcactttcgcgatgcgctcatcacgttcacattcccaggcggtgaccgggtactgtttattccaggcggtaaacagctgagtttgcttgcgggaaagattcagctgatagcggtcgcgcatatagaagtaggtgcgggcgatggcgccgcgagcgcgggcagggggctcggcgattttatctttaaaatcgaccttcatggtgcactggccgtactggccttcaccgccgttccactggctgtacataaagttgccgcgatcgccattcacttctcccaccgccggctgcaggttgtgcatatcgctttccatcttgcggtattccggatctttggcgcagtttttacgtccaccctcctgccagcactgacgctgatggccgaactgccatgccggcactacgtgctcccattcaacccggctggcgcggttctcatttttacgcactttatagccgcaggattccaaatcgataacgccttttttcccctgccagtcgattttacagccgcaataaaaatcgcccggaacgtcggcattcactttgacgccagcggctttggcctgggaaaaactattaataccagcggccgcaagcggaccactgactgccgcgctcaataccgctacggctaaaacatgcatacgggacatcgttaactccgtgtcaaaacgagcccgcaacgtagcgaatgagggtgccggatgcaatcagtcagatcagaaagtttctaattaattccgatggttatttttcagccaccagcagatcgccgcagcgaacgcagcggtaggtggcctcgccgcgaaccacccggttatggcgacggacggtgagctggtgctgctgacagcgacagcgataggggaaggtgttctggcggaccgaagcgagttcaaagcggtgggtgcgacgcgcgggaacgccaaggacgctctccatcatccatttccactctttcccgtgcggcgcgacgcggccgaaatgctgccagaccagcaggtgcgccagctcatgcggcaccacttcatcgataaactcccgctgattttccagcagtagcaccgggtttaaacgaatttcgtttttctccagccaggcggtgccggcggaagtaccacgctgctggtagaccagcgtcggttccgcatagcggcgttccagcttgcgattcgcattggcgagatgctcccgcaggctgcgcatgacggcctgctgaatagcgatgggaatacggggcgttttcatagcgccagaggatagtgcggcggaggggggagagcaagaggaagcttcctcccgggatgggaggaagctcaggaaggttaatcgcgggcaccgatctcgcgcagtggacgaccctgcatcaggttacgttcaatatgttccagcgagacgtttttggtttccgggatcagccacagcgtcagcaggataaacagcacgttcagaccgccgtacacccagaaggtattggcgctgcccagcgagttgagcatggtcaggaaggtggcgccgacaatcatgttggcaatccagttggtcgctgtggagcaggtgataccgaagtcgcggcctttcagcggctggatttcggagcacagtacccaaatcagtgggccggcgctcatggcgaaaccgacgatgaacatcagcagcatcaggacggcgatgtactgcgcggtagaggagtgaatgccgatgtgcatcatggtacccaggacgcccattcccgcggccatcacgataaagccaaggatcagcgtcggtttacggccccagcggtcgaccagaccgatggcgataaaggtggccagcacgttagtcagaccgacgatcactgtcccccacatttgctcagtggtgttggcataacccgccagctcaaagatcttcggcgcgtagtacatgatgacgttcatcccggtgaactgttgcatcacctgcagcaggatgccgaggaacaccgcgcggcggaagttgctgttgtctttaaacagcgaccagccggactgttttaccttcaggctttcacggatttcatcgagctcgcgtttcgcttcggcgctggtatcgcgcaggcgcagcagcacgcgttccgcatcgacaaagcgacgtttggcggcgaaccagcgcgggctgtccggcaggaagataacgccgatcagtagcaataccgccggaatgatgataaccccgagcatccagcgccatgcgccgctgtagctgaaagcggtgtcagagagataggcgccaaggatcccgatggtgatcatcagctggtacatggaaatcatactgccgcgaattttttctggggcgatttccgacagatacagcggagccgtatatgaggcgacgcccaccgccaggccgagcagcacacgggaaaccagcaggatctcgacgtttggcgcggcggcagagaacagcgaaccggcgacgaagaggatggcgccgatcatcaggctctttttccggcccagtttgaaagagagccagccgctgccgaccgcgccgacggcagccccgaacatcatggagctgaccacccactcctgggtgtgggcggaaatctggaactcattggcaataaagggtaaggcacccgcaataacaccgatatcaaggccgaacagcaggccagccagcgcggcgaggaaacagacgaagaacgtcatagtcttgttcgaacgcccttgttttttgttgtcaggcataacgccctccagttgagttattgattctgtcgatggttagggtaggacactcgtcggtaaaaaaacgtgactataatcacggctgtgtaatcgtttccacaaaggtaaagaaacgtaattcattaaatgctttttaaatcagcaatataaacaaggatagacgacattttgaaaaacggtaatcagagttgaccgaaacaatatgtaacattgtgaaaaatgggtacaggagatagcgtctttgggcagaaggtgacagtctttactatgtaatcgctttcattttttggcggccgcgcgttgaaatgggggcgcagaaaagggggggaggcgtaaataaaaaggccagcgcgaggctggccttgaagagaggaagcgcggagattatttcagaccggccgcttcccgtagcagcgccgctttgtcggttttttcccatgggaaatgttcgcgaccaaagtgaccgtaggctgcggtttctttgtagatcgggtgcagcagatccagcatctgaatcagaccgtatggacgcaggtcgaagaactcgcgcaccagcagggtcagctgttcagaaggcactttctcggtgccaaaggtttccaccatgatggacgtcggttctgcaacgccgatagcgtaggaaacctgaatttcgcaacgatcggccaggcctgcggcaacgatgttcttcgccacatagcgcgccgcgtaggctgcggaacggtcaactttagatggatctttaccggagaacgcgccgccgccgtggcgagccatgccgccgtaggtatcaacgatgatcttacgaccggtcagaccgcagtcgcccatcgggccgccaataacgaaacggccggtcgggttgatgaagaatttggtggacgcgttgagccattcggtcggcagaatcggcttgatgatctcttccatcactgcttcctgcagggatttctgatcgatatcttccgcgtgctgagtcgacagaacgaccgcgtcgatgccgacgattttgccgtcgtcatactggaaggtcacctggcttttcgcatccgggcgcagccacggcagggtgccgtttttacgcacttcagcctgacgctgcaccagacggtgagcgtaagtcaccggcgccggcatcagcacgtcggtttcgttagtggcgtagccaaacatcagcccctggtcgccggcgccctgttccagcggatcggcacggtcaacgccctggttaatgtccggagactgtttaccaatggcgctcagtacggcgcacgagttggcgtcaaagcccatatcggaatgcacgtagccaatttcgcggacggtgttgcgggtgatctcttcgatatcaacccatgcgctggtggtgatttcgccgcctaccagcaccatgccggttttgacataggtttcacatgcgacacgcgctttcggatcctgctcgaggatcgcatccagcacggcatcggagatttggtcagcaattttgtcaggatgcccttctgatacggactcagacgtaaaaaggtgttttgccatattttatttcacctgtggacgattcggatagctcatactgttgtgtaatgtggctttggtggataatcagcgcaaagccgcgcaggtagcgacacgagcagtctgagtgttaatcagtatagacggattaacttctggacggccattttaggtcaaatcttgagcccatttccagccttttttgatggcggtcgcatttatgggaaaacccgcctggcaaaatttcctgacaaccgcgcaaacaggcacatttttattttgctttttaccccgcttctcggtataaaacgccgcgcgcggctcattaaaaaagcgcacggggcatggccctgtggtgccacttccagccgggttaagcagtctgtatttacagaatctcgcagcggcgtagcgcctgttgcccggtatgtatagctttggcttgtcgccgaccctgtcgcagggcggtgtggaggtgataccagataatgaaccaatgtttttcgtttgattcgtcgcgtcgttctgtcgcgcgtcagcactccgcaacctgcatctctctcatgcaaaccagccgatgttcaccccatctcggcgcttctcaggattccagggccggtcggccgtcagaaaactgaacaagggcgctcttgcctggcaagagttttctcgtggtttctccggactgtcatactctgttcggctacgtgttttacgatgatatgaataagaaaccggtcgcgcagtcgcaaaaccagcagatagtgctgggctttaggactgttcatgggttgttatcgcatctttggactgcgatagtagttaactgtcttacacttattattaaaaattgaggttcgctatgtctgacgacatgtctatggtttcgccttcgtcagcaggcgaacacggtgtactacgttccatgcaggaggtagcgatgagctcccaggaagccagcaagatgctgcgtacttataatattgcctggtggggcaataactattatgacgtcaacgaactgggccacatcagcgtttgcccggatccggacgtcccggaagcgcgcgttgacctcgcggaattagtcaaagcccgcgaggcgcaagggcagcgcttgccggcgctgttctgcttcccgcagatcctgcagcaccgcctgcgctcgatcaacgccgccttcaaacgcgcgcgtgaatcgtatggctataacggcgattacttcctcgtctacccgatcaaggttaaccagcaccgtcgcgtgattgaatcgctgatccattccggcgagccgctgggcctggaagccggttcgaaagcggaactgatggccgtgctggcgcacgccgggatgacccgcagcgtcatcgtctgtaatggttataaagaccgcgaatatatccgtctggcgctggtgggcgagaagatgggccacaaggtctatctggtcattgagaagatgtccgagatcgctatcgtactggaagaggccgagcgcctgaacgtggtgccgcgccttggcgtacgtgcgcgtctggcctcgcagggctccggtaaatggcagtcctccggcggcgagaagtccaagttcggcctcgcagcgacccaggtgctgcaactggtcgaaattctgcgcgaggcaggccatcttgagagcctgcaactgctgcacttccacctcggttcgcagatggctaacattcgcgatatcgccaccggcgtgcgtgaatcggcgcgtttctacgtcgaactgcataagctgggcgtcaatattcagtgcttcgacgtcggcggcggcctgggcgtggactatgaaggcacccgctcgcagtccgattgctcggtgaactacggtctgaacgaatacgccaacaatatcatctgggcgatcggcgatgcctgcgaagagaatggcctgccgcacccgacggtgatcaccgagtccggccgcgcggtgaccgcgcaccataccgtgctggtttccaacatcatcggcgttgagcgtaacgaatacaccgaggcgaccccgccggcggaagacgctgcgcgtccgctgcagagcatgtgggaaacctggctggagatgcacgagaccggcaaccgccgctcgctgcgcgaatggctgcacgacagccagatggacctgcacgatatccatatcggctactcctccggtactttcaacctgcaggagcgcgcctgggccgagcagctgtatctgaacatgtgccatgaggtgcagaagcagctcgacccgagcaaccgcgcccatcgtcccatcatcgatgagctgcaggagcgaatggcggataaaatctacgtcaacttctcgttgttccagtcgatgccggatgcctgggggatcgatcagctgttcccggtgatgccgctggaagggctgaacaagtcgcctgagcgccgcgcggtgctgctggacatcacctgcgattccgatggcgccatcgatcactacgtggacggcgacgggatcgccaccaccatgccgatgccggaatacgacccggagaacccgccgatgctgggcttcttcatggttggcgcctatcaggagatcctcggcaacatgcacaacctgttcggcgataccgaggcggtggacgtgttcgtcttccctgacggcagcgttgaggttgagctgtccgacgagggcgataccgtggcggatatgctgcagtatgtgcagctggatccgaatacgctgctgacccagttccgcgatcaggtgaaaaataccggtctggacgacgcgctgcagcagcagttcctcgaggagttcgaggcgggactgtacggctatacttatctggaagacgagtagccgctgatgcccggtggcgctgcgctgaccgggcctgcgtatgtcggccggataaggcgaagccgtcatccggcagcatgcgatactcacttgaacccgtatgcattaccggcgataattcacgccaataagcgatttatctatcaaacccttcctcgtcgggcctaacgacgcggaggggtttttttatacttattttttacgttccacgactgtcaaaagaggtcatatccatgagcactttaggtcatcaatacgataactccctggtatccaatgcctttggctttctgcgtttgccaatgaactttatgccgtatgaaagcgatgcggactgggtcatcaccggcgtgccgttcgatatggcgacctccgggcgcgcgggcggccgtcatggcccggcggcgatccgtcaggtttccactaaccttgcctgggagcacaaccgtttcccgtggaacttcgatatgcgcgagcgcctgaacgtggtggactgcggggatctggtgtacgccttcggcgacgcgcgcgaaatgagcgagaagctgcaggctcacgccgagaagctgctggcggccggcaaacgtatgctctcctttggcggcgaccatttcgttaccctgccgctgctgcgcgcccatgccaagcactttggtaaaatggcgctggtgcacttcgatgctcacaccgatacctacgccaacggctgcgagttcgaccacggcaccatgttctataccgcgccgaacgaagggcttatcgatccgaaccactccgtacagatcgggatccgcaccgagttcgacaaagacaatggctttacggtgctcgacgccggccaggttaacgaccgcagcgttgatgacgtgattgcccaggtgaagcagatcgtcggcgacatgccggtgtacctgacctttgatatcgactgtctggatccggcgtttgcgccaggcaccggtaccccggttatcggtgggctgacctccgaccgcgcgatcaagctggtgcgcggcctgaaggacctgaacatcgtcgggatggacgtggtggaagtcgccccggcctacgatcagtccgaaattaccgctctggcggcggcgaccctggcgctggagatgctgtacatccaggcggcgaagaagggcgaataaatctgttcccgtcatacttcaagttgcataggcgtgggcaataaatcggcccatccctgggcctcgtccttacggggccagcgcaagcgctgttcaaaacgactagccgttttgtcctgcagcttatttagggtatagacgcgtttactgctgctgcgcgacgcatacgcagcagcagtgcgccgccggcgcacagcgtgatcagctgcgatgccaccagaacggaaaaacctgaacttaccgatcccactgatttcatcaccactcccatcagcagcggaataaacgccgcgcagatgttgccaatgccgttaatgatcccataagcgctgcctaccgcttcgcgcggggcgtgatgctgaaccaccgcggggatcgccgccccctgtaatccccagaacacgttcgccgccagcataaacagcgccagcatcgccggctgctggctgagcatcagcgccagcacagaaccggcggtgagtaggccgccgataataaacagcagcggcgcctgctccgggcgcattttgtcgaggagcacgccgccaagaaactttgagccgaggcttaacagaaaggggacagccgccagcaggccggtagcctgtagcgagaagtggtgctcgtcgcgcagccaggcgggcaaccaggcgctactcccccacagatagctgagcgtggcgatttctaccagcaggatccagcctagcagcggcgtacgccaggcgagggcaaaagtttggctaaagccaggcttcgcgcgctgtgaggttacttgtggcgcggggagaaaccgccagattaatccgccgccgagcagcaggttaagcagcgccagcgcgtagaaggagccgatccagccaacgtgcgccatcagccaggtgaccagcgggaagcctaccgccagccccaacgatacgccaagggcggtcagcgcattcggcttgcctatttcatcagcggcgaagttgtcgttgataaagcgcgttttcagagagaacagcggcccctccgccacgccaagaacgatgcgcgcgatcaacattcccagcagtgagccgagtagcggggaaatggcgcacaccagcgcccatatagcaatgctgcttaagagtccctgacgataatgccatctactttctataactggtgttaataataatgccgaaaaaccataacccagaagaaagcatgtcattagcataccttgtaacattctgttttcatttaactgaaaatgggcagcgaattccgggttaaggatcatcaccgagatatttacccgatcgacgtaggaaataattattaacaaaagtaatgctattaccccttgccatcttgccgccattcgttgtctccacgcttaatttaatgattgccagttattattttttaacgccagaaatagttacatgagtaaaatggttcacctatgaaactcattgtttttaaatgattaaataaatagctgtttcatggatgaaacaccatggtttccgctgttgcccatttttaatgatcgatttgaaaagaagtcaatagtcgtatgtgaaatttaaatcggcatttttatttataatggatcaccgctttaaatatcatcatttcatctgaatgcagtttttcgtgatcaattgcacacttagctaatttaaaagccactcattaacaaattcgtcacattaatgcttgacgaaacattcaccgcttttatattgaccgtattaaataagaaacagagtttcatatatgaaacaaaagcctggaggattgcgatgagctggataggcgtatgtgacgcggagcaagtacaggaagatttcccatatagcggcaatatcgacggtaaggaaatcggtatttatctgattgatggcgaatattacgcgctggaagacgtttgccctcatgcctatgcgctcctgagccagggctttgtcgaagatggcaaggtggaatgcccgctgcatgaggcggtattcgacgtcaaaaccggccagtgcctgcatggacccggcggtcgcaaccttaatcgttacccggtgcgggtatacgacaatcagatccagattacctttatcgaggagaacgtggcatgagcgaatccctggacttcaacccggcgctaccggaaagccgccagtttacgccaccggcggaaggcggaaacggcaatatccataagcctggcgactatcacaatctgatttggcaaacccgcagccgggtaccggaaaactgggaactgcagcttatcgccaccctggaaacgttgttcgagcagggcgcggaaagtctcggtgaactagtgaacggcctcaatggcgtcaggatgcatgaccaacagggcgaaccgtggagcgaaagcagcttccaggcatttttacaggttaacggctactgaggacacagcgatgacgacaacggtacaaaactatcttgataaaggactgcgcggcctgtggtatccggtgctggcgagctgggaagtgcagtctgcgccggtaggcattacccgtctcggcgagcagatcgtggtctggcggaataaagatggccaggtgcaggccctggaagaccgctgcccgcatcgcggcgcacgcctgtcaatgggctggaacttaggcgatcgtatcgcctgctggtatcacggcgtggaagtcgccggcaacggcgaagtgaaagacgttccggcggtggatcgctgcccgctggtcggccagcagtgcgtgcgcagctacagcgtgcacgaagcgcacggggcaatcttcctgtggtttggcgtcaccgccgatcagcagcctgatgaattgagcttccctgaggaactagccgatagcgaaaaatacagtaacttcctgtgcaccgcggcgtggaaatgcaactaccagtacgcgctggaaaacgtgatggacccgatgcatggcacctatttgcactcatcatcgcactcgatggcagaaggcgatcgcaaagccgatatggtcctgcagccgacgaaaaccggctttatcttcgagaaaaaagggcagagcggcgttaactttgactgggttgaactgggcaacagcggcgcctactggatgcgtctgtctattccgtacaaaaagcgtttcgggccgggcggccacttctggatcgtcggcatggtggttccggaagataacgataactgtcgcgtcttcttctggcgcatccgcggcgttcagggctggcagcgcgatctgtggcgctttatgtaccgcaaccgtctggaaaagctgcactgggaagtactggagcaggatcgcgtggtgctggaaagcctggcgccgaacgcccgcgatcatgaatacctttatcaacatgacgtcggtctgtcccgcctgcgccgcatgatgcagaaagcggcgaaagagcagttagcgctccgcgaagcgcagcagggtgccgcctgatgaacggcctgctaaacggtaaacgtattgtcgtcaccggtgcggcgcgcggtctcgggtaccactttgccgaagcctgcgccgctcagggcgcgacggtggtgatgtgcgacatcctgcagggagagctggcggaaagcgctcatcgcctgcggcagaagggctatcaggtcgaatctcacgccatcgatcttgccagtcaagcatcgatcgagcaggtcttcagcgccatcggcgcgcaggggtctatcgatggcttagtcaataacgcagcgatggccaccggcgtcggcggaaaaaatatgatcgattacgatccggatctgtgggatcgggtaatgacggtcaacgttaaaggcacctggttggtgacccgcgcggcggtaccgctgctgcgcgaaggggcggcgatcgtcaacgtcgcttcggataccgcgctgtggggcgcgccgcggctgatggcctatgtcgccagtaagggcgcggtgattgcgatgacccgctccatggcccgcgagctgggtgaaaagcggatccgtatcaacgccatcgcgccgggactgacccgcgttgaggccacggaatacgttcccgccgagcgtcatcagctgtatgagaacggccgcgcgctcagcggcgcgcagcagccggaagatgtcaccggcagcgtggtctggctgctgagcgatctttcgcgctttatcaccggccagctgatcccggtcaacggcggttttgtctttaactaataagtgaggcggtatggcgaacgatcaggaagtgaagtatctggtgcccggtcttgagcgcggtttacaactgctgctggcgtttggcgaacagcatcgcgatctgacctttgccgagctgcatcggctggtggatatgccgaaagcgaccgcctatcgcgtggtgcagacgctggaatatatgggctttcttgagcgcaacgcccgcaccaataccttttcgctgggcatgaacgtactgcgtctgggctttgaatatatcgcctcactggatgtcgctcaggtgggtcagccggtcatcgagcaactacgcgatatcagccagtgcagcagccatctggcgatccgcgacggccgcgacatcatctacatcgcccgcgtcagcgccgccggttcgcgtatcaaccaggtcagcgtcggaacgcggctaccggtgcactgcacctcgcttggccgcatgctgctgaccgatgtttcccgcagcgagtttgaacaattgttcccggatgaacggctgccgggcaatgcgccgggccagctgtacgaccgcgaagcgctgtggcagatggtgcagcaggataaagcccgcggctacgtgattggcgaatcgttctaccgccacggcatctcatcgattgtctatccggtctttaaccgcagcggccgggtggcggcggtcgtcagcattctggtgccgtcggacgagatcccgcaaagcgatcgcgaacggttgcagaacgacgtcagtatggcggcggacaaaatttccggcttcctcggatatttgtcacaggcaagttaaatcaacaacttaacagcaggcgcttgattgcgtcgggcatgttttacgcccaaattcgggcgactgaacggtaaagaggcgacgaataatgagtattaccggaattgaaaagctggaatttggcgtagacgacctgaaccacagcgctaaattcatgcgcgattttggcctgaccggcgacgccagcggccgcgcgtttaccaccctcagcggcgcgcgggtcgaacttaacccgaccgatgccgccaacttaccgccagcctttgaggcgggcaacaccctgcgtcgcatgacctggggcgtggcggatcgggcggcgctggatgcgctgcgcccgaagctggaacgccagcccgctttccgtgaaatcgacggcgcgctggagtgccgcgatcccaacggtatgacgctgcgggtgcaggttagccagcaaacggcggttgaactgaacgttgaaccgatcaaccagtggggcgatgtgcgtcgcatcgacactccgagcccggtatacgaccgcgcgcagcccattaacgtcggccacgtcgtattctttgttgaagagctggcggcggtggaaagtttctatcgcgaagtgctgggctttcaggtgtcagaccgctatatcaatcgcgcggtgttcctgcgctgcggcgtgcgcggcggacaccataacctcttcttattgcagttgcccaaccgcaagcgcgggctaaaccacgtcgcgtttaccgtacgggatattcatgaagtgatcggcggcggcattgcgatgaataaaaacgcgtggagcacgtttatcggccccggccgccatccggtctcctcggcctacttctggtatgtcaacagcccgaccggcggcgcttttgagtactacaccaacgatgactatctgacggaaaactggcagccgcgcgagctggagcattcactcgtgtcctttaccgaatgggcggtggaaggcggtatcgatcacgatacccgtcgccagcagaaaaaaccggaggcggtatgacggcgcggatagtcattatcggcggcggccaggctggcggctgggcggcgaaaacgctgcgtgatgaagggtttagcggcgagatttgcgtggttgccgaagagcaatgggatttttacgagcgcccgccgctgtcgaaagcggcattgctagaggccgaaccggcgctgccgcggttattcagcgccgaggtgcagcaggcactggatctgcgctggtaccgcccgctgcgcgcgaaatcgatcgaccggcaaaataaaaccctggcgctgagcaacggcgaaacgctggcgtacgacctactgctgatcgccaccggcggccgcgcgcggctgccgtccgaggcctgggggcagcatcctcaggtatataccctgcgccactggcaggacgcgcagcgtctgaagcagcggttggcatcggcaacgcggctggcgatcgtcggcggcggctggattggcctcgaaatcgccgcctcggcgcgcaaaagcggcgtagccgtgaccctttatgaacagcagccggcgctgtgcatgcgctcggtcagtatggaggtctcgcaggcgctggatgagttgcatcgcgggcagggcgttgatattcgccgcggctgcggcgcgctggagctggaagatgataacggcttgccgacgctgcactgcgacggccagcgggagaccttcgatgcggtagtggtggggatcggcgtcgatctgaatctcgaactggcgcgcgatgccgggctcactgtcgatcgcgggattgtcgttaatgcccaagggcgtagtaacgatccggcgattttcgccgctggcgatgtcgcccagcaccatcagtacggtctgtgcattcagtcgtgggcctttgcgcaaaatcaggccatcgcgacagcgaaagcgatgctcgatccacaggccagcggctacgacgaggcgccgtggctgtggtcagatcaatacgatcgcaatgtccagatcctcgggatcccgcaagcgggcagccggaccattgtgcgtgacgagccgcagggcgcgatctacttctccctgaatgccgatggacgcttaactcagctggtggccttcaataatgcacgtatcgtgaagctggcgaagcgctggatgacggcgggaagggatctctctaacgtcccgctcgctgacccgactttctcgctgatgtcattgcgataagaaacgcgaacccttaagggggagaaatgaccacattagagaccaacgccgcgcctgcagaggcgagcggcgagggcgtccgcacgcctgaaaaagcagttcgttgggccattccgctgtcgctgctggcctgcgtgctgctggcttttttcgacaaaatcagtatcgccgcgctgttttccgatagtcacttccagcaggcgatgggcatcgatttcgacaccacccggttgggcattctgatgagtgcctttttgctgagttacggcttctcgtcagtgttattaagcggccttggcgaccggattgcgccgctgcgtctgctgactggaatgatggtggtgtggtgcatcctgatggtgatcatgggcttcacccacaactacgcgctgatggtgacgctgcgcatcctgttgggcattgctgaagggccgctgtttccgttggcgttcgccgtggtgcgccacaccttcccgcagcggctacaggcccgcgccaccatgttgtggctgctcggcacgccggttggcgcggcgctgggtttcccgctgtcaatttggctactcaataccttcggctggcagagcacatttttcgtgatggcgatgctgacgataccggtgctgatttttgtacgcatcgggctgcgcggcgtacaactggaggcgagagcgagcagcgataaaacctcgcaggaagcgcgccgcagcgcgcgtctcgagctctttgtgagtccgcatttttggatgatctgcatcttcaacatcgcctttctcgcctatctgtgggggatcaacggctggctgccgggctacctgattaaaggcaaaggcattcatctggaacacgccggctggctgtcgtcgatgccatttatcgccatgttgctaggcgaaattatcggcgcctggctgtccgaccgcgtcgataggcgcgccgccgcctgctttatttccctggcaggcgcgggtattggcctggcggcagtgatgcatttcaccacgccgctgccggtaatcgcggcgatgagctttagcacctttatgtggggcaccggcgcgccaaacattttcgcgctgctggctaaagcgacccatccacgggtcagcgccacggcgggtggaattttcaacgggctgggaaactttgccggggcgctatcgccggcggtgatgggcgcgcttatcgccttcacccatagcatggattccgggctgatttttctggcggtgatggcggcggtgggctgcgccctgttactgccgctgctgagacgttactgaggataaaacgatgactgattcaaccgtaactgcaaaacagagtttgaaacctgaccatatgacgatggaagagtgggtggagtcgcgtatcgcgcgctttgaaggccgtaaatacgactggaatgcgctgaaattccaggccgatttcgatccgaaatatcgccgcgcgcagatgcgctacatcggcaccggcgccaccggcgtcgccagtgataccaacaccgttccggccgagcacttcaccttttccaccatggtgttgccgtccaaatgtgaaggcccgctgcacctgcatgatgacgtagaagaggtgttcttcatgctcaaagggcagatcactctgatgattcaggacggcgacaactataccgaaaccgtgctgcgcgaacgcgatctgatctcggtgccgcctggaatttaccgcggtttgtttaaccacggcgaagaagaggcgctgatgtgcgtgatgctcggcacccataagccgcatattccgacctacccggaagatcatccgctggcaaaagtaaaacgtaactaaggggcgatgatgacggggtttcgtgaacaaggaagcggtattccgctgacgctgctgcacggcatcagttccggcgcggcctcctggcataaacagatggcgctacccggctaccgcgtgctggcctgggatatgcccggttatggcgaaagcccgatgctggcggcggcgccggcgaatgccggcgattacgccgacgcgctggcgcgaatgctggaccgcgctggagtagagcaaaccatactggtcggccattcgctgggcgcgctggtggcggccgccttcgccgcgaaatacccgcagagggtgctttacctggtgctcgccgacgtcgcgcagggctacggccaggcggaagccgcacagcgggaaaaagtctggcaggggcgtcaacagcagatagcgctgggcggcgaggcgatggcccaggggcgagctgcaaaactgctgcgccctggcgcgtgcgaagccgatgtggcgacggtggcggcggggatgcgcaggctacgccgcgacggttatctcgccgcggcctggatgctggcccatgacgacattcaccgttggctcgccgactatcgcggtcgtctctccgtgtggtgtggcgagcaggatgccattacccaaccggagttagtgcagggagtggcgctgcgttacggcgccccttacatcgccatccctcaggctggacatgccagctatctcgataacgaaatcttttttaatcaacagcttttacgcataggggaagaggtgcgcgatgaatgcacaaattgaaggacgcgtcgcggtagtcaccggcggttcgtcaggaatcggctttgaaacgctgcgcctgctgctgggcgaaggggcgaaagtcgccttttgcggccgcaacccggatcggctggctagcgcccatgcggcgttgcaaaacgaatatccagaaggtgaggtgttctcctggcgctgtgacgtactgaacgaagctgaagttgaggcgttcgccgccgcggtcgccgcgcgtttcggcggcgtcgatatgctgattaataacgccggccagggctatgtcgcccacttcgccgatacgccacgtgaggcctggctgcacgaagccgaactgaaactgttcggcgtgattaacccggtaaaggcctttcagtccctgctagaggcgtcggatatcgcctcgattacctgtgtgaactcgctgctggcgttacagccggaagagcacatgatcgccacctctgccgcccgcgccgcgctgctcaatatgacgctgactctgtcgaaagagctggtggataaaggtattcgtgtgaattccattctgctggggatggtggagtccgggcagtggcagcgccgttttgagagccgaagcgataagagccagagttggcagcagtggaccgccgatatcgcccgtaagcgggggatcccgatggcgcgtctcggtaagccgcaggagccagcgcaagcgctgctattcctcgcttcgccgctggcctcctttaccaccggcgcggcgctggacgtttccggcggtttctgtcgccatctgtaaggaaagatgatgaaaaaggtcatgttaattggctatggcgcgatggcccaggcggtgattgaacgcctgccgccgcaggtgagggtggagtggatcgtggcgcgcgaatcgcatcacgcagcgatctgcctgcagtttggtcaagcggtgacgccgcttaccgatccgctgcaatgcggtgggacgccggatctggtgctggaatgcgccagtcagcaggcggtcgcgcaatacggcgaagcggtactggcgcgcggctggcatctggcggtgatctcgaccggtgcgttggcggacagcgaactggaacagcgtttacgtcaggcgggcggcaagttgacgctgctggctggcgcggtggccggaatagatggcctggcggcggcgaaagagggggggcttgaacgagtgacctatcggtcgcgtaaaagcccggccagctggcgcggcagctatgccgaacagcttatcgacctcagcgcggtcaatgaagcgaaaattttcttcgaaggcagcgcccgcgaggcggcgcggctattcccggcaaatgccaacgtggcggcaaccatcgcgctgggcggtattggccttgacgcgacccgagtacagctgatggtcgatccggcgacgcaacgcaacacccatacgctacacgccgaaggattgttcggcgagtttcacctggagctgagcggcctgccgctcgccagcaatccgaaaacatcgaccctcgcggcactgagcgcggtacgcgcctgccgtgaactggcataacgcagagaggctgagatggacgaattagacatttttatcggcggtcagtggcgtcgcggcggcggcaatttgatgcacagccagtttccggcggatggcgctattaacgcggcgctgcatgcggcaagcctcgatgatttacaggaggcgatcgactgtgccgaccgcgcctggcgggagccaacgtggcgggcgatgctgccgcatcagcgggcgaagatcctgcataaagtcgccgatctaattgaagcacagcttgatgagctcacccaaaagcagagccgcgataatggtaaaccgctggcggaagcgcgagggctggtgatgagcgcggcggggacggcacgctattttgccgccgcctgtgaactgctggaaggcgagctgccgacgccgcggcaggcagatctattgaccctgagccgctatgagccgctgggcgtggtggcggcgatcaccccgtggaactcgccgatcgccagcgaaatgcagaaggtggccccggcgatcgccgccggaaatgcggtgatcctcaaaccggcggaagccacgccgctcatggcgctggaactggcgaagatctttgagcaggccggtttacccgccggactgctgagcgtgctgccgggtaaaggatcgattatcggcgatgcgctggcccgccatcctaaggtgcgcaaaatttcctttaccggcggcaccaccaccggacgtcacctggcgcatgtggcggcggaaaagctaattccggcgtcgctggagctgggcggcaaatcaccgaccatcgtgctggaagatgccgatatcgaacaggcggcgcggggcatctgctacggcattttcagctccggcggccaggcctgtattgccggctcgcggctgtttgttcatgacaaagtgtatccgcaattaatggcccgcctgctggagttaacccaagggctgcgggttggccatccgttcagcgctggcacccacgtcgggccgctgatcaacgataaacaccggcagagcgtgctggagtacgtcgagctggcgaaacgcgaaggcggcagcgtgctatgcggcggcgagatcccggcggatccggcgctggcggcaggcagctatttcctgccgaccatcattgaagggctgaacaatcaggcccgcgtttgccaggaagagatcttcggaccggttctggtggcgatgcgttttcacgatgaagcggcgctgatccgcgaggccaatgattcggtcttcggactggcggcggggatctggacgcgtgataccggccgcgcgctgcgtctgagcgaacaactggaagccggtacggtgtggatcaacacctacaaagttttctccatttcgaccccgtttgggggctttaaagagagcggtctgggccgcgaaaaaggtatccaggggctgaaagcctggatgcaacaaaagagcatttatctggcgacgggtaatagcgtcaaccactggtgcgactgagaaagggtgagcaatgagcgaaatgataaccgtcggcgatgccatcgccagaacgctggagcagtatcacgttgaagccatttatggcgtcatttctatccataacctgccgatcgccgatgccgtcggccagcgggaaaaaatccgctttgttccggcgcgcggtgaagcgggctcggtgaccatggctgacgcccacggccgtttttcagggctcggcgtggcgctgaccagtaccggcgcgggtgcgggtaatgcggtcggcgcgctggttgaggcgatgaacgccggtacgccgctgctgcacctgaccggacaggtcgaaaaagcctggctggacgccgacaccggtttcattcatgaaacccgcgatcagttgaccttcctgaaagccagttcgaagcgcgcttaccgcattagcaacgccaaccaggcggtggctatcctgcataaggcgattcaggaggcgcagacgccgccgtgcggcccggtctcggtggagatcccaatcgacattcagagcgccaaaattccgctttcactgctgaccgcgccgctgaaacgcgctccggcggttgagccggaagcgtcgctggtcgatgcgctgtgggcgcagcttaagcaggcgaagcaaccgctgttgtggcttggcggcggcgcgttagagagcggcgaggcggtgaagacgctggcggatgccggggtgacggtgatttccagtacccacggccgcggcattctggcggacagccatcgcgccagcctgcgcgcgtttcataattctccctcggttgaagcgctgatttcacaatgtgatttcacacttgttgccggttcccggctgcgcagcaacgaaacgcgttcctggacgctggaactgcccacaccgcgggtgcagattgatatcgacccggcggcggccagccgtaactacctgatggacaacacgctggtggcggactgccgcgctttattagcggcgctggcagagcgggtgcagggccggatgtggggcgatgcgcgttgggatagccagcttaaagcggcggtagaggcggcggagcaggggctgcgcgaccagtgcggcgcttacgctaaattgaatgacgcgattgcgcaggcgctgcccgatgacggcatcctggtgcgcgatattaccgtttccggcagcctgtggggcagccgtctgttccgcgctcacggcccgctgatgaatatccattctctggccggagccatcggtatggggctaccgatggcggtgggcaccgcgattgccaatccgcaacgtaaagtggtcggcctggtgggcgacggcggcctgagcctcaaccttggcgaactggcgaccctggcgcaggagaaggccaacgtgacgctgttgattatgaatgacggcggctacggcgtaatgcgcggtattcaggataagtattttggcggccgtcagtattacaacgagctgcacacgccagactttaccctgttggcgcaggcgatgggtctgcaggcgtggagcgtggatcgggctgaggatttccaggcggtgatgaccgaagcgctggcgatgccggggccatcggtggtggaagtgaagatgggccagattggcgcgctgcgctttgccggcccgccgcagaagacgctgtattaatgataacccagtgaccccaaccctctcccttccggggagagggtaccgcacggcacagggggttaatcaaggcgccggacggttgctcctgcgcgccgggagagggccggctcactggagagggttcattatatggttaaaacacgttaaacggatattcgacgtagaaccgcacttcattcccgctgacgttatagtcgctggcgttgctggaaacgcgcagcaccgaatagcggagtctcaatttcaaatctttcgccatgccgttttgcacctggtactgcacctggttgaaccattcgtgttctttaccgttgctggtctcggcggttttaatgttatccccgcgaacgtaggcggtggtccagctcaggcccggtaagcccagtccggcaaaatccaggccataggaggcctgccaggaacgttcatcctcgccgttaaaatcggaccagtaggagttagccagccagatggtgttgccgccatcgccgacgccgccctggttctggtagccgccataatggtagccggtgctgccgctgctttgctggtaagcgaccttaaaggtatgaatatcccagatatagctggcggcaaggctccagatgctgttgctgcgcccggtgtcattggcgtcggcatattcttgatctaagcgcgagttatagccgttgaagtcaacaatcagctgctggtcggcggcgaacggctgcttgtagttcaggccgagatactgcttattcagcacgtcttcgacgtgcgaagcgtaaagcgcgccgctgagctggtcgttgaattgatagctggcgccgccaaaggtcaggctcttcaggccgctattgtggctgtcgtcgcttttgcgctgctgatcggtgagataaccggcgttaatttccagaccgtcgatttctcttgaggtcagcatggtaccggtatagctctcgtacagcagccgcgagtcatcagcgtagacgatgggcagcatcgggcgctggctgccgtagctgagtacggtattcgagaagcgcattttagcggtagcgccaaattttgctaaatcggacttcgcgcggccatcatcatcctgggcgaaaaagtcgataccgcccgcgccgctgcggccgcggccgccgtcgaggcgcacggcgtactgtgcaatgccgtcaacgccgaagccgaccggcccttgagtaaagccggactcgaaggtagcgatgataccctgaccccattcggctttatccggcaaaccatcgcgataatcgcgtttgatataagcgttacgtaaaaagagatccaggtggctgtcttcaataaagccctgactggtagattgttggctggcgaaagccggcgcggcggcaataatgccaagtgcgattaatggtaattcttttttcactgagggcacttctctgtctgtcgatatattcaagggaatcactgctgaccagatattctcctgaaataatgtcgaaagcaatcattgtgtgagcagttattgcagccggaaacaggttgtatggtgcatgagccgtgcgccaggcagtaaggggtggactatttattattcgggtaaagacgattctggaagccagatagtgtgcggcctttttaatttaccaaataatatatttctgaatcgccgggcataaaataattggctgtgatgcgctgtgataataattaacggtttgtgcgcttaaattatcaattaatgcggctaaatatttttacggatatataaaaaagggaggcaataatgcctcccgctgatgattatttaatcccgtcggccttcatgcgatcgcgaatatgctgggcgcgcgcttctgaggccgggtgatcgtcaaacatcgaactctgacgaccggcttccagcttggccagtttctcgaagctggtggccagtcccgacggattgataccgcgcttacgcagcaggtcgtaagagtaatcatccgcttccgattcctgacgctgggagaactgcgagttcaccagtttttcgcccagatcgcccaactgagactgcgacaggctaccgacgataccgcccgcggaggccgccgccgcacgcacggcgttggtacccagggcgacctgcatgcctttcttcacgtggcccagcgcgacgtggcccatttcgtggccgatcaccgcctcgacttcattatcgttcatcagatccatcagcccgctgtagacgcggatgcagccgttggccatggcgaaggcgttgacatccttggtctcatagaccttgtagttcacgggctgaccattgatgttatcgcccagcgcagccgcgattttgttcagccgctggctgtattcactgttggccggggcgattttcgctttggcgtccatctctttacaggcctggtcgcttaaggttttcacctgcgcgtcgctgagagagtatgcctggaaggcttcggcgcctgagctgagcagaccgttggagtccatgttctgacatccggtgagggttgctgcgatcccaagagcaagtacggttgagcgaattttcatttttatcttccacaatcttatggttgtttatccgaaaatacggcgacggcagggaaccgtattctgcgtaaattataaagagtatcgcaggatgcgggcgagcggattccggcgtagcacaacctgttccagagatttcttaaagggcaaaaggatgctccatgtacatgacttgtcgcttgggttacattgttcacacttttttccggcgtagcccaaaacgcgctctcgtcaagtcgttaagggcatggccttcaacagtccgaactggagtcaaaatgtcctcacgtaaagagcttgctaacgctattcgtgcgctgagcatggacgctgtacagaaagccaaatccggccacccgggggccccgatgggtatggctgacattgccgaagtgctgtggcgtgatttcctgaaccataacccga

SEQ ID NO: 5360 - DNA, 9495 bp, Unknown
  gut microbiota DNA sequence
tgaagagctgaaaaacttccgccagctgcactccaaaactccgggtcacccggaagtcggctacaccgcaggcgtggaaaccaccaccggtccgctgggccagggtatcgctaacgcggtcgggatggctatcgccgagaaaaccctggcggcgcagttcaaccgtccgggacacgatatcgtcgaccactacacctacgccttcatgggcgacggctgtatgatggaaggcatttctcacgaagtgtgctccctggccggtaccctgaaactgggtaaactggtggcgttctatgatgacaacggcatctccatcgacggccacgttgaaggctggttcaccgacgacaccgcgaaacgctttgaagcctacggctggcacgtggtgcgcggcgtggacggtcacgacgctgacgccatcaaacgcgcggtagaagaagcacgggcggtcaccgacaaaccgtccctgctgatgtgcaaaaccatcatcggtttcggttcgccgaacaaagccggtacccacgactcccacggcgcgccgctgggcgacgccgaaatcgccctgacccgcgaagcgctgggctggaaacacgcgccgtttgacatcccgtctgacatctatgcccagtgggatgccaaagaagccggccaggcgaaagaagcggcgtggaatgagaagttcgctgcctacgccaaagccttcccgcaggaagcagccgaattcacccgccgtatgaaaggcgagatgccgtctgacttcgacgcgaaagctaacgagttcatcgcgaagctgcaggccaacccggcgaaaatcgccagccgtaaagcctcgcagaacgccatcgaagccttcggcccgctgctgccggaattcctcggcggctccgcagatctcgcgccgtccaacctgaccctgtggtctggctctaagccgatcaacgaagacgctgccgggaactacatccactacggcgtgcgcgagttcggtatgaccgctatcgccaacggtatcgcgctgcacggcggcttcctgccgtacacctccaccttcctgatgttcgtggaatacgcgcgtaacgcggtacgtatggccgcgctgatgaaacagcgtcaggtgatggtctacacccacgactcgatcggtctgggcgaagacggcccgactcaccagccggtagagcaggtggcttccctgcgcgtgaccccgaacatgtccacctggcgtccgtgtgaccaggtggaatccgcgattgcgtggaaatatggcgtggagcgtcaggacggcccgaccgcgctgatcctctcccgtcagaacctggcgcagcaggagcgtaccgcagagcagctggcgaacgtggcccgcggcggttatgtgctgaaagattgcgccggccagccggagctgatcttcatcgccaccggttcagaagtggagctggcggttgccgcatgggacaaactgactgccgaaggcgtgaaggcgcgcgtggtttccatgccgtccaccgacgcgttcgacaagcaggatgcggcttatcgcgaatccgtactgccgaaagccgtgaccgcgcgcgttgccgtggaagcgggtatcgctgactactggttcaaatacgttggcctgaacggcgctatcgttggcatgaccaccttcggtgagtctgcgccggctgagcagctgttcgaggagttcggcttcaccgttgataacgtggtcgctaaagcgaaagcgctgctgtaatcgctggtacggtgcgggctgatgccctcaccccacccctctcccacaggagagggtgcaaacaccaaaacggtaacccctgggttaccgttttgcttttatctcgccacccggcttttttgtatctgctattcctgaaccatgtaatacggttgtaaattattccagcaaaaatgtgatgtgagtcatatagctggtttattgcgctggacaaacattccttttattcctcatttcgcttattctagctgaagcgtttcagtcgtttaaatgttcgacaattaatcaatcagtcgcagtttgcagctggtaaggttcccctcagagcgttgctggattactctgtcagccacctcataacagggacagccttgcaggagatctatgaccattcgcatcgcgattaatggcttcggtcgcattggacgcaacgtggttcgtgctctatatgaatccgggcgtcgtgcggaaatcaccgtggtggcaatcaatgagctggcggatgccgcgggcatcgcgcatttattgaaatatgacaccagccatggccgtttcgcctgggatgtccgtcaggagcgcgagcagctgtttgttggcgacgatgccatccgtctgctgcatgagccgaccattgcggcgctgccctggcgcgaactggcggtggacgtcgtgcttgactgtaccggggtatacgggagtcgtgaacacggtgaagcccatcttcaggcgggggcgaaaaaagtgctcttttcccaccccggcggcaacgacctcgacgcgacggtggtgtacggcgtaaatcaggatgaacttcgcgccgggcatcgcattgtctccaacgcctcctgcaccaccaactgcattattccgatcattaaactgctcgatgacgcctatggcattgagtccggcaccgtcaccaccattcactcggcgatgcatgaccagcaggtgattgacgcttatcatccggatctgcggcgtacccgcgcggccagccagtcgatcattccggtggataccaaactggcggcagggatcacccgtatttttccgcaatttaacgaccgttttgaagcgattgccgtgcgggtgccgacgattaacgtgacggcaattgacctgagcgtgacggtgaaaaaaccggtaaaagcatgtgaagtcaaccagttgctgcaaaaagcagcacaaggtgcatttcatggtatagttgactatacggaattaccgttggtctcgacagattttaaccacgatccgcacagcgccatcgtcgatggtacgcaaacccgggtcagtggcgcgcatctgatcaaaacgctggtctggtgcgataacgaatggggctttgctaaccgaatgctcgacacgacgttagcgatggcggctattggtttcaggttcgacgcgtaaacgtcgacaaaactttatgaatcaacgagaggattcaccatgtctgtaattaagatgaccgatctggatctggctggtaaacgcgtttttatccgtgcggatctgaacgtaccagttaaagacgggaaagtaaccagcgacgcacgtatccgtgcatctctgccgaccattgaactggcgctgaagcagggcgcgaaagtcatggttacttctcacctgggtcgtccgaccgaaggcgagtacaacgaagaattctctctgctgccggttgttaattacctgaaagacaaactgtccaacccggtacgcctggttaaagactacctggacggcgtggaagtagctgccggtgaactggtggtgctggaaaacgttcgcttcaacaaaggcgagaaaaaagacgacgaagaactgtctaagaaatacgctgcgctgtgcgacgtgttcgtgatggacgctttcggtactgcgcaccgcgcgcaggcttccacccacggtatcggcaaatttgctgacgtggcgtgcgcaggcccgctgctggccgctgaactggacgcgctgggtaaagcgctgaaagagccagctcgtccgatggtcgctatcgttggtggttctaaagtgtccaccaaactgaccgttctggattccctgtctaaaatcgctgaccagctgatcgtgggcggcggtatcgctaacaccttcgttgccgctcagggccacaacgtcggtaaatccctgtacgaagcagatctggttgatgaagccaagcgcctgctgggcacctgcgatatcccggttccgaccgacgttcgcgtagcgaccgagttctccgaaaccgcaacggcaaccctgaaatctgttaacgacatcaaagatgacgagcagattctggaccttggcgacgtttccgcacagaaactggctgaaatcctgaagaacgccaaaaccatcctgtggaacggcccggttggcgtattcgaattccctaacttccgtaaagggactgaaatcgtggctaacgctatcgcggacagcgaaggtttctccatcgccggcggcggtgacaccctggcagcgatcgacctgttcggcatcgctgacaaaatttcctacatctccactggcggcggcgcattccttgaattcgtcgaaggcaaagtcctgccggcagtagcgatgctcgaagagcgcgctaagcagtaattcagttcaggcggggaaacccgcctgtttttcagcgcgcttaagggctcgcgaaccttcttcaacggtcgaagatacagatacaggactaagtaacatgtctaaaatttttgatttcgtaaaaccgggcgtcatcactggcgacgacgttcagaaagtgttccaggtagcgaaagaaaacaactttgcactgccggcggtaaactgcgtaggtactgattccatcaacgccgttctggaagctgcagcgaaagttcgctctccggttatcgttcagttctctaacggcggcgcagcgttcatcgcaggtaaaggcgtgaaaactgacgttcctcagggtgctgctatcctcggcgctatctctggcgcccaccacgtgcaccagatggctgaacactacggcgtgccggttatcctgcacactgaccactgcgcgaagaaactgctgccgtggatcgacggcctgctggacgccggtgaaaaacacttcgccgctactggcaaaccgctgttctcttcccacatgatcgacctgtctgaagagtccctgcacgaaaacatcgagatctgctctaagtacctggcgcgcatggccaaaatgggtatgaccctggaaatcgaactgggctgcaccggcggtgaagaagacggcgtggataacagccacatggacgcttccgccctgtacacccagccggaagacgtggattacgcctacaccgagctgagcaaaatcagcccgcgcttcaccatcgccgcttccttcggtaacgtacacggcgtgtacaaaccaggtaacgtagttctgaccccgaccatcctgcgcgactctcaggaatatgtttccaagaaacacaacctgccgcacaacagcctgaacttcgtgttccacggcggttccggttcttccgctcaggaaatcaaagactccgtcagctacggcgtggtgaaaatgaacattgataccgacacccaatgggcaacctgggacggtatcctgcagtattacaaagcgaacgaagcttacctgcagggccagctgggcaacccgaaaggcgaagaccagccgaacaagaaatactacgacccgcgcgtatggctgcgtgctgcccagacttccatggtgactcgtctggagcaggcatttaaagagctgaacgcgatcgacgttctgtaagaaaaatctgtttcttacccggaagcccgcagcaacgcgggcttttttattatcttaacaacaggatagcgtggcagaaaactgtgatccatttggcaaaacgtgcacttattgtttaccctataacctgactgccctgtcgcaggctgagttatttacttcccccaggggattcataaggaatgttaaatggaagatttgaacgttgtcgatagcatcaaccacgccgggacgtggctggcacgcaaccaggagctgctgctgagctatgccgtcaacatcgtcgcggctatcgctatcctgatcgtcgggatgatcgtggcgcgcgtcgtctctaacaccgtcaaccgcctgatgctggcgcgtaaaattgacgctaccgtggccgattttctctctgcgctggtgcgctatgcggttatcgcctttacgctgattgccgccctggggcgggtaggcgtgcagaccgcctcggtgattgcggtgctgggtgctgccggtttggcggtgggtttagcgctgcagggatcgctgtcgaaccttgccgcaggcgtactgctggtgatgttccgcccgttccgcgctggcgagtatgtcgaccttggcggcgtggcaggtacggtgttgaacgtgcagattttctccaccaccctgcgtaccgcggacggtaaagtagtggtggtcccgaacgggaaaatcatcgccggcaatatcattaacttctcccgggagcctgcgcgtcgcaatgagtttattatcggcgtcgcttacgatgctgatatcgacaaggtaaagcagctgctgacctcgattatcgaatctgacgatcgaattctgcgcgatcgggaaatgaccgttcgtctgaacgaactcggcgcctcgtcggtgaacttcgtggtgcgcgtgtggagcaaaagcagcgatctgcaaaacgtctactgggatatcctcgagcgtatcaagcgtgaatttgacgccaacggcatcagcttcccttacccgcagatggatgttcatgtggtgcgcctgccggaaaaagcagagtaaagcgcctctcaataactcaggccggccatgccggcctttttcaatagctcatcattagttgttctaattaatgattaattctttcaatttccgctaataattcattcgcgctatagtcagcgccactctcgaactcagcggataaatccttatgtttacttattactttcaggggcttgccctgggagcggctatgatattgccgcttggcccacaaaatgcctttgtgatgaatcaggggatccgtcgtcagtatcatctgatgattgccctgctatgcgcggtcagcgacttgctgttaatctgcgctggcattttcggcggtagcgcactgctgatgcaatccccgtggctgctggcgctagtgacctggggcggcgtggcctttttgctgtggtatggcttcggcgcattgaaaacggcgttcagtcagagtcttgaactcgccaatgcagaggtaatgcagcaggggcgctggaaaatcattatcaccatgctggcggtgacctggcttaacccgcacgtttatctggacacctttgtggtgttaggcagcctgggaggtcagctggcggtggagccgaagcgctggtttgcgctagggaccattagcgcctctttcctgtggttctttggcctggcgctgttagccgcctggctggcgccgcgactgcgtaccgccagagctcagcggatcatcaatattgtggtcggcgccgtcatgtggtttattgcgtttcagctggcaagagaaggcgtcagccatatccaggcgttgcttaactaagcgttgtccgatggactttcctgctgtacgcgctaagcttgctggcatgcgtcccgtaagggcgatttaagtaacatggagaaacgacagtgaagttaaaagtcttagccctggcggcaacactcggattgaccacgatggcggcacaggccagcgaattgccggatggcccgcacattgtgacttcaggcacagcaagcgttgccgcggttccggacatcgccaccctggcgatcgaagtgaacgtgtcggcaaaagacgccgcgtcggcaaaaaaacaggctgacgatcgcgttgcgcaatatctctctttcctcgaaaagagcggtattgctaaaaaggacatcaactcggcgaatctgcgtacccaaccagattacgactatcagaacgggaaaagcattctgaaaggctatcgcgcggtgcgcacagtggaagtgaccttgcgccagctggataaactcaacggtctgctggatggcgccctgaaagcgggtctcaacgaaattcgctccgtctcgctgggcgttgcgcaaccggacgcctacaaagataaagcgcgtaaagcggcgatcgacgacgccgtgcatcaggcgcaggagctggccgcaggcttccacagcaagctgggtccggtgtacagcgtgcgctaccatgtctccaactatcagccgagcccgatggttcgcatgatgaaggccgctgacgctgcgccggtttctgcccaggaaacctacgagcaggcgactatccagtttgacgaccaggtcgatgtagtctttgagctgcagccggcgcaagccgctgctccagccaccccggcgaaaccggcggaaacgccgaaaccggcccagtaagcgatagaaacaaaaaagccacttcagagaagtggcttttttatgcccgcggtttaatcctgacgcagcaccttgtgtccgtagtcaatgagcgcatcggtcacccggcgcatcatgcggctttccggggcgaagcggtgccagtagagcatgcggcgctggaacaggcccggggtgagatcgataagttcgccgctgttgagctctttttcgatctgcagatgcgggatcatacagcaggtggtgccctggcgcgccagctgcacgaaagcttccgacgagttgacgatgtggcaggggacgctgcccggcggcaggtcgaagttttgctgcaggaacgcctgatgcatatcgtccagatggtcgaaggcgacgaccggcgccttaagcagcgccgaacgcgtcacgccattcgggaaatagcgttgcgcaaactcttttgatgcgacaaacaggtaatcgagcgcccccagctgatccaccaggcagcttggcagcgcctgcggctggatactcactgcgcccactacttcgccacggcgcaggcgctcctgggtgcgggtttcatcttccacctgcaggttgagacgaataggggagtctgacagaacattggccagcgccggcagcagccaggtcgccagactgtcggcgttcaccgccagcgacagcagcagcggcgtagagccggtttgttcatcgcccagccattcttcctccagcagttcaacctggcgcaacagagccagcagtttctgtccttgctcggtggggcgcggcggcacggtacgcaccagcagcggctggccaaacatattttccagctgcttaatacgctgtgagacggcggactgggtaatacatagcttctgcgcggcgcgctcaaatcctcgttccctaatcaccgcatccagcgcttgtagtgtcctgtagtccggtcgtttcattattctggcgtgcccccataactaatcgttatctcgcactatgacataaatttttatttgatacagacgaaattggtctgttcagttgtgtgatctgcatcgcagggacatttccactatcgatgttctataatgcgccacaggcattcacatctcggaccagaattatgacgcaggatgaactgaaaaaagcggtaggttgggcagcactgcaatatgtacagccagggactattgtcggcgtaggcaccggctcgacggcggcccattttattgacgcgctgggcaccatgaaggggcagatcgaaggggcggtttccagc

SEQ ID NO: 5361 - DNA, 7051 bp, Unknown
  gut microbiota DNA sequence
gaaagccgttatatctgggatggctaacgcacccgacggggctttttttcccaccgcgtggacaagtattccccagacagatgtgataaatttaaaaatatcactgtttatttgacgctgatgtccgtttgcagcccaatatgctggggtgacgtttggcgtgctggagctgtattattcatgtcagattttattcttgcccgggtgtcgcaaaccctcgctgcggaacagtccctggaaaccctggtgcgccagttgctggagatgctggaggcggtgacgcgaatggagtccacctacctcacccgcattgataccaacgcccagcggcagcagatcatgttcgcccacaacagcagcgaaatgcagatcccggaaggattttccgtcccctgggatgaatccctgtgcaaacgcgcccttgaggatcagtgtacgtttagcaatgacgttgccaaccgctggcactcctgcatcgccgcccaggagctgggaatcgctacttttttaagcattcccgtccgcctggccgacggctctctgttcggcaccctctgcgccaccagccggcaacaacagccttataacctcgaaggcgaacaggtcatgggcctgttcgcgaagctcatttcccactacgtggaaaaagacaccctggtgcaacagctgcaggcggcaaacgtcgcgctggagctgcactcgtctaccgatgagctcacccagcttcccaatcgccgcgcgctgtttaagcagctggcgttacgctttgcctccgcccgcgcccagcagcagcaggtctcgcttatttttatcgatctcgatggtttcaaagccattaacgatcggttcggccatccgtgcggcgacagctttctggtgcaggtcggcaaacgactcaccgctgtcgcgcgccgggaagatatcgttggccgccttggcggcgatgagtttttgatcgtcggtagcgcccagcagcctgccgcacagcaggcgtatgtcacgtctctgcgtcaggctctgtgcggcgtctacttcctcggcgaacagcgtatcgactatgagggcgctagcttcggggtggtcacctgcgatccgcagagtatcgatgttgaagcggccttacgcgctgccgatgaggcgatgtaccaggataagaagtcccgccgccaggagaatttcattcatattgactaaagtaccgcgatatccagtatcatgcagggcatcattcgtgggtacagggacacaatcatgaaattgggtattcttttcccggtggcgatctttatcatcgccgtcgtctttctcggctggttttttgtcggcggctatgcggcgccgggtggggcataatgaaaaaaagcaccattatcatgctggtcgtcgccatcgtggcggtggccggcacccagtttggctggtggtgatcgccgcggcgatattgcggagttatcctatcccatcaataagttaaccctttacactcacgttatccgccgcggcattctcggccccggggaataagaatagcgggagaagtaaggatgaaaaaaccgatcgtgttaccgttgattattgcgctgtgcacgctgttatcgggatgcattattgacgatggatatcatccccatcgccaccaccaccatcatcactatcatgacgacgactaatgcttcacgctgttgataagccgataagacagggcgaaccgcggttcgcccgttgacgcttaatcctgacgatcggcgccgaggaaaataaaaccgagggggatagcgaagagcgcggtaaagacaatgctgtaaaccgtcaccatcgccccctgcaggaagaacatggacgtcgtccactctgagtatggcatattgtactcgctcaccacgcccccgaaggtcgcccgccccactaccgccagcgcgatagcaaacaccgccgcgagcgacagacagtattttttgcagtttttattgctgaggagtttttgcagaatcatcggggcttcctttttgctgagcgataaacggctgtatatgtaacaccaatgcaataaaaaatgaagggtttttgttacagggcagaataagagacggcgggccggtcagcgggtaaccggcccgtggggatcaggactgcagggtagccaggcgcgcggcgaacccgacgaaaaccagaccaatcaggctgttgccaagtttagccagcttcttgcgggttttgacatagcgggtgacaaacgagccggagaggatcaaaaagctcatatagcagaagctaatcacctcgagggtcagcgccaggataaagaacgccacgccgggggttttggcgttgacatcgataaactgcacgaaaaacgacacatagaacagaatcgctttcggattggtcaggctcagggtcagggagcgcttgaggatcgcgctcgccggctccgcgctggcgtcggactggccgtcgcgctgggtcagcaccgcatagagcattttgcccccgagccacagcaggtaaattgccccgaggtagcgcacgacgttaaacaacaccggcgtggttttaatcagcgtcgccaccccggcgaaggccagaaacatcagcactgcgtcgccaataaagacgcccgccgccgccagatagcctttcttcaccccgtgggcaatacccgttttcagcacgaaaaacgtattagggccaggaacgaggatgataaacaccgccccgaccagataggttaaataattcagaacaccaaactcagcgaacactctgcactccttcgcgcacgactaaaacatgatccggctcacgttaccccaactgtcgggattttgaaagcgcagcctgtgcgggaaggttaatagacggaaggttcgcccagcgggcgggttttaaaacgacggtgtacccacagatactgctcgggagcgcgcaggatctcgcgctcaataaccttgttgatatagccggcggcgatctgtttatcctcacccggatagtcattcatcacctcgctgatatgcaggctatagccccggcgatccagcttacgtaccatgctgatgctcaacattttcgcgcccgataagcgggacaggacataggtgccgttggtggtcgccgcctgcgggacggagaaaaaaggtgcaaagacgctgcccttgggaccgtaatcctgatcgggcgcgaaccacaccgcttcaccggatttcaaggcatgcaccagaccggtcagattgttgcgatcgatcatcgctttgttcgaacgcaggcgaccgcgggtttgcacccactccatcagcgggctgttgtgcggccggtaggtggccatcattggccgacacagccccatcgcgcgcccgcccagctccagcgacataaagtgcacgccgacgaccattacccctttcccaccgctaagcgcgtgattaaggttggcgaacccctcgacatcaaaccattttttgacccgctcgtcgctccagaaccaggccatgccggtttcgataagccccattcccagcgacataaagttttgatcgatcagcgtctcgcgcgccgctggcgacatgtccgggaagcagagttcgatattacgccgggcgatatgttcgcggcgtttaagaaagcgacgggaaaggcgaccagcgctggtgccgataaaatgcagcagcggataaggcagttgcacgattaaccagaggatgccgagcccgaaccaggtcagccagttacgcgggtgtaaaagttgtttattaaatacgcaggccatgatttttcctgtaaacattaattatgtggtaacgcttaaggaaaacagaatccatttatcatcattaggcggtacgtacagcaagttcgacaatactaatccgctgaaattccctccggcaagtaaaaaacagcaagctgacaaaaaaacataattgcggcacatatgttactaaatgtaaacttaaatcttgaaccacgctcaatatattcatcatgcatatcattttcacgctaatcatcaacattactaacgaaaacaaccgaaagctgccgcagtgcggccctggccgccggtggcaggcgtccgctgagccgcgcgatcggcggtctgaccgcgttgggatgcatcgtagtctgtcaaagcgagtattaaacgcgtcccactgcgaaatgcatcttttttaatcggtcagcataaaaaagattaaaacgactttaagacaacaattaagaatagacttatttaaacctgcttttaaaataagcgcggtgcattgaaatactgtgcccgccggacaataaaaaatatttctttacgcctcgtgggaaacacaggtggagtgaatgatgggcaatcattcgccatcgatttgcatggaagccaggtcattgagaagaaagcacggcgagggtgtgaacaacgccctcgccgcagaggatcagtaggtatggaaatattgctgaatcagctgcggatctttagtctgcgtcaacgcggtcatcagcagtatacgcgcttttgccgggttgagggagtcggccaccagcccgggctggctgtcatccggcggtacgacgccgctgccggtacgggaggctcgcaccaccacgatgcccgcctgctgcgcttttttgataccggcggcgctacgtaccgacaccgaccccgccccggttccggcgtagataataccgtcggcatgatgggcgatcgccgcatcgtacatatactccggatcgtcctggtaaccataaataatcaccaccttcggcagaaccttcagctgacgcacatcgaacaccgagcgcagcgtgtgaattttatccacccgcgtctcgaactggggttttccgcccaccacgacaccaagatagccctcctcgggcgcccggaaggtatccagcgaagtggcattagttttggtgacaaagcgcgccgcgccgatgcggtcgttaagcaccaccattaccccgcgtccccgggcatcaggatcggcggcgaccgtgaccgcttccagcaggttcatcggcccgtcggcgctgatcgccgtcgccgggcgcatcgccgcggtaaagaccaccggcttgttgcttttcaccgtcagattgaggaaatacggggtttcatccagcgtgtccgtgccatgggtgatcaccacgccatcgacatcgtcccgagccaatagcgcattcacccgcttcgagagctggagaataatatcgctggtcatattctcactgccaatattggccacctgctcgccctcgacgtgagcgattttactcatttccggcacggcgttaatcagcgtctgcaccccaatcgccccggctttatagccggttgtttgggtattgctggccgccgaaccagcaatcgttccgccggtggctaaaataacaatatgcggaagacgcgtctcgctaaacgccaggctgctcatcgtcaataacgcaatggcaagtaatgctctaaaattcatacaggtcactcccttcatagacattaatcaaacttacgcttgcttaatgcaaagggcttgccagaattcatttcttttctgggggggaaatggttaactatcagacaataataaggttcttaggacgatatcgcccaactctggtgcaccactggatctgaaacgggcagagctatgaaccaaaacattctgaggatttacctgttcagcaacacacaacacgcattgcgatcagattatcgacacttccgtcaccggcgagagcatttttgcccgccaggtcacgcgaacggagaacagagatgcgtattgccctgaagtcggccctgatgctgaccaccagagtcatccagatcattaaccctgaactgcaccggcatatgcaacgaacggccttaatcgccctgacgctggcgcaaaggctggaactgcctgacgaacggcagcagaccattttttgcgccgcgctgctgcacgatatcggcgtgctgggggataaacgcaccattcattcgctggatgctatcgataatatccacgacccgcatcagcgccagggtgtggcgatgctggagggattagcgaccttccagcccatcgttccctttattcgcgatcaccattttagcccgaaccaccggggctcccgcgaacagcacattgtctatttcgctgatgcctttgaacggctgctgccggccgatagccacgttgccgcctggcccacgcgggcggtggtggaacagttcgtcgctttgcatcgggagatcgatccgccgctctgcgatatcctgtgcgaggtcgctgaaaatgcgaacttctggcagcaccttcaccccggccatattcagcggctgctggagattattggccccatcaacacgcgctatctggatattcacggtctgaaggatgtctgcctgctgattgccaaaatcgtcgacacctacagcagctttaccgccacccatagcatcatggtgggggaaatcgcccgccagcttgcccgctggatgcagctgccggagcccacctgtcagcaaatacagatagccggctatctacacgatattggcaaggtctatatcccactctccattctcgaaaaagagggcgagctggatgatgaggagctgagtcaggtgcgggagcacagctacatgaccggcgaacttctcagcgactatagcgagctcggcgacatcattaactgggcctcgaatcatcatgaaaaaatggacggcagcggctaccctctgcatctcgaaaaggagcacctgaccctcgccgaccggattatctccatcgccgatattttcaccgcgctgaccgaagatcgcccttatcgtaaagggatggcctggcaggaggccttacagattatggaaacggatgttataaatggcgctctggatcgcgatgtctttctcgttttacgccaccatgcggaaacgctacacgccatcattcttcagaccctcgaacacccccgcagcgagcaccgtccctgaagcggaccgccgtcgtgacgggggcgggttctataattaaaacagcttcatctgcatgcaaggaaacac

SEQ ID NO: 5362 - DNA, 41978 bp, Unknown
  gut microbiota DNA sequence
ttcgctcgagtcgaaccttagtcgaagcttctcatccttccctgtagggcagaatatagaataccgtaggtagattatgctgggcatggcatggggagatggtggtgggggaaggattcgaaccttcgaagtcgatgacggcagatttacagtctgctccctttggccgctcgggaaccccaccaggggtaaaatcacattgtaggctattcagcaaaatgaatggtggtgggggaaggataactcgtcgctatctctcctcgcccttcgggccgttgcctgcggcaacgttctctcgctggcgctcgagtcgaaccttagtcgaaggttcttacccttcccgctaagtgcaaacatcgtttacgcttgtcggggaaaccatatcactgtagtgaataatggtggtgggggaaggattcgaaccttcgaagtcgatgacggcagatttacagtctgctccctttggccgctcgggaaccccaccacggggtaatgcttggtactggcctgcttccttctcgggaagcggggcgcatcataccaaatgatgcgcccctgtaaagcattcgtttgacaaaaataaactggttgcctgatttttacacgtaacgccgtaaagctaaccaattcatttctgagtcgattaaagaataatcgtccggttaccgtaaacgaagacgcgctgcgccagtacctgatacagcgcccggctcaagacgtttttttcgacatcgcgcccagcgcgcatcatatcttctgcggtataagtatgatcgacgtgaatcacgtcctgcatgatgatcgggccttcatccagattgtcattcacgtagtgggcggtagcgccaatgattttcacgccgcgctcataggcctgatgatagggacgggcgccgataaacgccggcaaaaacgaatggtggatattgatgattttgttcgggaagcgggcgacaaattctggcgtcaggacgcgcatatacttggccagcaccacgtaatccggttcgtgggcggcgatagcatcgcccatccgctgatcgtgttcttcgcggctcagtccttcatggctgaccagctcaaacggaataccaaagcgctccaccaacgagcgcagggtgtcatggttgccgataaccgcggcaatatcgacatccagcccgccgtagttggctttcatcagcagatcgcccagacagtgcgcctctttcgtcaccagaatcaccacccggcgacggcctgccggatttagttcgcggatggagccttcaggcagggcgctgtcgagatcggccagcagagtagcgtcgttaaaaatgccttccagttcggtgcgcataaagaaacgaccggtacggtggtcaacaaactcattgttctgcacaatgttgagttcatgcttgtagcagatattggtgatacgcgcgatgaggcctttctgatcagggcaaatagtgcgtagtactttacgttgtaatgaatgcatcgcgaggaaaatcctgtaatgtttgcaagcgctgtgccagcgttactggccgcagcattttttaaattttttacctgagccgcaggggcaggggtcgttacggccaatcagcggtcgtgtcccgtcgatatagtaccactgtccattttcttttaagaatctggaacgttcaataatggcgccagggcggttattgtcattaaagcgggcgacaaagctgacaaaaccttcatttggagctcgcccctcatcactggcgaacagggttaagcccagccattcggtctgggaaaaccctttctccagttcggcgcgaaattgctgcgcctgacagaacggatgccaggttttgattagatagtcagcgtctttcatgacgaacgcgctataacgggagcgcataagctgtgacgggcccggcgcaagctcagcgccggacagatatcgctggcaacatgagctatactccagtgcgctgccacaggggcataattgcgacaaaactgcctccatggaagaaagagtaacggcgcttctacgccaaagggcattatgttaactgagccgtgacaatgttgccacgctcagagtggaaggatagttattagtactaatgagaaagcttaaaattggtctggcgctaggtgcgggagccgctcgcggatggtcgcacattggcgtcatcaacgccctccagcgggccggtattgagattgatatcgtagccggttgttctatcggttcgctggtaggggcggcgtatgcctgtaaccgactcccggcactcgaatcatgggtctgctcattcagcaactgggatgtcctgaagctgatggatctctcctggcgccgggggggactgctgcggggggaaaaagtattcaatcattaccgccgcattatgcccgtcaccgagattgaacgctgcgagcgccggtttgctgctgttgccaccaatttaagcaccggtagggagctgtggtttaccgaaggcgatctacatttagccattcgcgcctcctgcagtatgccggggttaatgtcgccagtaaggcataatggttactggctggtcgatggcgcggtggtcaatccggttcctgtgtcgctcacccgggcaatgggagcggatattgtgattgccgtcgacctgcaacatgatgcccatcttatgcagcaggatttgttctcccttgaaacgccgcggcaggaagcggaagagaaggaggggccatggcatactcgtctgcgcgcgcgcttgacgcgaatgagttcccgccgtacggccgtgacgccgacggcgatggagatcatgaccacctctatccaggtactggaaaaccgtcttaaacgcaatcgtatggcgggtgacccgccggatatcctgttgcagccatactgtccgcaagtttcgacgcttgattttcatcgcgccggagaggcgattgccgcggggcaactggcggtagaaaagaaaatggatgaattattacccttagtgcgtacagccgtttgacgtacgagttactgacttaagcaaattctgacaggcgatagtgagaatagcgtgccactattgaattatcgtcagccaggggagatatcatgacgcagccattggcgggaaaacagattctgatagttgaagacgaacccgttttccgctcactcttgcatggatggctgacctcgctgggagcaacaaccttccaggcggaagatggcaaggatgccctgcataaaatgacggaggtgcatccggacctgatgatttgcgacatttctatgccgagaatgaacggtctggagctggtggaaacgctgcgtaaccgcggcgaacagttaccgatcctgatgatctccgccaccgaaaacatggcggatatagctaaagcgttgcgacttggcgtccaggacgtgctgttaaagccagtaaaagatttcgatcgcctgcgcgagaccgtttacgcctgtctctatcccgcgatgttcagttcgcgcgtggaagaggaagagcgtttatttgaggactgggatgcgctggtcagtaatcccatcgccgcttcaagactattgcaggaattacagccgccggtgcaacaggaaatgtcgcactgccgcgttcattatcgacaactggtgtcggcagacaagcccggtctggtacttgatatcgcgccgctttcggaaaatgatttggctttctattgtctggatgtcacacgcgcaggcgataatggcgtgttggcagcattattgctgcgcgcgttgtttaatggtctgctgcaggagcaactggcgcaccagggacaacggctaccagaaatgggaagtttgttaaaacaggtgaatcaactgctgcgtcaggcaaatcttccgggccagttccctctgttagtagggtattaccacagcgggctgaaaaatttaattctggtgtcagcgggacttaatggcacgctgaatacgggggagcatcaaattcagattagtaatggcgttcctttggggacgctgggtgatgcttatcttaaccaaattagccaacgctgcacctcgtggcagtgccaaatttggggggctggcggtcgtttacgcttaatgttgtctgcggaatgagcaattgcgtttatatctaagcagacgggattacctcttgccctttagcggtggtaacatcgagcagttttatgcgtaaaagtcctaattcgaggctatcggcagcttttcagaccagtaaatacgcggttgactgatatactcgacacgttatttgtaacgagaagtttaaaaaacaaacagtccaggagatttcaatggctgcccttaattctaaagtcagaaaagcggttatcccggttgcgggattaggcaccaggatgctgccggccaccaaagcgattccaaaagaaatgctgccgctggtagataagccgttaattcagtacgttgttaatgaatgtatcgctgcaggaattactgaaattgttctggtaacgcactcgtcgaaaaactctatcgaaaaccatttcgataccagttttgagctggaagcgatgctggaaaaacgtgtaaaacgccagctgctggaagaagtgcagtctatttgcccgccgcacgtgactattatgcaagttcgtcagggcctggcgaaaggtctgggtcacgcggtgctgtgcgcccatccggtagtgggagatgagccggtcgcggttattctgccagacgttattctggatgaatatgaatccgatctgagccgcgataacctcgctgagatgatctctcgcttcgatgagactggcgccagccagattatggttgaacctgttgaagacgtaaccgcttatggcgtggttgactgcaaaggcgaatccctgaagccgggcgaaagcgtaccgatggtgggcgtggttgagaagccaaaagctgacgttgcgccgtccaacctggcggtggtggggcgttatgtcctcagcgccgatatctggccgctgctggcgaaaacccctccgggcgctggtgatgaaattcagctgactgacgccattgatatgctgatcgagaaagaaacggttgaagcttatcatatgaaaggcaagagccatgactgcggtaataagcttggctacatgcaggcgtttgtcgaatatggtattcgtcacaaaacgctgggcgacgactttaaagcctggctggaaacggcggtagcgaagtaatccgccgcgcggttgaaagcacaaaccgggagcgcatctgggactcccggtttttttatatcggccctgagggcaaaaaaaatcccgccgcagcgggattttttatagcgatcaacggagattagatcaggaaatcgtccagtgatttaccttgctcatccattgcttttttgatcacagccggggtacggccctgaccggtccaggttttggtttcaccattttcgtcaacatagctatatttagccggacgtgcagcacgcttggttttggtaccggctttaacggcagccatggtgctcagcagttcattcggatcaataccgtcagcaatcagcatttcacggtattgctgcagcttacgcgtacgctcttcaatttctgccgcggcagcgttttcttcttcacggcgctcgttaacgacgacttctaatttttccagcatttcttcgagcgtttccagggtgcattctcttgcctgcgcacgaagagtacggatgttgttcaaaattttaagtgcttcgctcattgtagtaatctcaaacttatattgtggggtggtttgttgaactaataatagagcgataaaatgcgttgtgcaataggggggaatgtaaggaattcaaaattactggttatttgtcgcgagaattaattaatttaagttaaaattcccgtgccgcttcacatctttcatcgcttatagcgatgaggcgaaggcaagctaaaacattgagacggtatgctttttgagaggttcagtgagagaaatgatcctttacatgggtaaataaccctcgtcagtattagcgcatttttggttacaaggcttaatataaaacaaccggcagccctgcttatagcccatgggcaaccggtctataagcacgaaaagacaatggttaccgcgccagtagcgtaacggggcgtacaaatagtggccctgaaaattcaattcatcttcttaatcctttcggtttacaggcccttcagcttcgcgacaatacccctgctgaaagcgcggctgtgcgcataaaatatggtacaatcgtcgccgcgataaaacactttgattggggtcacgcagccgatggcacaactttatttctactactctgcaatgaatgcaggtaagtcgaccgctctgttgcaatcttcgtacaattaccaggagcgggggatgcgtaccgtcgtttataccgctgagattgatgaccgctttggcgccggaaaagtcagttcgcgtatcgggctctcctcgccggcccgattgtataatccacagacctcgttatttgacgatattgcggcggagcaccagctaaagccgattcactgcgtgctggtggatgaaagccagtttctgacgcgtgaacaggttcatgagctgtccgaagttgtcgatacgctggatattccggtgctttgctatgggttgcggacggactttcgcggtgagctctttaccggcagccagtatttactggcctggtcagataagctggttgagctgaaaacgatctgcttctgcggccgcaaggccagcatggtattgcgcctcgatcaggaggggcgtccttataatgagggtgagcaggtcgtcatcggcggtaatgagcggtacgtatcggtctgccgtaagcattataaagaggcgctgagcgtcggttcgttaaccaaggtacaaaaccagcaccgtccctgctgataccctcagaagctcgtacaggcgcctgtgggcgcctttttaatgtctgctataggttggcgtagctggcgataaagaatggttgatagcggggataaaaaaagccccgtcaggtgacggggcttgtcgcgatgctatcgctgttggttaagcggattttttcgcttttttctcagcctttaccggggcaacttcggctttcgcaccggcttcgccttcgacgaattcgcggccgtagtaggtatccagcaggatctgtttcagttcggagatcagcgggtagcgcgggttagcgccggtgcactggtcatcgaatgcatcttcagacagtttatcaacgtgggccaggaagtcagcttcctgaacgccagcttcgcggatagatttcggaatacccagctcagctttaatgctttccagccatgccagcagtttctcgattttcgctgcggtgcggtcgcctggtgcggagaggcccaggtgatcggcgatttcagcgtaacgacgacgagcctgcggacggtcgtactggctgaacgcggtctgcttggtcgggttgtcattcgcgttatagcggataacgttgcagatcagcagggcgttggccagaccgtgcggaatatggaactgggagcccagtttgtgcgccatcgagtgacacacgccgaggaaggcgttagcgaacgcgataccggcgatagtcgcggcactgtgtacgcgctcacgggcaaccgggttcttggaaccttcgtgataggaagccggcaggtactctttcagcagtttcagcgcctgcagcgcctggccgtcagagaactcagaagccagtacggaaacgtaagcttccagggcgtgagtcaccgcatccagaccaccgaacgcacacagcgatttcggcatatccatcaccaggttggcatcgacaatggccatatccggggtcagcgcgtagtctgccagcgggtatttctgaccggtcgcgtcatcggttaccacggcgaacggcgtcacttcagaaccggtaccggaagtggtagtgatcgccaccatcttggctttgacgcccattttcgggaacttgtagatacgtttacggatatccataaagcgcagcgccagttcttcgaagtgggtttccggatgttcgtacatgacccacatgattttcgccgcatccatcggggaaccgccgcccagggcgatgatcacgtctggtttaaaggagttcgccaggtcggcacctttacgtacgatggtcagcgtcgggtcagcttcaacttcgaagaagacttccgtctcaacacccgcagctttcagtacggaagtgatctgatcggcatagccgttgttgaacaggaagcggtcagtcacgatcagcgcgcgtttgtgaccatcggtaatcacttcatccagtgcgattggcagggagccacgacggaagtagatagatttcggaagtttgtgccacaacatgttttcagctcgcttagcaacggttttcttgttgatcaggtgtttcggaccaacgttttcagagatggagttaccaccccaggaaccacaacccagagtcagggaaggcgcgagtttgaagttgtacaggtcaccgataccaccctgagaagccggggtgttgatcaggatacgcgcggttttcatcatttggccgaagtaagccacgcgagccggctggttgtcctggtcggtgtacaggcaagaggtgtggccgataccgcccatggcgaccagtttttctgctttggctaccgcgtcttcgaaatcttttgcacggtacatagccagcgtcggagacagtttttcgtgagcaaacggctcgctctcgtcaacgttggtcacttcaccaatcagaattttggtggtggccggcacggtgaagcctgccagttcagcgattttggccgctggctgaccaacgatagccgcgttcagcgcgccatttttcaggataatgtcctgaacggctttcagctctttaccctgcagcaggtagccgccgtggctggcgaaacgttcgcgaaccgcgtcatagactgaatcaaccaccacaacggactgctcagaagcgcagatcacgccgttatcgaaggttttagacatcagtacggacgctacggcacgtttgatgtcggcggtttcatcaatgactaccggggtgttaccggcgccgacgccgatagcaggtttaccggagctgtacgctgctttcaccatgcctgggccaccggtcgccaggatcaggttgatgtccgggtgatgcatcagcgcgttagacagttctacagacggctgatcgatccagccaatcaggtccttcggcgcgccggccgcgatggcagcctgcagcacgatatcagccgctttgttggtggcttcttttgcacgcgggtgcggagagaaaatgatggcgttacgcgttttcagactgatgagcgatttgaaaatggctgttgaagtcgggttagtggtcggtacgataccgcagatgatgccgataggctcagcaatagtgatggtgccaaaggtgtcgtcttctgacagaacgccacaggttttttcgtctttataagcgttgtaaatgtattcggaagcaaagtggtttttgatcactttgtcttcaacgatgcccatgccggattcggctacggccattttggcgagagggattcgagcatctgcagcggccagagcggcggcgcggaagattttgtcgacttgttcttgagtgaaactggcatattcacgctgggctttcttgacacgctcaacaagcgcgttcagttcagcgatattagtaacagccataatgctctcctgataatgttaaacttttttagtaaatcagtcgctcgattcgacattatagacaggccgttaacagcttgcatgtaaatgtttatgtagaaaaatcagggcgctgtttcaccgatttactaaaaaagctttatctctttcgctttcaggtactgctgccttccactctgttggtgtcatcaagattactcacttctgagtacaaattacgtgatttagatcaagtattgtcgctgctgatacctttcagctggctgctttttgaccggttcgatcaagtgtgatgggagggttttgaaattaaaaaaaacgattagcattaaatatacaaatggctaacattcgatacatatcaccgggttatgcatatttataatgaatattgcaggtaaaaagcgtatgtttcgcgcagttattttatgctgttaacagtcaaccgccaattttgatgatgctgcggagcccaatgtgactcaatcactgttcgatttttctgcatatttcaagtttttcatcggcttatttgccctggttaacccggttggcattattccggtattcatcagtatgaccagctatcagccggctgcggtgcgtaataagaccaacctcaccgccaacctgtcggtggcgatcatcctcctgacgtcgctgttcctcggcgatggcattctgcagattttcggtatctccattgactccttccgtatcgccggcggcatcctggtggtgaccatcgcgatgtcgatgatcagcggtaagctcggcgaagataagcagaacaagcaggaaaagtcggagacggcggtccgggagagcatcggcgtcgttcctctcgcgctaccattaatggccgggccaggggcaatcagttcaactatcgtctgggggacccggtaccactcctgggtgcatctggtcgggttctcactggcgatagcggtatttgccctctgctgctgggggattttccgtatggcgccgtggctggtccgtttgctggggcagacgggaatcaacgtcatcacccgtattatgggcctgttgctgatggctctcggcattgagtttattgtgaccgggattaaagcgcttttcccaggactgctgagttagttcgtcgccagcaggcggggagtctcgcttcacgcctgcgcgattattagcaaaacctattagccagcgcggagctggcggtagggataatattttgcgatatcgctattaatttcatgtttttcattaagatatgaaatatttctcttaacattctcctcacgcctccccctcctgtgatgttattttcttcacatcattctctggtacttgctgtcggatcatcgaaatgatattagtaattttaacaaggcggcagatgaatgtgctaaaaagtaatctattgttaaatttttgtacaaaaaaccatcttgcggtcgctgctcagtatgtcggctgatgaaattatcgtaacatactgataagtaatgatatttttacatcgacgttttatagcaaacgcttgtcacgctggcaaaaccggcaataaaagagaattcggtaacatatttgcaaattgcattggcggaggtgtttaccttttggtactttccgccgttatcgtctgctgaattatgtacgcaaatgagaattatttttaattaactcatttcgccagaacgaccctcctgcgagggcaacgaatcgacgttaagactgccgttcgagcggtcgtaataaataagtcggtgatagcaatctgccaatcgcaaactcctgcgttggacagaacccgaaaacgggaaaaacaggctggttaaaaaaccagtaattataatgactggagttacaacacaatgaccatcatcactaaaaagcgtttaatcgccgcgggagtgctatccgcactgatcgccggcaatatggcaatggcagcggatgtcccggctggtgtgcagctggcagagaagcaaaccctggtacgtaatagcggcgccgagccgcaatcgctggacccaaataaaatcgaaggggtgccagaggccaatattagccgcgacctgttcgaaggtttgctgaatacttcgccgaaagatggccacccgatccctggcgtggcggagagctgggataataaagattttaaagtctggaccttccatctgcgtaaagatgcaaaatggtctaacggcgagccggttaccgcccaggacttcgtatacagctggcagcgtctggtggatccgaaaacagcttctccttatgccagctatccgcaatatggtcatatcgttaacgtcgacgaaatcattgacggcaagaaagcgccgagcgagctgggcgtaaaagccattgacgaccacacgctggaagtcaccctcagcgaaccggtaccctatttttataaactgctggttaacccggcgatgtctcccgtctacaaaccggccatcgaaaaatttggcgaaaagtggacgcagcctggcaatatcgttaccaacggcgcgtatactctgaaagactgggtggtcaacgagcggatcgtgatggagcgtaacccgcactattgggataatgctaaaaccgtcattaacaccgttacctggctgccgacctcttccgaagtgacctatgttaaccgctaccgcagcggtgaactggacatgacttataaccagctgccgatcgaactcttccagaagctgaaaaaagagatccccaacgagctgcacgttgacccctatctttgtacctattattacgaaatcaacaaccagaaggccccgttcaccgacgtgcgcgtgcgtaccgcgctgaagctgggtctggatcgcgatattattgctaataaggtgaaaggacagggcgatctgccggcctacggctataccccaccgtataccgatggcgcgaagctgagcgagccggaatggtttacctggtcgcaggaaaaacgcaacgaagaagcgaaaaaactgctggccgaagccggctatagcgccgataaaccgttgaccttcaacctgctgtataacacctctgatttgcacaagaagctggcgattgccgccgcctcgctgtggcgtaaaaacctgggcattgacgtgaagctggtcaaccaggagtggaaaacgttcctcgatacccgtcatcagggcacctatgacgtggcgcgtgcgggctggtgcgccgactataacgagccaacttctttcctgaacaccatgctctctgacagttcaatgaacaccgcgcactataagagcccggcgttcgacaagattatggctgaatccgtaaaagcatccgatgaagcgcagcgcacggcggcctatgcgaaagcagagcagcagctggacaaagacagcgcgatcgtaccggtctattactacgttaacgcccgcctggtgaaaccatgggtcggtggctataccggtaaagacccgatggataacgtctataccaaagacctctacgttatcaaacattaatggcaatacgtggagcgggtctcggctcgctccatcgtgtcttatttgagagcagtgcaaaggcacacgccagaaggtacgggcaatgttaaaatttatcttacgtcgctgtctggaagcgattccgacgctatttattcttatcaccatctcattcttcatgatgcgtctggcgccgggaagtccttttaccggggaacgcacgctaccgccggaagtcatggcgaatattgaagcaaaataccatttaaacgaccctatcatgacgcagtacttcaattatctgaagcagctggcgcatggcgattttggtccctcttttaaatacaaagattattccgtcaacgatctggtggccgccagcttcccggtttcagcgaaactgggcttcgccgcctttttactggcggtggtgatcggcgttgccgccggggtgatagccgccctgaagcaaaatacccgctgggactacgcggtgatgggggtagccatgaccggcgtggttattccgagctttgtggtcgcgccgctgctggtgatgatctttgccattaccctgcactggctgccgggcggcggctggaacggcggggcgctgaaatttatgatcctgccgatggtggcgctttccctggcctatatcgccagcatcgcgcgtatcacccgcggctcaatgattgaagtgctgcactctaactttatccgcaccgcgcgggcgaaggggctgccgatgcgtcgcattattctgcgccatgcgctgaagccggcgctgctgccggtgctctcctatatggggccagctttcgtgggcattatcaccggctcaatggtcattgaaaccatttacggcctgccggggatcggccagctgttcgttaacggggcgcttaaccgcgactactctctggtgctcagcctgacgatcctcgttggcgccctgactatcctgttcaacgccatcgttgacgtgctgtacgccgttatcgatccgaagattcgctactgaagccggagttcgccatgatgttaagtaagaaaaatagcgaggcgctggaaaacttcagtgagaagctggaagtggaggggcgtagcctctggcaggacgcgcgtcgtcgctttatgcataaccgcgccgcggtgaccagcctgattatgctggtgctaattgcgctgttcgttaccttcgcgccgatggtatcgtcgttctcctacttcgataccgactggggcatgatgtccaatgccccggatatggcctccggccactacttcggaaccgactcctccgggcgcgacctgctggtgcgcgtagcgatcggcgggcgcatttcgctgatggtcggggtggcggcggcgctggtggcggtgatcctcggcacgctgtacggttcgctctccggttatctcggcggcaaagtggattcggtgatgatgcgtctgctggagatcctcaactccttcccgtttatgttcttcgtcatcctgctggtgaccttttttggtcagaatatcctgctgatctttgtcgccatcggcatggtgtcctggctggatatggcgcgtatcgtgcgcgggcagacgctgagcctgaagcgcaaagagtttatcgaagccgcgcaggtcggcggggtctcgacggcgagcatcgtgctgcgccatatcgtccccaacgtgctgggggtggtggtggtgtatgcctcgctgctggtccccagcatgatcctcttcgaatccttcctcagtttcctgggactggggacgcaggagccgctcagcagctggggggcattgctcagcgatggcgccaactcaatggaagtttcgccctggctactgttgttcccggcgggtttcctggtggtgaccctgttctgtttcaactttatcggcgatggtctgcgtgatgccctcgacccgaaagaccgctaaggagcgctgccatgaccatgattgaaacggcaaaagcgccgcaagcgcagagccacagcggactactgctggacgtgaaagatcttcgcgtcacctttaaaacgccggatggcgacgtcaccgccgtcaatgatctgaacttcaccctgcaggcgggcgagacgctcggcattgtgggcgaatccggctccggtaaatcgcaaaccgccttcgccctgatgggactgctggcggccaacggtcgcatcgggggttccgccacctttaacggtcggcaaatcctcaatttgcccgagcgtgagctgaacaaactgcgcgctgaacaaatctcaatgattttccaggatccgatgacctctcttaacccctatatgcgggtgggcgagcagttaatggaagtcctgatgctgcataaagggctgagtaaagccgaagcgtttgaagagtcggtgaagatgctcgacgcggtaaaaatgccggaagcgcgtaagcgcatgaaaatgttcccgcacgagttctccgggggcatgcgtcagcgcgtgatgattgccatggcgctgctgtgccggccccggctgctgattgcggatgaaccgaccactgccctggacgttaccgtgcaggcgcagatcatgacgctgttgaatgagcttaaacgcgaattcaacacggccattatcatgatcacccacgaccttggggtggtggcagggatctgcgataaagtgctggtgatgtacgccgggcgcaccatggagtacggtcaggcgcgcgatgtcttctatcaaccgtcgcacccatactctattgggctgttgaatgcggttccacgtctggatgcggaaggcgatgcgttgttgaccattcccggcaacccaccgaacctgctgcgattgccgaaaggctgtccattccagccgcgctgcccgcatgccatggagcagtgcagcagcgcgccgccgctggaatcgttcgcgccaggccgcctgcgcgcctgctttaaaccggtgggggatctgctatgaacgccgtaactgaacaacgaaaagtcctgctcgaaattgccgacctgaaggtgcacttcgatatcaaagatggcaagcagtggttctggcagccgtcgaaaacgctgaaagcggtggatggcgtgacgctgcgcctttacgagggtgaaaccctcggtgtggtaggggagtcgggctgcggcaaatcgaccttcgcccgcgccattattggtctggtgaaagcgaccgatggcaaagtggcctggctgggtaaagatctgctgggcatgaagcaggaagagtggcgcgacgtgcgcagcgatatccagatgatcttccaggatccgctggcctcgctgaacccgcgcatgaccatcggagaaattatcgccgaaccgctgcgtacctatcatccgaagatgccccgtcaggaagtgcgcgatcgcgtcaaagcgatgatgatgaaagttggattgctgcccaacctgatcaaccgctatccgcacgagttctccggcggtcagtgtcagcgtatcggcatcgcgcgggcgctgatccttgagccaaagctgattatctgcgatgagccggtctccgcgcttgacgtgtcgattcaggcgcaggtcgtcaacctgctgcagcaactgcagcgtgagatggggctatcgctgatatttatcgctcacgatctggcggtggttaagcatatctccgatcgggttctggtaatgtatctgggccatgcggtggagctggggacctacgacgaggtgtaccataatccgctgcatccctataccaaagcgctgatgtcggcggtgccgatccccgatcctgatctcgagaaaacgaaaactatccaactgctggaaggcgaattaccctcgccgattaatccgccctcaggctgcgtattccgcacccgctgtccgcttgccggaccggagtgcgccaaaacccgcccggtgctggaaggcagtttccgccatgcggtttcctgccttaaggtagacccgttataatctcaggggctgacgcaggtcagccctttttttttgcgaggttaacgaagtgggtatgctttctgccgctcgtctgcggctttatcatttacttttcgatcagaaccgacgttccggccgccgctttgaagggctgtgcggacttttcgccctgctcagcgtactggtgatatttatcgagtcgggactgggcacgcaatatcacctgacattagatgaatggcatattttcgtctggctggagctgctggtgaccgcggtctttaccctggaatacctgctgcgtatcgctacctggcccaatccgctccactatattttcagcttttgggggctgattgacctggcgacgattttaccgctgtatgtgatgtggctatggccggaaattagcctcaattatgtattcgcctggcgggcaatgcgggcgatccgcgcgctgcgtattctcaaactactgcgctttatgccttcgctcaacgtgttctggcgagcgattgtcagtgcgcgccatcagctgatcctgttttattcgtttatcgccattgtgatggtgattttcggctcgttaatgtatctgattgaggggccggaatacggctttaccacgcttaacgcctcggtctattgggccatcgtgaccatcaccaccgtcggctacggagacatcacgccgcacacgccgttgggtcgcatcctggcctccattcttatcctgatcggctactccattattgccataccgaccggacttatcaccacgcatatgaccagcgccctgaatcgtcgacgacagcagcgcctgtgtccgcagtgtcagcagggcgaccatgacgataacgcccgtttctgccatgcctgcggtcatgccttgccgaagtaagctggcgacgtaaaaaaagcctgccgggagaaccgcggcaggctttttactggatgttaaaggttattcacgccacagaatatggcacagcttatgatctttctcgcggcacagcagaacgcgggcgaagatatcattgatttccccgccgtcggtatccgccagaccaatcaccacttcggcgaagaaatccgggttgagatcgtaatccacatgctcttcccagtctgccgaagggtcgaacagttcggcgccgccgcgctcctcaaactgcaggttaaacagaatgatgtccgccgggtcgagattgtcggccgccagttcgaggaagatatcgtaagcctgctcgagcgtttcgtcttcggtcaggcggttgtttaaatccatatccatgattgctactcattcggtatctgatgggcacgttttacagcaacgggctgaagaagtaaaacagtcgctcggcgatccgctgccacagcggacgttttaaccagagacgggcatccagcaggcgcgagcgcgagatataatcatcctgaaccgccgccagatcgctgccgaaaccggcgtcatcgatgaccagggtaatctcgaagttgagccacaggctgcgcatatccaggttgacggtccccaccagacttagctcgccatcgaccagcacgctcttggtatgcaacagtccgccctcaaactgatagattttgaccccggccgccagcagctcggtgaagaaggcccggctggcccagcctaccagcagcgaatcgttcttgcgcggtaaaataatgctcacgtcaacgccgcgctgggcggcggtacagatcgcatgcagcaggtcgtcgctgggtacgaagtagggggtggtcatgatcagatgctctttcgccgcataggcggcggtgaggagagcctgatgaataagatcttccggaaagcccggtccggaggcgatcgtgtgaatagtatgtccgctggcctcttcgaacggcatgatattgacgtccgggggcggcggcagaatgcgcttgccagtctctatttcccagtcgcaggagtagacgatgcccatcgaggtcgccaccgggccttccattcgcgccatcagatcaatccactgtccgactcctgagtcctgtttaaagtagcgcggatcgaccatattcatgctgccggtgtaggcgatatagttatcgatcatcaccattttacgatgctgacgcaggtccatccggcgcaggaacacgcgcatcaggttaaccttaagagcttcgacgacttcaataccggcgttacgcatcatcgccgcccatgggctgcggaaaaaggccacgctgcccgcggagtcgagcattagccgacagtgaactccgcggcgagcggcggccatcagggattcagcgacgctgtcggccatgccgccgggctgccagatataaaagaccatctctatgttgtgacgggccagctgaatatcgcggatcagggcctgcatcacgtcgtcagattccgtcagcagctgtagctggttgccttttacgccgccaatgccctgacgccgttcgcacagcttgaacagggattcggccaccgggctgttatcttccgcgaagatatgtttgcaggctttgaggtcgtttaaccacttggccgtcgagggccacatcgccctggcgcgctcggcccgacgcttgccgagatgcagctcgccaaaggagagataggcgatgatccccaccagcggcaggatataaatgatcagcaaccatgccatggcggacgggacagcgcggcgtttcattagaattcgtaatgttacaccggcgatcaacagccagtaccccagaatgaccagccagttcaccaccgtgtaaaaggttgtcatagatgtaaaatccttttgaatgacgatatgtgatgagtttacgcatcagtatttttctggcaaataaaaacgcagcgaaagcggtagtcagttgctggcagaggtttataatgggggctgttttcactcgtagagtcgttgcaatgaagcgtagtagaacggaagtagggcgctggcgcatgctgagacaggtgaatcgccgtaaagcgcgctggctggaagcccaatcgcgccgcaatatgcggatcctcgctatcaggaaggggctggtgaaacggcagcgtcatgccctgctgtttatcttccctgacagctaagcgagcaggcaaacggcaccgtacgcggtgccgttgtcgttttctctctgcgctaaattcccgttgcacatctccatagggcaatgatggtttttcatgctgctatgcgacgacaaaacagagctcccgcctcagtgaaagagagatgctacgcctggcttgtaatgacggacgacaagatccagagccaagtcgtttgcggcgcgacaggaattaaccgtcagatagcatttattgccgctcagggtttattgccgctcaggaagggcatggcgttattaaatgcttaatgatatgaccggccagctgcggtaaccaggcgggaactgagggaatgagaaaacagactcagacaggcaagggggttattaagcggtccagcgcgttgaagctaaatgaaccgaccgatcctgaccatgaataatctgagcctgttatattatccagagaggccatgcaataagcatcctgaataaaacgcaatcgttgcgccagcttttacttattttgcataggcttccgtggataacgtgatggtgacgttatcacttaccgccggcacatatttatcaagcttaaagtctgaacgttttatcaccccggtggcatcaaatccaatggcctcttttttcaccattgggtgcatatcctgcttattcaggacggcatgcaggaccaccggtttggtgatgcctttaatggtcaaattaccttccacatcatatttattgtcgcctttgctttccactttggtactctggaaagtggcgtcgggaaacgttttaacatcaaaatactctttgcctaaaaactcatccgttaacgccttgacgtgagcgtcaatggttttcactggcagcgtgacgttcaccgaggatttctccggattctctttatcaaaggccagtttccctgaaacatcagagatataggcggtagggtttgagaagccgaaatggttccaggagatcacaaccgaggtatgctgtggatcaagactgtattccttagccgcggcttgcgacacaggaatatataaggcaagtacagaaagcaatgcggtttttttcagggtattcacacaataatcctcaaaatcggcaggtacataaatgttagcccaaaaaaatacagggcttattgaaaacatttgttattccctttcaaattttttaatcaagcagtgatgcccctactatcactctgcgtgaagtttacgcaacgaaattaataggctttaaaaatgatgctcagcaacttaacgctggcagcgtagttaatacccctttatgcctgccaggtaagcctttgtctacaggggtgttatttccacgtgctttcaagcggctacggtcccgaatatagcaagatgggctacgttcgattccgcggcatccgcagtggatgcccaataatattttttttcaggctttcatatctgtcgttaagcaactatctttcagttatttttttctttctattgcattgtagatttatagggctatatcaggatgtgctgacattaaatgcaagcgctaaataacaacgcgatcctccttaacagccttacacaaggtattagtaattcactatcacgcgtggcgtcgatgttttgtcagcattttccattgtcgaaaaaagcgaggcgatggtcgatgatggggtagcaggagaaagtgcgtgctcatcttccaggcttctcaggcggataacagtcaacgctttcgcgaggttaaaaagggcgacacttcaatgtcgtgtaccaaaatgcgcccttcattctgatgacctgggtgtttttgtggttagccagaaaaaggaaagggtattttcaaaaaaccttcttatacggcttaactgagacctggcggtaaaccccggcggcgatatacggatcgtcattagcccaggcctgggccgcttccagcgattcaaactcggcaatcaccgttgagccgctgaatcctgctgcgcccggttcgttactgtcaacggccggcattggcccggcggtaagcagtcggccttcatcgtgtaagagttgtaaacgcgcgagatgcgcggggcgaaccgacagccgcttttccagagaatcggcgatatcttcagcgtagataacgtaaagcacggcaaagctccttatcaataatcaggcgaattacgttaagttaaacagcgatggactgcaatgcaaagatgcgctctggagtggaaagcactgccgacgcagcttttttctgcaaatggcggcaaaaattgactcaggttaagacgccttattgaatatgattgctatttgcatttaaaatcggagcatcatttttcaacagaaacgactatgagcgcaatgacccttgatttacctcgccgctttccgtggccaacgctgctgtccgtggctatccacggtgccgttgtggcggggctgctttatacctcggtacatcaggttattgaacagccttctccgacgcagccgatagagatcacaatggtggcgccggccgatcttgagccgcctccggcggcgcagcctgtcgtggagcccgttgttgaacccgaacctgagccggagccagaggtagcgcctgaaccgccgaaagaggcgtcggtggtgatccataaaccggaacctaagccgaagcccaaacctaaacccaagcctaagccggagaaaaaggttgaacagccgaagcgggaagtgaagccggcagcagagccgcgtccggcctcgccgtttgaaaacaacaatacggcgccggcgcgtacagcgccaagcacctcgacagcagcggctaaacccaccgttactgctccaagcggcccgcgggcgatcagccgcgttcagccgtcctatccgccgcgcgctcaggcgctgcgcattgaagggacggtacgggtgaagtttgacgtttcgcctgatggccgcattgataatctgcagatcctctctgctcagccggcgaatatgttcgaacgcgaggtgaaaagcgcgatgcgcagatggcgttatgagcagggaagaccgggtaccggcgtaacgatgaccatcaaattccgcctgaacggcgtcgagattaactgataaaacgctgcggcggaccggcaaggtccgccgtgaagcttgtttaacgcattttctccatcaatacatcatccagcgcctgctgggccgttaccaggtgctggccgccaaacaaaatcgctctgttcagcagagtataaagctgataaatcggctgacgatcgagaaaacccgacggcagaggcgaaacggactgatagccgtcatagatttgcgggggctgttccggatgcatcggcagcatggctaaatcgcactcgcggtcgccccagtagcaggcgggatcgaatatataggggccatccggccctaaggcgcagttgccggaccacagatccccgtgcagcagcgaaggctgcggctgatggttggccagtcgctgctgtaccatatcgactaaggtatcgatatcgccaaagtgcaatcccttctccgccgcgagctccagctgccagccgatacgctgctcggcaaaaaaaaccgaccagcgacgctgccaggcgttgggctgcggcgtggtggaaagatcgttatcaaaatccagaccgaactgcggctgatcgctccactgatggaggtgggctagctgctggccaagcagaaacgcattgtgcgcatccagcggacggggagggaggtactccatgaccacgaagctatagtcgcgatcgctgccgacggcaaagacctgcggtacgcgaacggttttgcttcgcgacagcagctccagctgatcggactcggcggtgaagataggcagaagttcccgttcgtcgcatttcacgaagtaatctttcccgccgaagcgtaaatgccaggcggaatgaatctctccaccgggcagctcggttttcagttcgatttcagcgtcttcggtatgccaatcgcgtaaaagagtactgattgcttgccacatgctgtctctccccatgttttccaccatatcataaggttagcgcattactaccgggtaaacctggaactgacgcacaactgacgctttccgttgcgctaaacgcacttattgagcttttatccactcggcgaatgtggccacagcgatttccgccgggcggccaagggccgcttccgccaggccagcgctgagggccttaacttcctcggccgtctggccgctcagcaggccgaaggtgttggtacccagctcatggggcgtgccctcttcatcattgagcgtcagtacaaacccggcacgggtaaaatggttgctgacctcattgatctccgtcagcgcctgttcatggaaggtcacgctgacgacccaggcggtaatctcattactcatctctacaccccgttgttatgcatggcctttccagcatagaccatcctgcttatattgtgattcccctccgcctgcgcggagggggcagggaagatcaacgcccgcagagataatcatagattttttgcgtattggcccgcgagcagaggcgggtgccctggttgatggtcgcggcgctaccggcggcgacgccaaagcgtaccatgtcttcaaggctggcgttttccgccagacgcaaggtcatggcgcccaccatgctgtcgccagcgccgacggtgctctggcttttcatcggtggcggcactacctgaacgctgccgctggcgtccacgcctaacgccccctgcggacccagggagaccaccacccggcgcactttaccggactggatcaacgactgagcggcaaggcgcacgtcatcgggttggctgagatcgcgctgcacgagggcgctaagctctttctggttcggtttcaccagctcaatattgccgacgtccagcgcggcggccagcgcatcgccggaactgtcaatgatgcagcgcagtccctgctgttgcgcatttttcaccagttgcatcagattatcgacgctaatacctggcggtaggctgccgctgaccaccagcagagagccgggttcgatagtcagaaccttctcttccagacggcggaattcatcgtccgtcagtgccgcgccgggcataacgaagcgatactgttcgccgctggcggccacgtggacgtgcaggttttgccgcgtccagtcgcgggtttcgacggtctcgaccggcacctgctcatcggccagcagggctgcaagatgctcgccggtagcgccaccgaccgggaaaatggcggtggctttgccgccgagaaaggtcacggcgcgggccacattgatcccgccgccgccaggttcaaataccggcgcgctgcagcgaagtttgccttccgggtagatctgtggggtttgcgtggcgctatccagcgagggggccagcgtgagcgtgtaaattttggtcattccttctcctccttaatacggcgactgtcgttaatttaagcatggcacgatgactcggggagggaaagtccagttcctgacagttttgcaaagatgcctctattttcattatgaaataaagattgtttccggagctgtcttattcaaaaaacgaaagagtaagtgattgctatgttattcgtgcttttttataatttgctacctttcttaggacctgcactccgcgatcctcgcgaaagtttccgggaccctcaggtctcttttatgttgtacggacgctaaattcaatgagccggcgagattatgcctgttcatcatttgtactgtcctaaaaaaatgtattttagagagttataatgaagcttttaaagacagtacccgcagcggttatgctggcgggggggctttttgcgtctgttggcgcaatggccgatgattctgtatttaccgtcatggatgacccttccgctgccaaaaaaccgttcgaaggggtggttaacgcaggctacctggcgcagtccggcaacaccaagagctcttcgatgacggcggattccaccctgacttggtatggtaataccaccgcctggtcgctgtggggcaacgccagcaacacatcgtccaatgatgagcgatcctcagaaaaatatgctgtcggcggacgtagccgctacaacctgaccgatatgaactatgtctttggtcagggtagctggctaactgaccgctacaacggctatcaacagcgcgatgttgtgacggcgggctatggtcgtcagatcctcaacgggccggtgcacagtctgcggtttgaattcggtcctggcgttcgctatgacgaatataccgacggggatactgatacccagccgctgggttatgcttcgggtacctgggcctggcagatgaccgataacgccaaattttcgcaaggggtatcggtgttcggcgccgaggataccacggtcaactcagagagcgcgttaaacgtggcgattaacgcccatttcgccctgaaggtcgcctacaacgtgacctggaactctgagccgcctgcgtccgcgccggagcataccgatcgccggacctcgctctccctcgggtataagatgtaatatttcaggccgggttttccccggcctgttcgttttggttttagcaattagtgatattattttttctggccgttcgttttactttttgtaaaaaggaaatagccctccattttttctccattattcacgggcgcctgacaaatattcattctatttgacacaaatagctaaatattcgacggacaaatatgtgatctggatctatactaacaagcactgaccggagggcgacattgcccggtctgttttccgtaataagagaattaacatcatgaaaaacaatcgatataccatcgcagccctggcgctgtgcgtgctttcttttggcgcatcagccgccacgcccgttccgccatcgggtcatcaggatcatacccaggtaggtatcgccaaagcctctgacgttgaggctggttcgaatattgcgcccggcgcccctaccaccggaaaatccatgaacgacgcctttaatgtgcatacgctggtggccggcgagtggtcttaatattgcaggctatcgtttcgcgagcggtctaataagccgggttaagtggtaccggtttaatggcccgcggtatacattcagcaggcaatatctccacgtctcttttatcatgtccgaataatatcgtccggcgccattggccaatattaccgcgccacatcgcttatattttgcttttttatccgtggccctcttgttttctccgcattccgccatcatttatgctgtcgcggctttaatcacgtaccaatgatgtgtaaactactccccggtgttatcagcaggcggctgcaggggggagcgatcgttccggtcgtgctcctattttcgcagagtgaagcgggaactgcgccttaacctgatgataattatgattatatagttttgtatgtgctctttcgtgcggggcaccactgcaaataaggacataaaatgcctgtaattacgcttcctgatggcagccaacgccattttgaccacgcagttagtccgatggatgtcgcgctggatatcggtccaggcctggcgaaagccaccattgccgggcgggtaaacggtgaactggtagacgcctgtgacccgatcgaatccgattccactctctctatcatcaccgcgaaagatgaagaagggctggagatcattcgtcactcctgcgcgcacctgttaggccatgccatcaaacagctgtggcccaacaccaaaatggctatcggtccggttgtcgataatggtttctactatgacgtagacctcgaccacaccctgacccaggaagatatcgacgcgctcgaaaaacgtatgcatgagctcgccgagaaaaactacgacgttatcaagaagaaagtgagctggcatgaagcgcgtgaaaccttcgtgaaacgcggcgaaagctataaagtttctattcttgatgaaaacattgcccatgatgacaagcctggcctgtatcatcatgaagaatatatcgatatgtgccgcggtccgcacgtaccgaacatgcgcttctgccatcactttaagctgatgaaaaccgccggagcctactggcgcggcgacagcaacaataaaatgttgcagcgtatctacggcaccgcgtgggcagataaaaaagcgctgaatgcctacctgcagcgtctggaagaagccgccaagcgtgaccaccgtaaaatcggtaagcagctcgacctgtatcacatgcaggaagaggcgccggggatggtgttctggcacaatgacggctggaccatcttccgtgaactggaaacgtttgttcgttctaaactgaaagagtaccagtatcaggaagtaaaaggtccgttcatgatggaccgtgtgctgtgggaaaaaaccggccactgggacaactacaaagatgcgatgttcaccacctcttctgagaaccgtgaatactgtatcaagccgatgaactgcccgggtcacgtgcagatcttcaaccaggggctgaaatcctaccgcgacctgccgctgcgtatggcggaattcggtagctgccaccgtaacgaaccgtctggcgcgctgcatggtctgatgcgcgttcgcggctttacccaggatgatgcgcatatcttctgtactgaagatcaggttcgcgatgaagtgaacgcctgtattcgtatggtctacgatatgtatagcacctttggcttcgagaagatcgtcgtcaaactgtcgactcgcccggaaaaacgtatcggtagcgacgagacctgggatcgcgcggaagcggatctggcggtggcgctggaagaaaataacatcccatttgaatatcaactgggtgaaggggcgttctacggcccgaaaattgaatttaccctgtatgactgcctcgatcgtgcatggcagtgcggtaccgtacagctggacttctctctgccgcagcgtttaagcgcctcctatgtgggcgaaaacaacgagcgtcaggtgccggtcatgattcaccgtgcgattctcggttctctggagcgcttcattggcatcctgaccgaagagttcgcaggcttcttcccaacctggattgcaccagtgcaggtagtggtcatgaatattaccgattctcaggctgaatacgttaacgaattgacgcgtaaactacaaaatgcgggcattcgtgtaaaagcagacttgagaaatgagaagattggctttaaaatccgcgagcacactttacgtcgtgtcccgtatatgttggtctgtggcgacaaagaagtcgaagccggcaaagtggccgtgcgcacccgtcgcgggaaagacctcggcagcatggacgtaaatgaagtgatcgagaagctgcaacaagagattcgcagccgcagtcttcaacaactggaggaataaggtattaaaggcggaaaacgagttcaaacggcacgtccgaatcgtattaatggcgagattcgcgcccaggaagttcgcttaacaggtctggaaggtgagcagctgggaattgtgagtctgagagaagctatcgaaaaggctgaagaggctggagtagatttagttgaaatcagccctaacgccgagccgccagtttgtcgtatcatggactacggcaagttcctttatgaaaagagtaagtcttctaaggaacagaagaagaagcagaaagttatccaggttaaggaaattaaattccgccctggtactgatgaaggtgactatcaggtaaaactccgcagcctgattcgctttctcgaagatggcgataaggccaagatcacgctgcgtttccgcggtcgtgagatggcccaccagcagatcggtatggaagtgcttaaccgcgtgaaagacgatctggttgaactggcagtagtcgaatccttcccaacgaagatcgaaggccgccagatgatcatggtgctcgctcctaagaagaaacagtaaggccatcaagaaacatttccggtgggcttcggctcactggttttgttcgcctttgtttcgtttattaacaatgcgaagtggaagttattaaaatgccaaaaattaagaccgtacgcggtgctgctaagcgcttcaaaaaaaccggtaaaggtggttttaagcacaagcacgctaacctgcgtcacattctgactaaaaaagctaccaagcgtaaacgtcacctgcgtccgaaagccatggtttccaaaggcgatctgggcctggttatcgcgtgcctgccgtacgcataagtcgttaacgtttaacttttttaacttagaatagatacaggagagcacacatggctcgcgtaaaacgtggtgtaattgcacgtgcacgtcacaagaaaattttgaaacaagctaaaggctactacggtgcgcgttctcgcgtataccgcgttgccttccaggctgttatcaaagctggtcagtacgcttaccgtgaccgtcgtcaacgtaaacgtcagttccgtcaactgtggattgcacgtatcaacgcagcagcacgtcagaacggtatttcttacagcaaattcatcaatggcctgaaaaaagcctctgttgaaatcgaccgtaagatcctggctgacatcgctgtattcgacaaagtagcgttcaccgctctggtcgaaaaagcgaaagcagctctggcataagccagttgaaagagggagcttgtctccctcttttcgtttcaacaccatcaatacattgacttttatcggcgcaggcttttcaatacagctctgacgtttcttaccagacaaggtaatgcaagcatgaatgctgctattttccgcttctttttttactttagcacctgaactcagggggcttgcgcgtgaaagaagaaacggaaaacagcgccagaaagcctcccctgtggaggcttttttcgtatatggattcggaatattaatttcactataaccggtgtctgcaccgacataatgaggaaaaccatgtcacatctcgcagagctggttgccagtgccaaggcagccattaacgaggcatcagatgttgctgcgctggacaacgtccgcgtggaatacctgggtaaaaaagggcatctgaccctgcaaatgaccaccctgcgtgagctgccgccggaagagcgtccggcagccggtgcggtcatcaacgaggcgaaagagcaggtgcagcaggcgctgaacgcgcgtaaagctgaactggaaggcgcagcgctgaatgcgcgtctggccgcagagaccattgacgtctcgctgccgggtcgccgcattgaaaacggcggcctgcatccggttactcgcaccatcgaccgtattgaaagtttcttcggtgagctcggctttaccgtggcgacgggcccggaaatcgaagacgattaccacaacttcgatgcgctgaatattccgggtcaccatccggcgcgcgctgaccacgacactttctggttcgatgccactcgcctgctgcgtacgcagacctccggcgtgcagatccgcaccatggaaaaccagcagccgcctatccgtattatcgcgccgggccgcgtctatcgtaacgactacgatcagacccacaccccgatgttccatcagatggaaggtctgatcgttgataaaaatatcagcttcaccaacctgaaagggacgctgcacgacttcctgaacaacttctttgaagaagatctgcaggtccgcttccgtccgtcctacttcccgttcaccgaaccgtctgcggaagttgacgtaatgggtaaaaacggcaaatggctggaagtgctgggctgcgggatggtgcacccgaacgtgctgcgtaacgtgggtatcgatccggaagtctactccggcttcgccttcggcatgggcatggagcgtctgaccatgctgcgctatggcgtcaccgatctgcgcgcgttcttcgaaaacgatctgcgtttcctcaaacagtttaaataagggcaggacagaacaatgaaattcagtgaactgtggttacgcgaatgggttaacccggcgatcgacagcgaagcgctttccgatcagatcaccatggcgggcctcgaagtagatggcgttgagccggtcgccggcagcttcaacggcgtcgtagtcggggaagtggtggagtgcggtcagcacccgaacgccgacaaactgcgcgtcaccaaagtcaacgtcggcggcgaacgcctgctggacatcgtctgcggcgcgccaaactgccgtcaggggctaaaggtcgcggtagccaccatcggcgccgtgctgccgggcgattttaaaatcaaggccgcgaagctgcgcggcgagccgtctgaggggatgctgtgctccttctccgagctgggtatttccgacgaccatagcggtatcatcgagctgccggcagatgcgcccatcggcaccgatattcgcgaatacctcaagcttgacgataacaccatcgaaatcagcgtcacgccaaaccgcgccgactgcctgggcatcattggcgtggcgcgcgatgtcgctgtcctgaacaaagcgccgctgaacgcgccggaaatcacgccggttgccgcgacgattgacgacgtgctgccgattcaggttgacgcgccgcaggcttgcccgcgctatctggggcgcgtggtgaaaggtatcaacgtcaaagcgccgacgccgctgtggatgaaagagaagctgcgccgctgcgggatccgctccatcgacgcggtggttgacgtgaccaactatgtgctgcttgagctgggccagccgatgcacgcctttgaccgcgaccgtattgaaggcgggatcgtggtgcgcatggcgaaagaaggggaaaccctggtcctgctcgatggctctgaagcaaagctcgacagcgacacgctggtcattgcagaccataacaaagcgctggcgatgggggggatcttcggcggggaacactccggcgttaacgacgaaacccagaacgtgctgctggaatgcgcgttcttcagcccgctgtccattaccggccgcgcgcgccgtcatggcctgcacaccgatgcctctcaccgctatgagcgcggcgtcgatccggccctgcagtataaagcgctggagcgtgcaacccgtctgctgatcgacctctgcggcggtgaagccggcccggtcattgacgttaccagcaaagagaatctaccaacacgcgccaccattacgctgcgtcgcagcaagctggatcgcctgattggccaccatatcgctgacgcgcaggtcaccgacattctgcagcgcctcggctgcgaagtgacggttggcgagggcgaatggcaggcggttgcgccgagctggcgtttcgacatggagatcgaagaagatctggttgaagaagtggctcgcgtttacggctacaacaacattcctgacgagccggtgcaggcgggtctgatcatgggaacccaccgcgaagcggacctgtcgctgaagcgcgtgaaaacgctgctgaacgacaaaggctatcaggaagtgatcacctacagcttcgtcgacccgaaagtccagcagctgatccacgccggggaagaggcgctgatcctgccaagcccgatctccagcgaaatgtcggcgatgcgcctgtcgctgtggaccggcctgctgggcaccgtggtctacaaccagaaccgtcagcagagccgggtgcgcatctttgagagcggcctgcgctttgtgccggacaccaatgcgccgctgggcattcgtcaggatgtgatgctggccggggcgatctgcggcaaccgctacgaagagcactggacactggcgaaagagacggtcgatttctatgatctgaaaggcgatctggaagccgttctggatttaaccggaaaattagcggatatcgaattccgtgctgaagcgaccaccgcgctgcatccgggacaatccgcagcgatttatcttaaaggtgaacgcattggtttcattggggttgttcatcctgagctggaacgtaaactggatctgaacggtcgcactctggtgttcgaactggagtggaacaagcttgcagaccgcgtggtgcctcaggcgcgcgatatttcccgcttcccggcgaaccgtcgcgacatcgcggtgctggtcgcggaaaacgtggctgccgccgatgttttagccgaatgtaagaaagttggcgtaaatcaggtagttggcgtaaacttatttgacgtgtaccgtggtaagggtgtggcggaagggtataagagccttgcgattagcctgatcctgcaggataccagccgtacactcgaagaagaggagattgccgctaccgttgccagatgtgtagaggcattaaaagagcgattccaggcatcattgagggattgaacctatggcgcttacaaaagctgaaatgtcagaatatctgtttgataagcttgggcttagcaagcgggatgccaaagaactggtcgagttgtttttcgaagagatccgtcgtgctctggaaaacggagaacaggtcaaactctccgggttcggcaacttcgatttgcgggataaaaaccaacgcccgggacgtaacccgaagacgggggaggatattcccattacagcccggcgcgtggtgaccttcagacccggtcagaagctgaaaagccgtgtcgaaaacgcgtcgccgaaagacaaataatctgcactaattaaaaaggccgcattgcggcctttttcttttctgtcaatctttacgctttgacggcggtgagcatgatctccaccaggatttctggtcgcgccatctccgcctgcacggccgctcgcgccgggctatagccttccggcatccattgcacccacacctcattgaatgcggcaaagtcacgctcgatatttttcaaccagatctgcgcggagagaatgtgctgcttatcgctcccggctgcggccagcagcgcgtcgatcttctccagtacttcacgggtttgtaaaacgatatcgtcttcattgctttttggcgtctgcccggagaggaacagcagatcgccatacgcaacgctggcggaaagacgaggttgtggattattgcgaataattgtcatgcggtttgtttccatgtgagaccttctaaagaaatgtctggcatctgattgtcgattaacgcgcccagcaccaccgcgctgccggcggcgagagtaaagccgaggctaccctggccgaggttcatccacaggttggggtagccggcgcgccccagcatcggcgggcctgctggcgttgacgggcgcatgccggtccagacttcggcctcgtccagcccctccagttcaggaaagctgcgggcgacgatgttcttcagcgcctgaatgcggcattcgcgcagttcgtcgccgtcgtagccgatgtccaccatcgccgcgatgcgcagctgttggccaaggcgggcataaacgattttgtgcccgtagtcggtgacgctgatgtcaggggcaatacctgctttttcaggatagggcagggtcaggctgtaccccttcagggagcacagcggcacgcgaacccccagatgcccaagcagagaaccactgccgttaccggcggcgacgacatactcatcgccggtgagggtcccctgactggtctcaaggctgctgatgcgtcccccgcgcttattgagtcgccgcacctcacactgggtcagcaggctaaagtcgctgctggcattgagcttgtcgagcagggcaaggcagaactgatgacaatctgccgtttcatcgcctggcgaatagattccgccctgcagagaaggactaatatgtttgagcgccggctccagctgcaggcaggcttcagcattcagcgcctgctgatactgaggatcaatcccttttgctgctttattaaaatcatattcgcgacgatggataattaattttccgctgcgccgccagtggaaatcggcaagattatcctcatcccgccacgcctgcatgacctgacggctgagcagcgacaggcgtaagatatggtcgccattcattttattggtctggttattacaggcgcgcagaaactgcagcagccagcgccactgctggagagacatcctgagacgcatattcagcggcgaatcggctttgcccatccatttcattccctgcaggggaacgccgctgtcggcaaggggggcgacgtagcggtaacttaattgtccgccgttggcaaaactggtggcgctgcccggttcggcattgcgctccagtaattgcacctgatggccgcgcttgatcagttcccaggccgtggccagaccgaccacgccgccgccgataatgacaatgcgtttgttcataacccgatatatccaccgctgataaatttatcgggttatgtcaaagcatttaccccagcggcgcaattgactttttatggtcagggtataaccgcaggttaatctccttgagctgctggcgcagacgctggcagagaaaatcgacgaacttttgcgccatcgggctcagggaaacgtcggcccggcgtaacagacagaggttaatcgccatcggcggcgtaatgggatggatcatctccggggccaggttgtgctgggcggaaaagatatcagtgatgctgcagcccatgccgcgcttcacgaactcggtggccatatagtaggtctggacgtttagccgggtggtggaaaagtcgcgacgggtggcgatggcggcagagagcgagtgcggtcccggcgagatccagcgctgctggtcgatctggtcgatctccaccgccccctgacgataatgacggtcgatgtacaccagcggtacttcggcaatcagggtggtcaggatctccccctgctgcaccggctgtagcgtcagcgccaaatctatctcgcgcaaatccagttttttgaccagcgtctcggtgtgctcggtagtgagcgtcatcaccaggttgctgttttgctgataaaagtcggtcaccagctccggcaccaggcttaaccccaggcttggcagacagcctaaagtgatcttggcgcgcggatcgcgagccaggttgtcggccagtaggcgcaggttgtccaggtcctgataaatgctctgcgctttttcgaaaagtgtgatcgcctcgctggtcggcagcagcttgccgcgcacccgctgaaacagggtaaaacccagcctcatttcggcgctttttaacgctttgctggccgcgggctgggaaatattgagcgcttccgccgctcgcgataaagagccgcaggtcatgacggcatagaagatttccagatgacgcagtttcatgaacagttaactcagggttatagcctaccgataaaaagtcattttctactaacactaagttaacatagatttaatcaccaatcagcgcattggttacatcttgtgctgtagaccccgcccaatggcggcatattacgctctcagaatcgtttcctttgtacccaaacaaaccctcaggccgcggccaatcaataatgaaaaagagggaggatattttctgagcaggcccccatacaccacctgaccatcatggtcggattgattggcattaaggagtgttatgagtgactcaacgctcacaggcaatgcgcctgtcagacaaaatatcacgcggaaaaacgttattattggtctgttattgctgctgttcgtgttgatcgcgctgtggtgccacggtcgaccaggcagcgagcttggtctgctgggatttacgccgctggtggcgctagcgatattatcgctgatcggcgttgatattgtgctggcggtcatctcctcgattattatcgccatgataatgacctcgaccggcctgccggaaatgggcacgatgctggcgaaatccaccgggtcatttattgccaccgttgggcttatcattatgctcggcgccggcgtgggggaagtggccacccgcaccggcgcagcggttgagctggtaaaatttgtcgtccatcgcatcgggttgtcgagtcagacgcgggtgaaattcggcattgtggcgtcatcgattttaatttgcggttcgctgggcactatggccggtggcaatgccattatcgtggcagtaatcattccggtggcggcagcggtacgcttgacgccgccaacggtcgccgcgctgatgatgaccgccggttccgttgggctgtttaccgggcctttcacccccagtaccgtgacgatcctcagcctcggtgggttgagctacccggattatctgctgtacgttggtctgccgatgagcgcggtcacgctgctggccggctgggtaatggcgggacggatccagaagatgaccgaaggcaaactgcgctatgacgtcgatctcgcggaaaagccgcaagaggatctcagcgccgcgcagcagcgtcggcgtaaattaagcgcgctggccttcgcggcgaccatcatcgtgatggcgatcgttggcgtggtgattaaagccggcttcagcttcgcgataatcgtgatgttgctggtggccctgatgaccggcctggtaggcggcctgcgaccgacgcagatccttcaggccctgtatcacggctgcggccgtctggtgtggatgtttattctctactggctgtacaacccgatccttgagctgatggatggcctgcacgcctatcaggggctgctggagtatacccaaccgctgctggaggggatctccccggcctggctgtgctttagcatcttcgcgttcaatattatcggccatgtgcccggtgcggcggtggcccagatgacctttactcataaaatctttggcccgatgctgatggccgccggcgtgccgccccaggggaccaccgccgtgctgctggcctcatcccaggtggactggttcgggccgtttccctcatcagatatgttcggccagatggggctggcgcagtctactcatctgaaatatatgctctataacggctgggcaatcgtggtggcgaacatcattctctttgcgctgctgtttcagattttggtgtgacgaacgaccgcagacgcggaggagattttccttcgcgtcgacgtttggtcgtgaggttttccttttctcaccgcgacagccaccgtaaaatcagcctcttgttccccctgcgtaatggaatctatgctgactctcgcccatcttcaacagcgccgcagccggcgttggctcttcggattaacgctgttgctgctggtcaccctgctgatcagcctgtgcgcgggggagcaatggatcccgcccggcgagtggctcagcgccaaaggtcagctgtttatctggcagatccgcctgccgcgaaccctggcggtgctgctggtgggggcggcgctggcgctctccggggcgattatgcaggcgttgtttgaaaatcctctggcggagccggggctgctgggggtctccaacggcgcgggcgtcgggctgattgccgccgtcctgctgggcaaaggagtcttgcccggctgggcgctcggcctgtgtgccatctttggcgcgctgctgatcacttttattctgctgcgttttgcccgccgccatctgtctaccagccgtctgctgctggcgggggtggcgctggggatcatctgcagcgccctgatgacctgggcagtctacttctccacctcttttgacctgcgtcagctaatgtactggatgatgggcgggtttggcggcgtcgactggcaacagctgtggctgatgatagccctcctgccggtgctctgctgggtctgtctgcagtcgcaacccctgaatttactggcgctgggcgaagtctccgctcgtcagcttgggctgccgctgtggctgtggcgcaaattactggtggtggcgaccggctggatggtcggcgttagcgtggcgctggcgggggcgattggctttatcggtctggtgatcccgcatattctgcggctatgcggcttgagcgatcaccgggtgttgctcccggcctgtatgctggccggggcaagcgccttgctgggggcggatatcattgcccggctggcgctttccgccgcagagctgccgattggcgtggtgacggcgaccctgggcgcgccggtctttatctggttgctgctgcgttcgcgggggcggggatagcgcggcgccgtcggcagggacggcgccggttcaggcttaccagcctttgatcgcgtcgcctttgtagacttccttcgctttttccgcgacttcgctggtctggaaggcggcttttaattcctgaattttcttgctgtccttattatcctcgcgggcgactatcgcattcacatatggggaatccggcccctccataaacagaccgtcgcgggcggccgacaggcccgcctgggcggagaagttggtgttaatgattgacaggctgacgttcggatcgtcaagggtacgggtcagctgcggggtatccacttcaacaattttcagctgtttcggattgtcgatgatatccagcgtggtgggtaaatagccgacgcccggtttcagcttgagtaacccctgcgcctgaagcagcagcaggctgcggcccagggtggtggtttcattagagatggtcaccgtcgccccttcgggcagttcgctgatatttttgatccgatgtgaataggcggcgatagggaagacaaaggttttaccgaccaccgcaaatttatagccgcgctctttcgactgcgcctcaaggtacggcagggtctggaaggcgttggcatcgacatctttgttgttcagcgcttcgttgggcagcacataatcattgaaggagaccacttcgacgtcgaggtggtatttatccttcgccacctgctccaccactttccagatggcttcgtccggcccggtattgatagcgacttttactttattatcttcatccggggagcaggcgctcagcagggcgacagaggtggcgattaacgccaggctaaacaacttcttcatcactaaaactctcttaaattaacaagtaacgaaaccatattacattcatggaacactgtacacggaaatggtcgacggcccaattgagaggatttcatgttgccggcggccagcgaagcgctgttacatcatgcgacaactcggggggaatggcagtagaatggcgggcgctgaatccgctacagtagaaagggatcaccttcaccggaaaccggtttatccattgaggacaggctatgcaacatgacattctgaataccgaagtgacgaccattgatggcgagaaaactaccctggcatcctttgccggcaaggtgctgctgatcgtcaatgtggcctcgaaatgcggcctgacgccgcagtatgagcaactcgaggatctgcaaaagcagtttgccgccgagggcttcagcgtgctggggttcccctgcaaccagttcctcggccaggagccgggcagtgaagaggagattaagaccttctgcagcactacctacggcgtcaccttcccgctgtttagcaaaattgacgtcaacggcgaacatcgcgcgccgctctatcaaaaactgattgccgccgcgccgaaagcggtggccccggaaggcagcggtttttatgagcggatggccagcaaaggccgggcgccgctgtatgtggacgacattctgtggaacttcgaaaaattcctcatcgatcgccagggcaacgtcattcagcgcttctctccggatatgacgccggacgatccgcagctggtggcggcgattaaaggagcgctggcg

SEQ ID NO: 5363 - DNA, 4050 bp, Unknown
  gut microbiota DNA sequence
ttttatgattttataaatggacacaaattatccaccatccattaaatcaatgattaatataagtatttattcatcccttttacgctagtcccggattcattgatctgcaacagaggattgctcaaagtttggcctttcatctcgtgcaaaaaatgcgtaatatacgccgccttgcagtcacagtatggtcatttcttaactcatgcgcatcggacaccaccagctcagaaatcgcctgatcgcagcgcccatggctggcattactgacagaccattccggacgctgtgctacgagatgggagcgggtttaaccgtttccgagatgatgtcttctaacccacaggtgtgggagagcgacaagtcccgtttacggatggtgcatatcgatgagcccggtattcgtaccgtgcaaatcgccggtagcgtgccggaagagatggctgccgccgcgcggattaacgtggaaagcggcgcccagattattgatatcaatatgggatgcccggcgaaaaaggtgaatcgcaagcttgcaggttcagccctcttgcagtaccccgaccaggtgaagtcgatcctgacggcggtcgttaacgcggtggacgttcctgtgactctcaagattcgcaccggttgggaaccggaacaccgtaactgcgtagagattgcccaactggccgaagagtgtggcattcaggctctgactattcacggacgcacccgcgcctgtttgtttaacggagacgctgagtacgacagtattcgggcagttaagcagaaagtttccattccgattatcgcgaatggcgacattactgacccgcttaaagccagagctgtgctcgactatacaggggctgatgccctgatgataggccgtgcagctcagggaagaccctggatctttcgggaaatccagcattatctggacactggagagctgctgcccccgctgccgctggcagaggtgaagcgcttgctttgtgcgcacgttcgggaattgcatgacttttatggtcaggcaaaagggtaccgaatcgcgcgtaaacacgtctcctggtatcttcaggaacatgctccagatgaccagtttcggcgcacattcaacgccattgaggatgccagcgaacagctggaggcgttggaggcatacttcgaaaattttgcgtaatagaaataaagagctgacagaactatgttcgaacaacgcgtaaattctgacgtactgaccgtttctaccgttaactctcaggatcaggtaactcaaaagcccctgcgtgactcggttaaacaggcactgaagaactattttgctcaactgaacggtcaggatgtgaatgacctgtatgagctggtactggctgaagttgaacagcccctgttggacatggtgatgcaatacacccgtggtaaccagacccgcgctgctctgatgatgggcatcaaccgcggtacgctgcgtaaaaaactgaaaaaatacggcatgaactgatactagtcagttgcttgcttgatataaaaggcgctcttcggcatggggaagcgccttttttattatctgcgccaacagaactcattactaattcaccagccgtagcgcaggccctcccgataaacgcgcagcacagaccaccgccattatattatccaccagcgcaggcgcctgctgataaagatcgaagcgttgcggatcgagcagccagtttttaatcagcccggaaaaagcactgtgtaaaacaattaatatcatctcaatgtttgtttcggctggcaatatattgttacgcacgcagcactgcaggatgccgccaatgagtgaataattaaaaccaatacgttggcgaatttcgtattccgaaagcatatcactggaaaactcacagcgctgataaagaatttgcatcagagcgcgctgtcgaggattcgcagcaatatagcgcaggcctgcaataaaccgctcgcgtaaagcatttagcggctcatgttcgtactctatggcctgactgggctgaatcaaatctctaagcggcggctgctgctgccacatttcattaaacagctccgtcttactggcaaaatgccagtacaccgcgccgcgagtcactcccgccgcatcggcgatatccgtcagggtggtgttggttactccgcgcagggcgaactgctggattgcggactcaatcaggagctgccgcgtgcgctgcgcctcttcttttgtttttcttgccatacaaggccccacttcccgataagcagataatataggatattcttaattagaattaatctagcatttgccatgaagtattatttagcaaaaatgcagacaagttaatcctgatgcgaaaagagaattaattattcaagtgaatatcacctgaaaatacattcactgaaataatgtctatttatcaacttttacaattgcgataaatcgcaatactacagtgaccatttttttgtttttgcgtgccttgctgattgcttaaaaataagtatctcttacatccaacggcgtttatttgtaggatggcaaactgctttttgattccctctttctttcacagattcgccgcctgattgggtacgtaatctataaggaaccgccatgacgactcacgccagagtgacacttttatccggtttaattatctcggccttattgctaaccggttgcgataattctgacaaccagcaaccccatgcgcaggcgccgcaggtgacggtccatgtcgtgaacagcgcgccgctatcagtcaccaccgaactgccgggccgaacctctgcttttcgcgtagcggaagtccgcccccaggtgagcggtatcatcctgaagcgtaactttgttgaaggaagtgatgtcgaagcaggccagtcgctctatcagatcgatccggcgacctaccaggcggcgtggaacagcgccaaaggcgatgaggccaaagccgaagccgcggccgcaatcgcccatttgacggtgaaacgctacgttccactgctgggtactaaatatatcagccagcaggaatacgatcaggcagtggccaccgcccgccaggccgatgccgatgtcatcgccaccaaagctgccgtggaaacggcccgtatcaacctggcctacaccaaagtaacctcccccattagcgggcgcatcggtaaatcgagcgtcaccgaaggggcgctggtcaccaacggccagtcggatgccctggctaccgtccagcagctcgatcccatctatgttgacgtgacggagtccagtaatgacttcatgcgccttaagcaggaaagcctgcagcgcggcggtgataccaaaagcgttgagctggtcatggagaacggccaggcctatccgctcaaaggttcactgcagttttctgacgtcactgttgatgaaagtacgggctcaattactctgcgcgctatcttccctaacccgcagcatgtcctgctgccggggatgttcgtccgcgcccgcatagacgaaggcgtcgatccgcaggctatcctggtaccgcagcaaggggtgacccgcacgccgcgtggtgatgcctctgtgatgctggtgaatgacaaaaaccaggttgaaacccgggaagtggtcgcgactcaggccgttggcgataagtggcttatcaccagtgggctgaagccgggcgataaagtgattgtcagcggcttacagaaagtccgtccaggcgtcactgtcaaagcggaagcggagcgtgcggcgccggccgtgcaataaggatacccagccatgtctaagttttttattcatcgaccggtcttcgcctgggtgctggctatcattatgatgattgccggcggcctggccatcctgcagctgccgatagctcagtacccgacaatcgcccctcctgcggtagcgatctccgccacctaccccggtgcagatgcccagaccgtacaggataccgtcacccaggttatcgagcagaatatgaacggcatcgacaacctgatgtatatgtcgtcgaccagcgactctgccggttcggtaaccattacgctcacctttaaatcgggtac

SEQ ID NO: 5364 - DNA, 5361 bp, Unknown
  gut microbiota DNA sequence
ttggttgcgggggccggatttgaaccgacgaccttcgggttatgagcccgacgagctaccaggctgctccaccccgcgtcaccgtactgctttacttcatcaaattttaattggttgcgggggccggatttgaaccgacgaccttcgggttatgagcccgacgagctaccaggctgctccaccccgcgtccgtggaagcgcactatactccgctagcgagatgatgcaaccttttttcgaccaaatcgacatttttgtaagaattggcttataaaacgccatgttgtggtgtttttttacacaaatctgtgccatcgatgagatcgcgcatttcaatagctccggcgctttgttatcttcaacacgcactaaggcttcgcagcaaaagatgagacaccatgaaaggacgttgggcaaaatatgtagcgacgggggcaatgctggccatgctcgccgcctgttcctcaaaaccgaccgaccgcggtcagcaatatagcgatggcaagttcacccagccgttttcactggtaaaccagccggatgccgtcggggcgccgatcaacgccggcgacttctccgagcaggttaatcaaattcgtaacgcctcgccacgcctctataatagccagagcaacgtctataacgcgctgcaggagtggctgcgcgccggcggcgacacccgtacgctgcgccagtttggcatcgacgcctggcagatgcagggcgtcgacaactatggcaacgtccagtttaccggctactacacgccggtggtgcaggcgcgccacacccgtcagggcgaattccagtaccccatttaccgtatgccgccaaagcgcggtaagctgccgtcccgcgccagcatctatgccggcgcgctgagcgataactatgtgctggcgtatagcaactcgttgatggataacttcatcatggacgtgcagggcagcggctatatcgactttggcgatggttcgccgctcaacttctttagctatgccgggaaaaacggctggccctatcgcagcatcggcaaagtgctaatcgaccgcggggaagtgaagaaagaagatatgtcgatgcaggcgatccgcgagtggggtgagaagcacagcgaagcggaagtgcgtgagctgctggagcagaacccgtcgttcgtgttctttaaaccgcagtctttcgcgccggtgaaaggggccagcgctgtgccgctgatcggccgcgcctcggtggcctccgaccggtcgattattccgccaggaaccaccttgctggccgaggtgcctctgctggataataacggcaagtttaacggccagtacgaactgcgcctgatggtcgccctcgacgtcggcggggccatcaaaggtcagcatttcgacatctatcagggcattgggcctgacgcgggccaccgtgccggctggtataaccactacggccgcgtatgggtgctgaaaaacgccccgggcgcggggaatgtttttagcggctaaccccccccggccgtgcctgttgaccagggcgcccggatgacgccgcttgcggcggcctccgggcgctgtcattttgttctgaggttctatgtctgttgtaatcagcgatgcctggcgccagcgttttggcggtacggcacgtttatatggtgaaaaagcgctgcaatgttttgccgacgcccacgtctgcgtggtcgggatcggcggggtcggctcctgggcggcggaagcgctggcgcggaccggcatcggggcgatcacccttatcgatatggacgatgtctgcgtcaccaacaccaatcgtcagatccacgccctcagcggcaacgtcgggctggcgaaagcggaggtgatggcggagcgtattcgcctgatcaacccggagtgtcgggtgacggtggtggatgatttcgtgaccccggaaaacgtggcggaatatcttggcgtcggctttagctatgttatcgacgccatcgatagcgtccggccgaaagcggcgcttatcgcctggtgtcgccgctacaaggtgccgctggttactaccggcggggcgggtggtcagattgacccaacgcagatccaggtcgcggacctggcgaagaccatccaggatccgctggcggccaaactgcgagagcggctgaaaagccagtttggggtggtgaaaaacagcaaaggtaagctcggtgtagactgcgtcttctctacggaagcgctggtctacccgcaggcggacggcagcgtctgcgcaatgaagagcacggcggaagggccgaagcggatggactgcgcttccggctttggcgcggcgacgatggtgaccgcgaccttcggcttcgtcgcggtgtcgcatgccctgaagaagatgctggcgaaagcgcagcgtgacgctgcggcttccggaaaatagtttccccaccgggcgcggcggcgggaaagcgaaatcgggagattaactttcgcgggcggcggcgagcaccgcctcgctcagggcgctgaggccctggctgcgcgaggcgctgagctggccgcgcagccccagctcgtcgaacagcgccagcggatcctgcgccaggatcccggcgcgggtttttccttccacggcggttaaaagtaccgccagcagaccgcgcacaatccttccttcgctgtcgccaaagaagtgcagcctgccctcggcgtcctcctcatagcccagccagacgcggttctcacagccggcaatctcatgggcctgcgctttgcgctcgtcggtcagcgtcggcagctttttgcccaataaaatcagctgacggtatttatcctcccactggttcagcggggcgaagatctggcgcagcgtagcgtcggtaatggttgtgccgaaggggtgcagagttgtcattaatccaccagaatttccagggcgcgatccaccgcgtggaccagcgccgcaacatcgtcttgggtattgtagggggcgaaagaggcccgcagggtgccgctgacccctaaggccgccagcagcggctgggcgcagtgttgcccggcgcgcagggcaatgccggactccgccagcagcgtcaccagatcgctgtgatgaatatcctcaaattcaaaggccagcaggcttgactgctggcagcggaaagagcggaagcccggccgtttcgccagttcctcttccgccaggctcgccagactgcggctccagttttccgcctggccgatatcgctctgcgccagccactccagcgcggcgctgaggccgataaccccggcgacattcggcgtaccggcctcgaggccatagggggccggctgcggcgtaaagccgtcaaagctgacctcggcgatcattttcccgccgccgagccagggcgacatcgctgccagcagctcgcttttgccgtacagggcgccgatcccggtcgggccatacagcttatggccggaaaaggcgtaaaaatcgatatccagcgcctgcacgtcagcggggaaatgcaccgctccctgggcgccatcgaccatcaccaccatcccggcggcgtgagcaaggcggatagcctgcgccaggtccgggcagccgccggtgacgttggacatctgaccgatggccagcacccggctgcgcggggtaatcagcgcgctgaggctggcgatatccggcaggcggtcggcgccaagcggcagcttgaccactctggcgccggtttgcccggccaccatcagccagggcacgaggttggcatgatgctcggcttcgctaacgataatttcatcgccaggctgcaggcgcggccggacgtagctttgcgccaccatattgatggcctcggtggtcccccgcgtccagacgatatctttgccggaaggggcgttaagccacgccgccacgcgatcgcgggccgcctcgtagcgctcggtcagccgctgggcggcggcgaactggctgcgatggacattgccggcgctcaggcgataaaactggtcgctggcgtcgatcaccgccagcggtttgagcgctgtcgcggcgctgtcgagatagacgccggcatcggccagagccggaaactgcgcgcgaaagtgcgccgggttgaatgcgttcatggaattcctcgtatcaataccgcgatcgtcgcgcaatttgccgggcgtgacaaggtctctgcgtcctgtggaattgtccgaatgtgactccacgtcggtcaaagagggttatgctgaaaagtgttgggtttgtgttttaacctattacttaacgagttacgaatagtataaatagccgtaaggagagaagaatgaaaatgactaaggccgctgcgattatctctgcctgtatgctgactttaggcctgagcgcctgttcctctaactatgtgatgcataccaacgatgggcggaccatcgttaccgacgggaaaccgcaaaccgataatgacactggcatgatctcgtataaagacgcgtggggcaacaaacagcagatcaatcgctctgacgtgaaacaactgggtgaactggacgagtaaggcagtaaaaaggcaaaaaaaagcaccgcgcgttgcggtgctacattaaatcactatggacagacagggtaaatgtacaggaagtgaaaaggggtagctttgctaccagggtctgcaaaaacagaccaattgcaaacacaacaacacaacatcacaaccgtaagccaaaagcttgatggaacacgcattccaaaaaaagcttctcgttccggctcaggaagtgccgccactataggtatttgctggtagaacctcaacggacaatttataatggctcagataaaaaaaactaataggttaatcattgtttcctatttgttaaattgagttaacatctaagccagaataaccatgtcgaagcgattaccacctctgaatgcattacgtgtttttgatgcagccgcacgtcatctcagcttcactcgggcagccgatgagctttttgtgacgcaggccgcagtcagccatcaaatcaagtctctcgaggattttctgggccttaagctgttccgtcggcgcaatcgttcgctgctgttaacggaagaagggcagagctattttcaggatattaaagagattttttcgcaactgacggaagcgacgcgtaaactgcaggcgcgcagcgccaaaggggcattaacggtcagtttattgccaagtttcgccattcagtggctggtgccaagactcacaagctttaactcagcttatccgggaatcgacgtcaggatccaggcggtggaccgtcaggaggataagctggcggacgatgtcgatgtggcgattttttacggccgcggcaactggccgggcctgcgtgtggaaaaattgtacgccgagtatctgctgccggt

SEQ ID NO: 5365 - DNA, 24971 bp, Unknown
  gut microbiota DNA sequence
tacgctttcctctttcagagtcaacccgtttttcaggatttttctctgcaaccgaaccggctgtttgtgtgaagtgattcacatccgccgtgtcgatggaggcgcattatagggagttctcgagcgtccgcaatagaaaaatggcagaaaaatgactgactgctgcattccccagcaaaaccccgctttatacctcgttacacacagaattatccacaggagagcgtaaaaacatgaccgctagccccgtggatcgccagctatatagaaggagattcaccggcctggagagaaacataaaaattcgcgagcgttgcgcaaacgttttcgttacaatgccgcgctatgacacggatgcccggttgggtgcgttaggtgagtttttaggcaaaaactcacctaacgctctctgtaatgttcaaatcctggggatttaataccatgcaacaacgtcgtccagtccgccgcgctctgctcagtgtttctgacaaggccggtatcgtcgaattcgcgcaggcgctttccgctcgtggtgtcgagctgctgtccaccggcggcaccgctcgcctgctggcagataaaggcctgccggttaccgaagtctctgactacaccggtttcccggaaatgatggatggacgcgtgaagaccctgcatccgaaagtacacggcggcatcctcggtcgtcgcggtcaggatgacggtatcatgcagcaacacggtatcgcgcctatcgatatggttgtcgttaacctttacccgttcgcccagaccgtcgctcgtgaaggatgctcgctggaagacgcggtggaaaacatcgatatcggcggcccgaccatggtgcgctccgcggcgaagaaccataaagatgtcgccatcgtagttaagagcagcgactacgacgccatcattaatgagatggacgccaacgaaggttccctcacgctggccacccgcttcgacctcgccattaaagccttcgaacacaccgccgcttacgacagcatgatcgccaactacttcggcagcatggttccggcctatcacggcgaaagcaaagaagccgctggccgcttcccgcgtaccctgaatctgaacttcattaagaagcaggatatgcgctacggcgaaaacagccaccagcaggcggctttctatatagaagagaatgtaaaagaggcctccgtggcgaccgccactcagctgcagggcaaagcgctctcctataacaacattgccgataccgatgcggcgctggagtgcgtgaaagagttcaacgagccggcctgcgttatcgtcaagcatgccaacccgtgcggcgttgccgtcagcgactcgattcttgacgcctacgatcgcgcttacaaaaccgacccgacctccgcgttcggcggcatcattgcctttaaccgcgagctggatgctgaaaccgcgcaggcgatcatctctcgccagttcgtcgaagtgatcatcgcgccgtccgccagcgaagaagcgctgaaaatcaccgccgcgaagcagaacgtccgcgtactgacctgcggccagtgggatactcgcgttgccggcctcgatttcaaacgcgttaacggtggtctgctggttcaggaccgcgatctcggcatggtcaccgcaggtgaactgcgcgtggtcagcaaacgtcagccaaccgagcaggaactgcgcgatgcgctgttctgctggaaagtggcgaaattcgtcaaatccaacgccattgtgtatgccaaagataatatgaccatcggcataggcgccggtcagatgagccgcgtctactcggcgaaaatcgccggaattaaagccggtgatgaaggtctggaagtgaaaggttccgccatggcctctgacgctttcttcccgttccgcgacggcatcgatgccgcagccgcggtaggcatcacctgcgttattcagccgggcggctctatccgtgacgacgaagtgattgccgccgctgacgaacacggcatcgccatgatcttcaccgacatgcgccacttccgccattaattcatggagcagcagatgaaagtattagtaatcggcaacggcgggcgcgagcacgcgctggcctggaaagcggctcagtcgccgctggttgataccgtctacgtcgcgccgggcaacgccggtaccgccctggagccgtcgctgcaaaacgtcgccatcggcgtcaccgatattccggcgctgcttcgcttcgcgcaggatgagaacatcgatctgaccatcgttggcccggaagcgccgttggtcattggcgtggtcgacgcgttccgtgccgccggtctgaacattttcgggccaaccgaaggcgccgcgcagctggaaggctcaaaagccttcaccaaagattttctcgcccgtcatcatattccgacggcggaataccagaacttcaccgaagtggagcctgcgctggcttatctgcgcgagaaaggcgcgccgatcgtcatcaaagccgacggtctggcggcgggtaaaggcgttatcgtggcgatgaccctcgaggaagccgaagcggcggtcaaagatatgttggctggcaacgcctttggcgacgcaggccaccgcatcgtaattgaagagttcctcgatggcgaagaggctagctttattgtgatggtcgacggcgagcacgtcctgccgatggccaccagccaggatcacaagcgcgtcggcaacggcgataccggcccgaacaccggcgggatgggggcgtattccccggcgccggtggttactgatgaagtccaccagcgcaccatggagcggattatctggccaaccgtgaaaggcatggccgctgaaggcaacacctataccggtttcctctacgccggtctgatgatcgacaagcagggcaacccgaaggtgattgagttcaactgccgctttggcgacccggaaacccaaccgatcatgctgcgcatgaagtccgacctggtcgagctgtgcctcgccgcctgcgcgggcaagctggacgggaaaacctccgagtgggatgaccgcgcgtcgctgggcgtggtggttgccgccggcggctatccgggcagctacaatacgggcgatgagatctacggcctgccgcagcaggaagtcgcagacggtaaggtcttccacgccggcaccaaactgtctgacgaccagcgcgtggtcaccaacggcgggcgcgtgctgtgcgtcaccgcgctgggtgactccgtggcgcaggcgcagcagcgcgcctatcagctgctgaccgacattcgctgggacggtagctttagccgtagcgatatcggctggcgcgccatcgaacgtgaaaaggctaacggctaagtttcgccagcagcgttttgcgcgtaatgcctaactgacgggcggcttcggttttgttgccgcccgttttttccagcgccgccagaatcacctctttctccacttccactaacggctgaattcccccctcctcgctcccgactgatggcagcggcgtaccggcgatcgccagcggcagttctcgctcagagatatagtttccggtcagtagcaccaccgcccgctccaccgcgttttccagctcgcgaatattgcccggccaggggtagtggatcagcaggtccatcgcctgtggcgtgaacccctttaccgtcttacgattgcgttcggtatagcgtttgagaaaatgctgcgccagctgcggaatatcttcccgtcgccggcgcagcggcggtatctcgatggtcacgacgttgagtcggtaatagagatcctggcgaaagcgcccggcgctcacctcttccgcaaggttgcgatgggtggcggcgataagccgcacatcaacggcaagcgtctggttgctgccgacccgctgcacctcccgctcctgaatcgcccgcagcaagcggacctgcatcactggcgagatatcgcctatctcatcaagaaacagcgtgccgccatccgcttcgacaaagcgtccttcccgccgccgatccgccccggtaaacgcccctttttcatgaccgaatagctcggattccagcagtgactcattcagcgccgcgcagttgagcgtgaccaacggcttgtcacgacgctcgctgcaggcgtggatggcgtgcgccaccagctccttaccggttcccgactccccataaatcagcaccgtcgcgtccgaaggggccaccagcgtaatatcgttaagaagcgcctgcatcgccgggctgtcgccaatcatgccccaccgtgaatccgtcgcaacgctggggtcgctctcgctctgccgggtgtgcgccaatgcctgaaccagcgtctgctgcagggtgtcaaaatccagcggtttaaccagataatccagcgccccggacttaatagcttctaccgccgtaccgacgctggaaaacgccgtcatgatcagaaccggtatcgccgggttataggccttaatctcttttaacgttgcgataccgtccatctccgccatacggatatcgcacagcaccaggtcgaagacctgctgatggatctgctccagcgcctgcaggccgttgtgagccaaccccacctgatagccccagccgcgcagcagcgcctgcaggatcgtgcagtggctgatgtcatcatcaacgaccagaatctgtactttatcgctgctcatcttccctccgttgagcatccaccggtaaccaaagcgtaaatatcgctccagctcccggctgactttcggcgcggatcgtcccgccatgttgttcgataatattctgcactacggccagccccagcccggtgccgtccgccttggtggtgaaatacggcgtgaagatagcctgtaactcttcatcgctcatccccttaccgctatccgtgacgacgattttcacccgctgacgatcggcttcgcttgctgttacgcgaatgacgccgtcacggccaatcgcctgcattgcattcaggtacagattcaacagcacctgattcaggcgatcggggtcggcgctgatcgtggttaactcaggtcgcggagtaaattgcagcgcgatcccgcggctctgcgcatcctggcttaccaactgcaatgagtggcggataagcgcgttgatatcgactgtctggtagtttagatgggcgggccggaccagctccagcagctcgctgaccacccggttcaggcgatcagcctctttggccatcacctgggctaactgatgcgactcgccgccaggcgacgtgcgctcggcaaaatatttcgccagccctttaatcgacgagagcgggttgcggatctcgtgcgcgacccccgccgccagatggccaagcgccaccagcttttccttgcgggccatcgcctccagcagctgtttccgcgagcgacgatagcggcggaaccagaactgagcgaggatcgtcgccgctatcaccagcgcggcggcacccagcatgatggccatattccgctgcccgcgggcctgcgcggcatccagctcgcggctatcaaaggcgataaaaatcacctgcgggacggtggcctgagccagggcgctattgccgcggttcatcattcccatatggtggccgcgggccggattaagcgggcgaaaatggcgatagatctccagcgccggctgcggttcgctaagccggcgccagcgggcctgttcgccaaccgctaacgcacgcatctgcgccgggctatacagcgttttacccacctgctgcggatcgctatgggcgataattttaccgttttcatcggtcaccgcgaaccacaggacgcccggttgccaggccatctcttccagcagggcctgcagctgcgcatgatgcatacgcatccccatcccgacgcgcgtgccggactccagcgcgcggatcagcacgctccctttctcttcaatggtttgtcgggcagcggtcgtctcgcgaccgtagtcgcggacgatcatcgcggagaacagcatgaccagcagcacaaccgtgccggtcagcagccagctcagcgcgccagcggcggcgtcccgggagagagatttgatcttcatcggcgagtccttgtcatctctttttcactatctgcaggctccttcagcagaaatcatgccatgtttccgcgcggccaatcctgctctcaaacatatcgcctgcgcttaagcgagtaaaaatgactcgcctgaccctggcggaacgggtcatttttactcgctctcctcggcaaaggcttcggcaggcccacacagacgggctttttcagactggcatggaagatgcaataccgagggaaaccacacaggagaaaatgccatgaaacggaaccgtaccttacctctcgccctcgttacctttgccgcgctgaccttcgccagcaacgcggcctgggccaaccaccactggggcaacaataacgggatgggcaaccagggctacagtcagctgacccaggagcagcaggctaccgtgcaaaagctgcataacgattactatgcgcaaaccagcgccctgcgccagcagctgcagtccaaacgctatgagtacaatgcgctgctcacggcgcaaaagccggacagcgggaagattgaagctgtcgctcaggagatggaaggcttacgccagaagctggatcagcagcgggtgaagtttgatatcgccctggctgaggcaggcgttccccgcggcgcaggaatgggatatggcggctgtcgcggtagcgccggcggtcatatgggcatgaaccattggtaaaggttagaagtttttttccgtcggctgccaggtgcagaagttttcattggcgaccagcagcagttgagagccttccggcgcctccagccaggcaatgctcactgcggcggaagcgtggctctggcggcgttcaatgtgcgccagggcccggctatcgaggtcgggcgtaaccgtctgcccttcgcaggtcagcacggtatgcgcggcagcgttccagcgtccctggcgcaggacgacccgcccctggcggagggcgtcgctggtctggcggatctgttcggcgcgatagcgatatagcgcgacctggtcgctggagagctgctgcttctgcccgtccacttcccgttgcataaagctcagatcgccctgcgcgtcgaaacgggcgcgaatatgttccggcggtttgccatagacattgagttcgataagcgccagttgatcgccctgccagcgatattcgctggtcgaggtgtccccgtgacgccacgggctgaaggcggcgagaagatggacttcatcgccagaatctttacgccagatgcgcatcgctccctgattgtccgcatatccgctggcggtaaacggcggtagcgacgtgtcgtggctgcaggcagtcagcaacaggatgcccgccagcgccagaggccggcgccagacagacaaaaggggcttaatagccccttcgataaaactgttcactgccacgcggtcttacttaactgcgtctttcagtgctttgccagaaacaaatgccggcacgttagctgcagcgattttgatctctttaccggtctgcgggttgcggccagtacgctcagcgcggtggttcactttgaaggtaccgaaaccaaccagttgaacagcatcaccttctttcagagactcagtaattgcagccagggtagattccagggcagctttagcctgtgctttggacaggtcagctttgtccgcaattacatcaatcagttgagtcttgttcataagttatccttacaatgtgtttatcgcttgctaagcatcgagtgcgacggaaatgccaaaaaagcaccctcctgcatacacgcaccgatagccactttttttcgccctccaaatgtagaccagacggggggcggaatggaagccttcagacgctacaattcaggcggtaaatcacgttttctggtctcactgctgaaaatttataccaatattgctctcgccagcctcgcgcaggtccgcgcgcaggccttttatcagctcaagatcacgctcttcacagtcggccagcaggcggaaaatttcccactgaatatcccattcctgctctaccgccggattcgctttcaactcttcgtcggtcatttcgcgaccttcctgggtcatttccagcatcgccacggtggtgatggaggtcttgctcacctcgatcgcgtgctcgagcgtttcgccgctcagacgagaatgaatcagttcactcaacgccacgcaagcgtctatggccggatagacaccgtacatgtcgaaatcatctgccgccgggatcgcctcttccagcttctccagctggctgtcgaaattcaccttcgcatctttaaccgtcagcgtttcccagatcaggtccaggatacgacgataaagcaggccgtcgccaaactcggtttgcttgcagaacatcgcgtagttgggatacatacgttcgcacaggcaggccataaaagtgacatgctgccagctttccagcttctccaggcgcaggtgaatcgggttttgtaacatgatgaattctcgaagtcagaaattaggcgcagtgtacctgaatcagctgtgatttgcttgccaacgcacaaacgacggacgacgggacgccaccgcatcggcccagcgcgtcggctcgggcagacggtagcctcgcatgcagcgctcaacccacattaaagcgctgtccatgcctacccggtggccggtgctaataaacagcgggttgcagcgcactttgctgcgccagacccaggccagttgctcatttttatccatcagcggggccagcgcgccaggctcatcacccaggtcgccgattttgccgcacaggcgttttttcgccactccgatagtcggcacatcaatcatcaggccaaaatggctggcgacgcccaatctccggggatgagaaatgccgtgtccgtcaacgaagagcaggtccggtttttgcgaaagctgctcccacgccgccagcagcgcaggcgtttcgcgaaacgagagaaagccgggaatatagggcatagaggtggcgacccgcgccacctgatactccaccagctcaagctcaggccaggtcagcagcaccatcgcagcccgggtgatctccccttcctgctcaaacccgacgtccgcgccgccgatcaacgccggcgggtcgcgatccagtcgatccgcacgctctaccgacgcggctaactgttgctgttgggtacgtagtgcggctaaatccatagggcttatctcctactggtgatagggtgcggacagacggtgcacagcctcaacaaagacgcccgcatgctcggggtcaacgtcctgatgaataccgtgtccaaggttaaagacgtggccttccccctgaccaaagccggcaagaatggtcgccacttcttcttcaatacgcggggcggacgcatagagcatcgacggatccatattgccctgcagcgctactttgttacccacgcgacggcgggcatcggcaatatcggtggtccagtcgagacccaacgcatcgcagccggtctccgccatcgcttccagccactgaccaccgcctttggtgaacagagtcaccggcacgcgacggccttcgttttcccgcagcaggccatcgacgatcttatgcatgtagtagagggagaactgctgatagtcgcgaccggtcagcaccccgccccaggtgtcaaaaatcatcaccgactgcgcgccggctttgatctgcgcgttgagatacagggtaacgctcttcgccagcttatccagcagcgcatgcagcgcctgcggctcggcgtacatcatctttttaatcacggtgaaggccttgctgctgccgccctccaccatgtacgtagccagcgtccatggactaccggaaaaaccgatcagcggcacttcgcctttcagttcgcggcgaatggtgcgcacggcgttcattacatagcccagctcctgctccggatccgggagcggcagcttgtcgacgtcggctttactttttaccggcgaggtgaagcgcggaccttcgccagcttcaaagtacagccccagccccatggcgtccgggatggtcaggatgtccgaaaagaggatcgccgcgtccagcgggtaacggcgcagcggctggagcgtcacttcgcaggccagctcggcatttttacacagcgacataaagtcgcccgcttgcgcacgggtggctttgtactccggtaaatagcggcccgcctggcgcatcatccacaccggggtgacatcaaccggctgacgcagcagcgcgcgcaggtaacgatcgttcttcagttcggtcatttttacattcctttagcgttgatacgcccagtgtaacatgtcactcgaactctgcccgacacatcgcgacggtatcttcgattagccgccgcgccactgtccccggcggcggcagaagcggcaggtcgtcatagcgataccagtccgcggtcagtaactcttttttgtcgaccacgatctcgccatctgcgtaatccgccataaaggcggtcatcagcgactgcgggaacggccatggctgagaggtcacgtaacgcagattttttacccgaataccgctctcctccatcacctcgcgagccaccgcctgctcaagggtttcgccgacctcgacaaagccggccagcacggtgtgcacgccgttgcgatggcgcgtatgttgcgccagcaggatcgcatcgtcgcgacggattgccacgataatgcagggggcaatttgcgggtagtaacgttcgcggcagtggctgcacagcatcgcccattcgcttttgctggcatgcatcgggtggccgcagtaaccgcaaaatttatgcgagcgataaaattcggcgagctggatcccccgcccagccagctggaagagtcccggatcctgatccagcacctggcgcaacgatcccatgtcatggcgacgatcctggcgcaccatccacacggactcgccctgccactcgccaatatgcagcgcatgctggccgacaagatcgaaattaaccgcttcgccatgtggtaattctccaccaggcaaccataatttttgttcgtgactgacaacccaccagccgcgatctaatttttcaataatacgatccatatctattgcactacctttgcttcactggcatgttgttaacattatatttacattttggtgagcagatttaaatcaaaactagcggagtcaatcatgctaaaccagctggaaaatctgacggagcgcgttggcggtagtaatgaactggtcgatcgctggctacaagtgcgtaagcatctgctcgtggcttactacaacctggttggcctgaaaccgggcaaagagtcgtttatgcggctaaacgaaaaggcgctggatgacttttgccaaagtctggtggattacctctcatccggtcattttagtatttatgaacgcattattggcgaaatggaaggcgatacccctcttttagccgccacccggctttacccgcagctggaagccaatacccagcagatgatggactactacgatacctgcctcgaaaacgccatcgatcacgataactatcttgaatttcagcaggcgctgtcggatatcggcgagtcgctggaggcgcgtttcgcgctggaagataaactgatcgccctggctgtcgcccataacctgagcaatgacgtgcgcgataatattgcgccgaccgcttgagttgtgaaccgttaacgcgtaatttacgtacattatccctctgcggagggatttcatcttgtcggagtgcctattttccatgcgcaggctaacgtggaaaaggctgagaccgttaattcgggatccgcggaacctgatcaggctaatacctgcgaagggaacaagagtaaactgctgttcgcgtcagtccgtcagggccgatcgcatctgttactccatccgtcgtctgacaagccatgtccttttttaactggaatgcgctatgtctactaccaaactaacccgtcgggaacaacgcgagcacgcgcagcgattcattgatacgctggcgggtaccgcttttcctaattcacgccgcatctatgttcacggctcacaagcggatatccgcgtcccgatgcgtgaaattcagctcagcccaactctcgtcggcggcgataaagataacccccggtacgaaaccaacgaaccgatcccggtgtatgacacctccgggccgtatggcgacccggatattagcattgatgtccgccaggggctggcaaagctgcgccagccgtggatcgacgcgcgtaacgactgcgcgccgctcagcgaacgcagctcggcctataccaaagcgcggctggccgacgacggtctcgatgagctgcgcttcagcggcctgctgacgcccaaacgcgccgtcgctggcaaatgcgttacccagctgcactacgcccgccaggggatagtcaccccggagatggagttcatcgccattcgcgaaaacatgggtcgcgaacgtatccgcagcgaggttctgcgccagcagcacgcaggtgaaggcttcggcgcccaccttccggaaaacatcacccccgagtttgttcgcgatgaagtggccgccggacgcgccatcatccccgccaacatcaaccacccggagtctgaaccgatgattatcggccgcaacttcctggtgaaagtgaatgccaatatcggcaactcggcggtgacctcttccatcgaagaagaggtcgagaaactggtctggtcaacccgctggggcgccgacacggtgatggacctctccaccggccgctatatccacgaaacccgcgagtggatcctgcgcaacagcccggtgccgattggtaccgtgcctatttaccaggcgctggagaaggtcaacggcatcgccgagaatctcacctggcaagtcttccgcgataccctgctggaacaggccgagcaaggcgtcgactacttcacgattcacgccggcgtactgttgcgctacgtcccgatgacggcgaagcgcctgaccggtatcgtctcgcgcggcggctcaatcatggctaagtggtgcctgtcgcatcatcaggaaaacttcctctaccagcatttccgcgaaatctgcgaaatctgcgccgcctatgacgtgtcgctgtcgctgggcgatggcctgcgccccggctccattcaggatgccaacgacgaggcgcagttttccgagctgcgcaccctcggcgaactgacgaaaatcgcctgggaatatgacgtgcaggtgatgattgaaggccctggccacgtgccgatgcagatgatccgccgcaatatgaccgaacagctggagcactgccacgaagcgccattctacaccctggggccgctcaccactgatatcgcgccgggctacgaccatttcacctccggtatcggcgcggcaatgatcggctggttcggctgcgccatgctgtgctatgtcacgccgaaagagcatctcggcctgcccaacaaagaggatgtcaaacaggggctgattacctacaaaatcgccgcccacgccgccgacctcgcgaaaggccaccccggggcgcagatccgcgacaacgcgatgtcaaaagcgcgttttgaattccgctgggaagaccagttcaacctcgcgctcgacccgttcaccgcgcgggcctatcacgatgaaaccctgccgcaggagtccggcaaagtcgcccacttctgctccatgtgcgggccgaaattctgttcgatgaaaatcactcaggaggtccgcgactacgccgcgaagcaaagtatcgaagccggcatggccgatatgtcgaataacttccgcgcccgcggcggcgaaatctacctgaaacaggaggaagcctgatgtatcaacctgattttccacccgtcccgtttcgtctcggactctacccggtggtggacagcgtggcgtggattgagcgcctgctcgaagctggggtacgtacccttcagttacgcatcaaagaccggcgcgacagcgaagttgaggatgacgtgatcgccgccatcgcccttggtcgccgctatcacgcccgactgttcattaacgattactggcaactggcgattaagcaccaggcctatggcgtgcatctcggacaagaagatctggaaaccaccgatctgagcgctatccgccaggccgggctgcgtcttggcgtctctactcacgatgatatggaaattgatgtcgcccttgcggcgcgcccctcttacatcgcgctaggtcacgtcttcccgacgcaaaccaaacagatgccttccgcgccgcagggcctcgagcagcttgccagacatattcaacgcctggcggattaccccaccgtggcgatcggcggaattagcctggaaaaggcgccgggggtactggcgaccggcgtcggcagcatcgcagtggtcagcgccatcacccaggcggcggactggcgggcagcgaccgaccaactgctggcgctggcgggagtgggcgatgaatgatcacgactttatgcgctatagccgccagctgctgctggaggatattgccatcgaagggcagcagaagctgttagccagtcgagtgctgattatcggccttggcgggctgggctccccggcggcgctctatctggccggggctggcgtcgggacgttgaccctggccgatgacgacgcggtgcatctcagcaacctgcaacggcagatcttgttcaccagcgcggatatcgatcggccaaaagccgcagcggcacagacccggctcagccagctaaacccgcagatcaaactggtagcgctccagcagcgcttaagcggcgaggcgctccgcgccgaagtggcgaaagcggacgtggtgctggactgtaccgataatatggtcacccgccaggcgatcaatgccgcctgtgtggccctcgataccccgttagtgaccgccagcgccgtgggcttcggcggtcagctgatggtgctcaccccgccctggacgcagggctgctatcgctgcctgtggtcggaaagcgatgaaccgcagcgcaactgccgcaccgcggggatcgtcggcccggtggtcggcatgatgggcaccctgcaggcgctggagacaattaagctgctcagcggcatggcgacgccgcgcaacaccctgcggctgttcgacgcccgcaccagcaactggcgcgcccttgcgctacagcgttcccggagctgcccggtgtgcggagggcggcatgcagatctggtttaacgacgagccgctggcgtgcgccgacaatctcagcgtcagcgccctgctgacccagctcgaacagcagcagcctggcgttgcgctggcgctcaatcaacacatcctgccgcgcgaccggtgggaagatcatctcttgcaggaaggcgatcgggtcctgctttttcaggttatcgctggaggctgacatgttacgtattgcagacaaaacgtttgaatcccatcttttcaccggtaccggcaaattcgccgccccggaggtgatggtcgaggcgattcgcgcctcgggcagccagctggtaaccctggcgatgaagcgcgtcgatttacgccagcgcaatgacgccatcctcgccccgctgctggcggcgggggttaacctgctgccgaatacctcaggcgccaagacggcggaagaggcggtgtttgccgcccgcctggcgcgggaagccctgggtacccattggctgaagctggagatccacccggacgcccgctggctgctgcccgacccgattgaaaccctgaaagcggcggagctgctggtccgcgaagggttcgtggtgctgccctactgcggcgccgatccggtgctgtgtaaacgactggaagaggtaggctgcgcggcggtgatgccgctgggtgcgccgatcggctccaatcaggggctggaaaccaaagccatgctggagattattatcgagcaggcgacggtcccggtggtggttgacgccgggatcggcgtcccgagccatgcggcgcaggcgctggagatgggcgcggacgcggtgctggtcaataccgccattgccgtcgccgacgaccccgtggccatggcccgcgccttccgtatggcgatcgatgccggattactggcgcgtcaggccggaccgggggcacgcagtacgcaggcgcaggccaccagcccgctcaccggattcctggaggcgctggcatgaaaacctttagcgatcgctggcggcagctggagtgggacgatatccgcctgcgcatcaacagcaaaaccgccgccgacgtcgaacgggcgctggcggccaaacagctcacccgcgatgatatgatggccctgctctcgcctgccgcggccaattaccttgaaccgctggcccagtgcgcgcagcgcctcacccggcagcgcttcggcaataccgtcagcttctacgtgccgctgtatctctccaacctgtgcgctaacgactgcacctactgcggcttctcgatgagcaaccgcattaagcgcaagacgctggatgccgccgagattgcccgcgagtgcgccgcaatccgcaacctgggctttgagcatctgctgctggtgaccggcgaacatcagggtaaggtgggaatggattatttccgtcagcacctaccggctatccgcagccagtttgcctcgctgcatatggaagtgcagccgctggcgactgaagagtatgccgagctgaaaaccctggggctcgacggggtgatggtctatcaggagacctatcatgaaagcatgtacgcccaacaccatctgaaaggaaaaaagcaggatttcttctggcggctggatacgccggatcgcttaggcgcggcggggatcgataagatcggccttggcgcgctcatcggcctttccgacagctggcgagtggactgctttatagtcgctgagcacctgctgtggctgcagcagcgctactggcgcagccgctattcggtctccttcccgcgcctgcgtccctgcgccggcggtattgaaccggcttcgctgatggatgagcgacagctggtgcaaactatctgcgccttccgcctgctggcgccagaggttgagctgtcgctatccactcgcgaatcaccctggttccgcgaccgggtgatcccgctggcgatcaataacgtcagcgccttctctaaaacccagcccggcggctacgccgacgaccatccggagctcgagcaatttgccccgcacgacgatcgccgccctgaagaggtcgccagcgcgctggccgcccgcggcctgcagccggtatggaaagactgggatagctggctgggacgcgcttcgcaaacctcatgatgtacagtgtaaacgccttataattttgcgcgcctgcacgagagatgaaaaacggaggctggcccgcccgacgccgtttttctattctgcccgggtcagcagcggacgctgaccagggcgaaccttttcttcctcattttcgccctgcctctccgcgctgagcagaggcctgcacattatcgccgaatataaatcacgatacatgaaggcctcagagttataattgagcaatagtgaactgattcgatcggcaggcgtcccagacgcaacctgcgttcggacccatggtttatacatccgggacgattaacgattcatggctctacacaacagaaagctctcttttacgacgccgatcgtcgtggggtttgccggtattttgctcagctttatgctgatcgctatttttgtgactctggcgcaacagaaagattttctcgaagattatcacgatattaaccgcaattttacccataacctggcgatcaactatacggaaaccctgctgcgggaaaatgattttatcctcgggcgcgcagccgccttctttgcccggaatgacgaactgaatcgcgcagtcaatgtggagccggagaaagggttaaccacgctgatgcagttacagaacatgatgccaagcgtctcatccatctcgctggcggataccgagggccactatctgcgcgccccggaggtgctggaaaacgaagacagccgggctttcgatcccagaacgcggccctggtttatcaaacaggcggaagccagcaccttcagccactacaccagtccgtatatggattatttcacccaccatccgacgattaccattttcaaacccatcattaccccggaagggaaactcaagggcagcctggcctttcatctcgatctcacctccatggggttcgcgctgcgccagatggtggcgcccgtacagggggaattttttgtggtgcaacgggatggcaaagtggtcctgcactccgacccgggcgcgctgtttaaacccttcgtcagggacgagctgatggataaaatgaccagcggagaggggcagctttacgatcccgggagcgacacctggtattactattactcctttaccaatcccgactggtttgtgattttccgtgtcgataacgccaccctggtcaatctgacacgtcatgagaccaatttagtgatcggcggtttcactctcgcagcgatcattattatcctgttcggtctttatctgcgtcatgcttcccgtaccgtgctgatgaatatcatcaatgcgattaaaaccggtgacgtcaaacgcgccccgcgccttgaggcgatgctgagtaaagcgattgaaaccaataaacagcgcgaactgtcctacgtccgccaggcgaccatcgacgctctcaccggctgcaaaaaccgccgcgccttcgacagcgatattgccgccctgatgaacgatcaccagccattcgccctcgcgctggtcgatatcgataactttaaatcgatcaacgacacctggggccatctcaatggcgatatcgtcctgcgtaacgtcgctcgcgaagggctacaggtcctccagccgctggagatatccctctatcgctacggcggcgaagagttcgcggtggtctttcctgccgaacatatcgataacgcccgcacgctgctggaaacatggcgggtaaacgtcgaacgacgcacctggcgcgaagatggcctgacggtcaccttcagcgccggcctcggggaatggaatatggagccactggataagctggtggtgagcgtcgatgaagcgctgtacaaagccaaacagcagggtaaaaaccgtatcctgcgcgcgtaagacttcagcgccgccaccgcccacttcggtgggcttttttattttttccgaaaaaaatgaaaccggtttcaattattgtgtgatgccttacacacaatcacggtaaagcggttgtcgcatcgacagggccgcgataaagataagacatcacggaacacaagggccactgactatgaagaatatcgttttgtgctgtgccgccggtatgtctaccagcatgctggttcagcgtatgcaagatgccgcgcagaagaagggtgttgaggtctctatcaaggccgtaccggtcgctgagtttaaagataatctggccgccgccgacattattttgctcggcccgcaggtgaaatatgagcaggcgaagctgcaggcgctggccgacccgttcggcaagaaggtcgccgtgatcgatatgatggactacggcatgatgaaaggtgatgccgttctggataaagcccttaagatgctggagtaatcgatggaagatttagaaacgatcatcatggagctgctggttaacgcgggttccgcacgtagcgcggcgctgacggcgctacagctggcgcgcaaaggcgattttgtcgccgcggagcaggccatggctgaatcccatgagttcgtcaaacatgcgcataaaattcagacccagcttatcggcatggatgaaggcagcggtaaattgccggtcaacctgatcaccgtgcattcccaggaccatctgatgaacgctatggtcattcaggatctggcgaccgacatgattgaactctatcgtcgtctgcccctcgcgcaataatctcacggatttaacgggcgtcgctgccggcgcccgtccttcttacagaaagccgtacatcgccgcgaatatccagccaaacacgcaggagacgccgacgccgatgagcccgggcaggataaagctgtggttaatcacaaagcggccgatatgagtggtccctgagcgatcaaactggatcgccgccagatcgcttgggtaggtcggcagaatatagtagccatagcaggccggcgcagaagccacgatataagccgggtcgacgccgatggccagggctactggcacaatcgccgccagcgctgccgcctgggagttcacaaatttcgaaaccagtagcagcacgatggcataagcccacggatactcttttaccatttcaccaagcacgcctttaatctcggtcatgtgcgcgccaaacatggtctccgccatccacgcgatgccgtacaccgcgacgatagcgatcattcccgaacgaaagacctcatttttggaaatcgatgccgggttagtttttgtaatgatgatgatcagcgctccggagagcagcataaacatctggataaccagcaccatcgacagtggtttaccgtcaaaggccgggcgcagttcagaaaaagcgccaagcagcgccaccacggcgatagaggccagaaaaatccacattgctatccagttgctggtcggcagctttttgtccagcagggtcgccgtatcgccatagacgtaatggcggttctccggtagcgcaataaacgcctggaaggcttcgtcctgatccaggtctttgccgcggaaccagctgaagataccgatggctaaaatacccagcagcgtggacggaatggttatcgccagcagatcgagaaactccaggtgtttcccgttaaaggtaaaatttcccagcatcgccaccagcgataccaccgccaccgagaccgggctggcgatgatccccatctgagcgccaatggagctggcggccatcggacgctccggacgaatgttattcttaatcgccacatcgtagataatcggcaggatggtatacaccacgtggccggtaccgcagaggatggtcagcgtgcaggtgacgaaaggcgccacgatagaaacatatttcgggttacgccgcagcagcttctcggcaatctgcagcatcacgtctaacccgccggacgcctgcagggtcgccgaggcggctaccactgcaatgatcaccagcatcacatcaaccggcggtttgcccggctggagatgaaaaacaaagacgaggatcaccaaaccgatgccgcccagcagccccagcgcaatacccccttttcgggcaccataaaacagacaaattaatataataatgagttgtatcgcgaattccatgcagcccccagagcctgtccactcagatctaaaaatgatccctacctgcctgtcgggattatttctgcgcctgaccgggagaagcatgagatgcggcgatccctctccagcgccgtcgcgccgaagatacagcaacagaagtaatcccatgattcatcaggtattttgaatatataccctttgaattgattattttttgatatgagtagaagttttacccatacataaagaaaggttttagaaaaaggcttctaatagatattttgcatgaattaattgctaagaaaatgaagatttaatatgtcgtaaatgtaattaagggccgggaaagcggcggaaaatagacaataaaaaaagccggtcaggaaacctgaccggctttttagcagtgcatcaacgattaatcgttgtcagaaccgcccagacctgcgttcagcagctctgccaggttggcagacgcttcttccacgctcacctgcggtgccgccggcagctcgccagcagcgcgacggcgcatacgatcctggtgatacgcataaccggtaccggccgggatcagacgacccacgatgacgttctctttcagaccgcgcagttcgtcgcgtttgcccgcaacggctgcttcggtcagcacgcgagtggtctcctggaacgatgccgcggagatgaaggactcggtggccagagacgctttggtgatacccagcagatcgcgggagaacgttgcgcccactttgccgttcgcttccagttcgcggttcgcgatcttgacgcgggagtattccacctgctcgccttcgaggaagtcggagctgcctgcgctttcgatggtggctttacgcagcatctgacgaacgataacttcgatgtgcttatcgttaatcttaacgccctgcagacggtatacgtcctggacttcgttaacaatgtaacgggtcacagcatgtacgccacgcagacgcagaatgtcgtgcggtgcttccggaccgtcggaaaccacatcaccacgttccacacgttcaccttcgaacacgttgagctgacgccatttcgggatcatctcttcgtacggctcgctaccgtctaccggggtgataaccaggcgacgtttccctttggtttctttaccgaaggaaatgataccgctgatttcagccaggatagccggctctttcggacgacgtgcttcgaacaggtccgcaacgcgcggcagaccaccggtgatatccttggtaccgccggattcctgcggaatacgcgccagggtgtcacccgagctgatctgtacgccatcttccagctgaacaatcgctttacccggcaggaagtactgagcaggcatatcagtgcctgggatcagaacgtcgttgccctgagcatcaacaattttcagtgctggacgcagatctttaccacctgcggtacgttctgcagagtccagaaccaccagcgaagacagaccggtcagctcgtcagtctgacgagtaatggtctggccgtcgatcatgtcagtgaaacggatgaaaccgctaacttcggtgataaccggcatggtgtgcggatcccagtttgcgacggtttcaccgccggcaacctgctcaccgtcgcctttcgccataaccgcaccgtaaggtactttatagctctctttggtacgaccgaattcgtcgatcagcttcagctcggtattacgggaagtgataaccagcttaccactggagttcacaaccgacttcgcgttgctgagcttgatgctacctttgtttttcacctggatgctggattcagcagccgcacgagatgccgcaccaccgatgtggaacgtacgcatcgtcagctgtgtacccggctcaccgatggactgtgccgcgataacgccgatagcctcacctttgttgatgaggtggccacgcgccaggtcacgaccatagcagtgcgcgcagacgccaaagtcggtgtcacaggatacaacggaacgcactttgacggagtcaacggagttcgcttccagcaggtcacaccagtgctcatgcaacagcgtgttgcgtggaaccagaatatccgcggtacccggcttcagaacatcttccgcagtcacacgacccagtacgcgatcgcgcagcggctctttaacgtcgccaccttcgataaccggcgtcatggtgatgccttccagggtgccgcagtcgtcttcagtgacgaccaggtcctgcgcaacgtcaaccagacgacgagtcaggtaaccggagttcgctgttttcagtgcggtatccgccagacctttacgagcaccgtgggtggagatgaagtactggagtacgttcagaccttcacggaagttcgcggtgatcggcgtttcgatgatggagccatccggcttcgccatcagaccacgcataccagccagctgacgaatctgtgccgcagaaccacgcgcaccggagtcggccatcatgtagatgctgttgaaggaaacctgctgctcttcctgaccgtcacggttaatcacggtttcggtttgcaggttatccatcatcgctttggatacacgatcgttcgccgcagcccagatatcgataactttgttgtagcgttcgcccgcggtcaccagaccggactggaactgttcctgaatctcagcaacttccgcttccgcttcgctgatgatttcgtattttttctccgggatgaccatgtcatcgataccaacggatgcacctgaacgcgctgcgtaagcaaagccggtgtacatcgtctggtccgcaaaaataacggtcggtttcagacccagaatacggtaacaggtgttcagcatcttggagatcgctttcttaccaagcgcctggttcacgatagagaacggcagacctttcggtacgatcatccacagaatggcacggccaacggtcgtgtctttcaggctggttttcgcgacaaactcaccattgtcgtctttttcgtattcagtgatacgcactttaacgcgcgcatgcagagaggccaggccggcgcgataaatacgctcagcttctttcgggccagtcagcaccatgccttcgcctttggcgttaacactgtcacgggtcatgtagtacagacccagtacaacgtcctgagacggaacgatgattggttcgccgttcgccggggacaggatgttgttggtagacatcatcagcgcacgcgcttccagctgggcttccagcgtcagcggtacgtgaacagccatctggtcaccatcgaagtcggcgttgtatgccgcacaaaccagcgggtgcagctggatggctttaccttcgatcagaaccggttcgaatgcctgaatacccagacggtgcagggttggcgcacggttcagcaggaccgggtgttcgcggataacttcgtccaggatatcccaaacgacagcttcttcgcgctcaaccatcttcttagcggctttgatggtggtggccaggccacgcagttccagcttgccgtagatgaacggtttgaacagctccagcgccattttcttcggcagaccgcactgatgcagacgcaggtatggacctacggtgattacagaacgaccggagtagtcaacacgcttaccgagcaggttctgacggaaac

SEQ ID NO: 5366 - DNA, 2425 bp, Unknown
  gut microbiota DNA sequence
tatggtttcagttaataacaataaccgggagtacccggaatacggcaaacacaagaggatatatgactgagaaaaaagcggagctccagcgtggactggaggcccggcatattgaactgatcgcccttggcgggacgattggcgtggggttgtttatgggggcggccagtaccttgaaatgggctgggccttccgtgctgctggcgtacattatcgctggcctgttcgtctttttcattatgcgctcaatgggcgaaatgctgttccttgagcctgtcacaggctccttcgcggtgtatgcgcatcgctatatgagccccttcttcggctatctgaccgcgtggtcctactggtttatgtggatggcggtggggatctcggagattaccgccatcggggtctatgtgcagttctggttcccggagatggcgcagtggatcccggcgttgattgccgtggggctggtggcgttggctaacctcgcggcggtccggctatacggtgaaatcgagttctggttcgccatgataaaagtgaccaccattatcgtgatgatcgtcgtgggtctgggcgtcattttcttcggctttggcaacggcggccactccatcggttttggtaatctcaccgaacatggtggtttctttgccggcggctggaagggcttcctgacggcgctgtgtatcgtggtcgcgtcctatcagggggtggagctcatcggcattaccgcaggtgaagcgaaaaacccgcaggtgacgctgcgcagcgcggtgggcaaagtgctgtggcggatcctgattttctacgtcggcgcgatttttgttatcgtcactatcttcccgtgggatcaaatcggctccaacggcagcccgttcgtactgacgtttgccaagatcggtattaccgcggcggcgggaattatcaacttcgtggtgctgacggcagcgctttccggctgcaacagcggaatgtacagctgcggacgtatgctgtacgccctggcgaagaaccgtcagctgccggcggcgatcggtaaggtatcgcgcaacggcgttccgtccgtcggtgtggcgctgtcgattctgatcctgctggtgggctcctgcctgaattacattattcctaatccgcagcgggtgttcgtctatgtctatagcgccagcgtcctgccggggatggtgccctggtttgtgatcctgattagtcagctgcgtttccgtcgcgtgcatcaggcggcgattgccagccatccgttccgttcgctgctgtttccgtgggccaactatttcacgatggccttcctgatctgcgtgctggtcgggatgggactgaatgatgaaacccgcatgtcgctcttcgtcggcattatttttctggccgccgtcaccctgatttataaggtgtttggcctcggaagacaggggcaagtcaataatacggctgaataaccgtcaaaacgaacaaagcatgagcaaacgataattttctttaaaaaggcactagacagcggggtaggaagtccgtattatccgaccccgcaacggcgctaagcgcccgtagctcagctggatagagcgctgccctccggaggcagaggtctcaggttcgaatcctgtcgggcgcaccattaacccggtgctggagctgcggtggttttaataccgcgtaaaaggtttgcagtggtggctatagctcagttggtagagccctggattgtgattccagttgtcgtgggttcgaatcccattagccaccccattatttgatagagttgtgaatttgcgaaggtggcggaattggtagacgcgctagcttcaggtgttagtgttcttacggacgtgggggttcaagtcccccccctcgcaccacgactttaacgaattgaactaaaaattcaaaaagcagtatttcggcgagtagcgcagcttggtagcgcaactggtttgggaccagtgggtcggaggttcgaatcctctctcgccgaccaattttgaaccccgcttcggcggggttttttgttttctgctgccgtccgccatctcttatttctctgatcttgctgataaaaaatcttctctttgcttaagaatacgcgtcaggaaaactctcaattcatcactgtggtagatgcaatttccccggatcctgtgcgataataaccgggtagatgctcattccatctcttatgttcgccttcgtgcctcataaactccggaatgatgcagagccgttcttacggtgcttatcgtccactgacagatgtcgcatttatgcctcatcaaacaccatggacattacgttgagtgaagcacccaatttgttgtcaaacagacctgttttaacgcctgccctgatttcagcgcaggcgtttttttctttcggggatccgtcaatgtgaaggcgggggagaagggctatcgccccg

SEQ ID NO: 5367 - DNA, 10004 bp, Unknown
  gut microbiota DNA sequence
aaagcgcgtaaagccgaacagcaggccgcgccggtggacgccccggccgccgaaccggtcgacccgcgcaaggcggcggtggaagccgctatcgcccgcgccaaagcgcgtaaagccgaacagcaggccacacaacaggatctcgcgtcagccgcagccaatgacgacccgcgcaaagcggccgtcgccgcggctatcgcccgcgttcaggcgcgtaaagcaacacagcaggcagttaacgaggaataaatggttttcagaatcgcaagctccccctatacccataaccagcggcagacctcgcgtattatgctgctggtgctgctcgccgctgtgcctggcattgtggtccagacctggtttttcggctggggcaccgtactgcagattgtcctcgccgccctgacggcctgggcgaccgaagccgctattctcaaactgcgtaaacagcctgttgctgccacgctgaaagataattccgccctgctcaccggcctgctgctggcggtgagtattccgccactggccccgtggtggatggtggtgctcggcactgcctttgccgtagtcattgccaagcagttgtacggaggcctgggccataaccccttcaacccggcaatgatcggctatgtcgtgctgctgatttcgttcccggtgcagatgacctcctggctgccttcctatgagatagccgcccatatcccggcattcagcgacgcgctgcagatgatcttcaccggtcataccgccgccggaggcgacatggccagtctgcggctgggtatcgacggcgtcagccaggccaccccgctggatacctttaaaacctccctgcatgccggacatagcgttcagcaggtgctgcaattgccggtctacggcggcgtgctggcaggtctgggctggcagtgggtgaatatcgcctggctggcaggcggccttttcctgctgtggcagaaggcgatccgctggcatatcccggtcagcttccttgttagcctcggcctgtgcgccaccctcggctggattttttcgccgcagagcctggcctcaccgcagatgcatttgctctccggggcgaccatgcttggcgccttctttatcctgaccgatccggtgacggcctcaacaaccaaccgcggccgtctgatctttggcgccctcgctggcctgctggtctggctcatccgcagcttcggtggttatccggacggcgtggcgtttgccgttctgctggcgaatattaccgtgccgctgatcgattactacacgcgcccgcgcgtatatggccaccgttgagagagcaatgatgttaaaaacgatgcgtaaacacggcgtcacgctggcgctgtttgccgccggttccaccgggctgacggcggcgatcaatgagctgaccaaaagcaccatcgaccagcaggcggccctgcagcaaaaggcgttattcgaccaggttttacctgccgaccgctataataacgatctgcttaagagctgctatctggtcagcgccccggcgctgggcaaaggccagcataaagtgtggatcgccaaaaataacgatcgaccgatcggcgcggtgatggaagccaccgcgccggacggctactccggagcaatacagctgctggttgccgccgattttagcggcacggtcctcggcacccgcgtaactgagcatcatgaaacgccgggcctgggtgataaaatcgaacttcgcctgtcggactggattacccattttgccgggaaagtcatccacggccagggcgatagccactgggcggtcaaaaaggatggcggcgattttgaccagttcaccggcgccaccatcaccccccgggcggtggtcaatgccgttaagcgcgcaggcttatatgcacaaacgctgcctgcgcaacttcctgaattcaccgcctgtggagaataaccatgagcgaagttaaagacgtcatcgtccagggcctgtggaaaaataactccgccctggttcagctgttaggtatgtgtcctctgctggcggtcacctcgaccgccaccaacgccctcgggctgggtttggccaccaccctggtgttaaccctgaccaacctgaccatctccagcctgcgccgctggacgccggcggagatccggatccccatctacgtaatgattatcgcctcggtggtgagcgtcgtgcagatgctgatcaacgcctatgccttcggcctctatcagtcgctggggattttcatcccgcttatcgtgaccaactgcatcgtggtcggccgcgccgaagcctttgccgccaaaaaagggccagcgctgtcggcactggacggtttctcgatcggcatgggcgctacctgcgcgatgtttgtgctgggctccctgcgcgagatccttggcaacggcaccctgtttgacggcgccgacagtctgcttggcagctgggcgaaggttctgcgcatcgaggttttccacaccgacacccctttcctgctggctatgctgccgccaggcgcctttattggcctcggcatgatgctggcgattaaataccttatcgatgaacgtagcaaacagcggaaggcgcaagcggcccgggccgtctctgtcgccccgtccgacgtgacagggaaagcataatatgaacaaagccaaacgcctggcgatcctcaccaggctgcgggaaaacgatccccaccccaccaccgaactgcatttcagttcgccattcgagctgctgattgccgttctgctttctgcacaggccaccgatgtcagcgtcaacaaagcgacagccaaactctatccggtggccaatacgcccgcagcgatgctggccctgggggtggatggggtgaaatcgtatatcaagactatcggcctgtttaacagcaaagcggaaaacgtcatcaaaacctgccgcatcctgttggagcagcacaatggcgaggtgccggaagacagagcggcgctggaggcgctgcccggcgtgggccgtaaaaccgccaacgtggtgctgaataccgcctttggctggccgaccatcgccgtggacacgcacatcttccgcgtctgcaatcggacgcagttcgccccgggcaagaatgttgaacaggtggaagagaagcttctgaaggtggtccccgccgagtttaaggtcgactgccatcactggctgatcctgcatgggcgttatacctgtattgcccgcaagccgcgctgcggctcctgcctgattgaagatctttgcgaatacaaagataaagtctacgcctgactgtctcgtctctattgcggtcatagcttaactctgggttatggcccgcattcatctatttcaccggccattaacaccacataatcatcatgattatggatgattatccggttatataacaaacaactagttcattcattttttatcagcgcaaaatttctatgcatttgtgatccagatcatgctcgcaactttatgttgaatgaatgttactggaatggaaataaatgtcaggcaatacaacggatgagtaaagattgtcaggataatgacccatgattttttaagataatggaccatatcactattcttacgccagatcagtagaatatatcgccttttcccggcaaaccggctaacccgaaagataaaaataccgacgatatcgaaacggtaaaatttaacgctgtataacattcatatgtcaggagcattataccaccctgattatgtgtaacagattattacaaaagccttgcctgatgcgccaggatagtgaacattacttgccgttttccctccaagaataactataaaggcggcggtccaacgagattgcgccccgaacaccccccagtaaatatgggatgtaaaaaaagaggtatatgtgtctactgcaaacaataaaccagcagaaagcgtgagtctgaacgctttcaaacaaccacgcgcgttctatctcattttctcgatcgagttgtgggagcgttttggttactacggcctgcaagggatcatggccgtttacctggtaaaacagctgggtatgtcggaagcggattccattactctgttctcctcctttagcgcgctggtttatggcctcgtcgccattggcggctggctgggtgataaagtgctgggtaccaagcgtgtcatcatgctgggcgctatcgtgctggcgattggctatgcgctggtggcctggtccggccatgacgccgctatcgtctatatgggtatggcgaccatcgccgtcggtaacggcctgtttaaagccaacccgtcctccctgctttctacctgctatgacaaaaacgacccacgtctggacggtgcatttaccatgtactacatgtccatcaacatcggttcgttcttctctatgctggcaaccccgtggctggccgcacgttttggctggagcgtagcgtttgccctcagcgtggtggggatggtgatcaccattattaacttcgccttctgtcagaaatgggttaaacagtacggctctaaaccggactttgccccggtacacatgggtaaactgctggcgaccatcgctggcgtggtggtgctggtcgctatcgccacctggctgctgcataaccagggtatcgcacgtatggtgctgggcgtcgtcgcactgggtatcgtcgtgattttcgccaaagaaaccataggcctgaaaggcgctccgcgtcgtaaaatgatcgtcgctttcctgctgatggtagaagcgattgtcttcttcgtgttgtacagccagatgccgacctcgctgaacttcttcgccatccgtaacgtggagcactcgatcctcggtctcgcctttgaaccggaacagtatcaggcgctgaacccgttctggatcatgattggtagcccgattctggccgccatctacaacaagatgggcgaccgcctgccgatgccgcacaaatttgctatcggtatggtactgtgctctggcgcattcctcgtcctgcctttaggggcgaagttcgccagcgacgccggtatcgtctcggtcaactggctgattctgagctacgcgctgcagtctatcggtgaactgatgatttccggcctcggcctggcgatggtcgctcagctggttcctcagcgtctgatgggcttcattatgggcagctggttcctcaccacggcaggcgcggcgatcatcgccgggaaaatcgctaacctgatggcagtcccggagaatgtcaccgatccgctggtgtcgctggaagtgtacggtcacgtattcctgcagattggtatcgtcaccgcggttatcgccgccctgatgctgctgaccgcgccgaaactgaatcgtatgactcaggacgacagcgcggacattaaagcacgcgaaaccgcggctgcctgacgccgcagggaaaactaattatttttaagccgctaacgttagtttagcggctttttttttacccctggcaggactaacatacagaaaactgcagccacgaggagtcacgcatgaaactgttctacaaacccggcgcctgttcccttgcctcgcatattgccctgcgcgaaagcggtctggattttaccctgcagagcgtggatctggcccagaaacggctggaaaacggggaagactatctgctgatcaacccgaaaggtcaggtgccggcgctgctgctggatgatgatatcctgctcactgagggcgtagccatcatgcagtacatcgcagaccaggtgccggatcgtcatctgctggcgccggtgggctcgattgcgcgctatcagactctcgaatggctgaactatgtggccaccgagctgcataaaagctttaccccgctgttccgcccggataccccggaggactataagcctgtcgcgcgggggctgcttgagaaaaagctgcaatacgttgatgcagcgctggcagacaaacagtggctgaccggccatcgcttcaccattgccgatggttatctgtttacggtgctgcgctgggcctatgctataaaactggatatggctgcctatggtcatatcggcaactggatgacgcaggtggcagcgcgtccggcggtggcggccgcactggcggctgaaggcttaaaataaggcctgaacctgcccggcggaccgtcgggcaggccctgggagttacagccgggtggcgctgaagcagtgctccggtacggcgatgcgatcctgcgccgctactacctgcagttcgtattcctgcatatttttggtggcgagcataatctcgtacaccgcggcggtgacgtgttccagcgcatcgcgcagacttgccccctgcagcaattttaccaacagcagaccgctggtcacatcgccgacgcccaccggctgacgcaggccgaaatccaccagcggccgactaatatgccaggcttcttcggccgtcaccagcagcatctcaaaacgatccatactcagacccgcacgggcaagatgcttaactaataccacttccggcccctgggcaatcagctcccgcgcggcggccactgcctcgctgacgctggcgaccggatgaccgcacaggatctccagctcaaccagattcggcgcaataatatcgctggccggcagcgcatagcgcgcgtggaactccgccacgcccggcgcgacgatgcagcccttctccgggtgacccatcaccggatcgcaaaaatatttcgccgccggattggccgccttaacctgacgcacgataccgaggatatgctctccctgctcagcggagccaagatagccgctcagtaccgcatcgcaggtctgcagtttgtcgatgtcggcaatcccctgaacgatctccgtcaaatgcgaaggcggcatgacgcagccggtccatttgccgtactgcgtatggttagagaactgtacggtattcaggggccagacattggcgcccagacggcgcatcggaaattcggcggcactgttgccggcatggccaaacacaacgtgagactgaatggcgaggatgttcttcattttcttaccacaaccctaaaaagaaaaagggcgtggtttcccacgccctggcagtatttttttatttccagcagaccaggcagtaatttttcttaccgcgacgcagcaaggtgtagcggccaaacaggcgatcgctgtcactgaatacatattccgggtcggcctgtttttcgccgttgatggtcaccgcgttagaggcaacggttttacgcgcctgaccgcgggacggctgcagctcggaatcaaccagcgcctgcagcagatcggcgcctttttccatttcgatcatcggcacgccatcctgggccagctgttcgaagtctgcttcgctcaggtcgctcaggttaccgttgaacaggctttcggtaatgcgcttcgccgcttccaggccttcttcgccgtggacaaggcgcgtcacctgctctgccagcacgtactgggcgcgcggcgctttaccgctgtttttgtcttcttcttccagggcattgatctccgcaatgtccataaaggtgaagaatttgaggaagcgatagacatcagcatccgcggtgttgatccagaactggtagaatttgtacggactggttttcttcggatccagccacacggcgccgccttcggttttaccgaatttggtgccgtccgctttggtgatcagcggtacggtcaggccaaacacctggttctgatgcagacgacgggtcagatcgatgccggaggtgatgttgccccactggtcagaaccgccgatctgcagcgccacgccgtgcagcttgttcaggcaggcaaagtcgtaaccctgcagcagattgtaagagaactcggtaaaggagataccctgatcgtcacgattcagacgctgcttcaccgcttctttgttgatcatctggttaacagagaagtgtttaccgatatcgcgcaggaaggtcagcacgttcatgctgccaaaccagtcatagttattcgccgcgatcgccgagttgtcgccgcagtcaaaatcaaggaacggagccacctgtttgcggattttatccacccactcctgcacggtatcctcggtgtttagtttacgctcagcggctttgaagcttgggtcgccaatcagaccggttgcgccgcccaccagcgccacaggtttatgacctgcctgctggaagcgtttcaggcataacaatggaacaagatgccccaaatgcaagctgtcagcggtaggatcgaagccgcaatagagcgcgatcgggccttgcgccagtcgctctgctaacgcttcctcgtccgtcacctgggctaccagcccccgctcttgcaattgtttaatcaagttactgcttgccatcaaattctccatgtataaacgactgcacctctgccggtacacgacttttcgccagatgcgaaaagtacatagaataaagcgccggccctttcagcgccagcgcttcgataactaatttcggcgtttacggcgccagacggtctattttccaggcgccgctatcgcgctggtataaaaagcgatcgtgcagacggtgttctcccccctgccagaactccatctgctcaatgctgacgcggaatccgccccagaagctcggcaacggcacttcaccctgctggaacttctgcttcagctcgaggaatttgctttcgaggatgccgcgggctgagatccggctcgactgcttcgagacccaggcgccaatctggctgtcgcgcggacggctgtggaaatatttgaccacttccagcgtcgacagacgctccgctttgccgattaccatcacctggcgctccagcatatgccacgggaaaagcaggctgacctgcgggttgttttcaatttgatgcgctttgcggctgccgaggttggtataaaacaccaaccctttttcgtcgtagtgcttcagcagcacaatgcgctggtagggctggccgcgctcatcgacggtggcaaccaccatggccgtcgggtcggcaagtttcgcatcgcaggcctgacgcagccagcgttcaaacagcggcaggggttcagcaggaagatcgtggcgacgcaaaccgccacgggtgtattcacggcgcaaatgcgcaatttgctggagttcgtcgttatcagacatggccattgaggatgtagtcataaggtggcgttattgtgcgccccccggacagaaatctcaacgtttggccgtctgcagctgacagttatcaaggacgatgcggtcgcgcttatagacggtggcggtatcgccttttgaccagaacacatagacgccgtcggtgtagcgcgccccggaagccgacagcccctcagacaggttcagttgctgattatcatagataaaactgacctgctggcgtgcgttattgcgatggaccgtcaatggtttctggtcgcattgatactccagcgtgtccgtctgcatccgctcgacaaactggttgtagtagctacagcccgccagcataaaaggtacaactgcgataagaatttttttcattcgtttgccttcgactttcccggtcacggcgggcactccgccctccgcttaacttgtccagtttaccggtcgcgtcgtatttaagatttcagttaactccgattctgcggcgggttagccggaaaaatggcgcccagcaccgaggcttcgctggcgccggtcacggagggcagattgcccggcagaccagccagcgttcgccaggccagccaggcaaaggccagcgcttccatatcatcgccgctgatccccgcctcatcggtggtggagacctcggttcccggcagcagcgccgccaggcgcgccattaacaaggggttacgcgcgccgccgccgcacactaacaaacgctcgcagccgccgcttaacaatacctgctcactgatggtgacggcggtcaattccgcaagcgtagcctgaacatcctccccgcgtagccccggatagcgggccatatgctgctccagccagccgtaattgaaatattcccgaccggtgctttt

SEQ ID NO: 5368 - DNA, 9764 bp, Unknown
  gut microbiota DNA sequence
cgaagaagcttttcgggaacacgccgtcgcggcccataacgtacatcagacgcgccacgccagcgtgcgccgccataccggacgccagcacggtgatggtggagaagatcagcgcgccaacctggaaggctttacctgccacgtagagcataatttccggctgtgacgcatccggatctttaaagcgcgagatatccgggaagtacagctgcaggaagtaggtggcaaagatgaagatcaggccgccgatcagcgcggtcaggaagatcgcgcgcgggatgacgcgctctgcatctttggtctcttccgacaggttgctgatgccgtcgaaaccggtaaacgagaagcacaggatcgtcgccccggtaatcatcgggatcacgtgcgcgtcaccggaccagaacggacggctgctggccagcgtaccggcgccctcgccttcaaacacgccataaatcaccatgccgaggataacggcaatcagcaccacctgcagcaccacgatcacggtgttgaagttggccacggatttaatgctgcgcaggttaaaggcggtcataaaggcgaccagcgcgataacaaacacccacgacggaatcgaaggcaccagcgcttcaaaatagattttcgccagcagaatgttgatcatcggcgcgaacaggtagtcgagcagcgaggaccaacccaccataaagccaacggtcgggctgatggatttctgcgcataggtatacgccgagccggcagaagggtaacgacgtaccagcttgccatagctcagggcagtaaacaggatagcgattaacgcaaaggcgtaggccgtcggcacgtgaccgtcggtcataccagagacgataccaaacgtatcgaacagcgtcatcggctgcatataggccaggcccatcattacaaccggaactaacgtaagcgttttacgtaattccacgcgagaggtatttggagtagcgttatgcgacatagttatccccttttacggtgaacgccagcgcgtaagcaaaaaattgccccatttctttctattcctcagcgacaacgactgtcggtttttagtaaatatctatccggtacgaagcccggcctcttggtattgaatgatgtgtctttcgaccaaaaaaataaccgacactttaaaaaaaagcgtcggctagtctctggttttcaggccgcatattttgcaacaaattcaacggcgttgacaagatgttatgaagttcattgcgtaagcatattttttaacgtgctaatatctatacggtttccgtatgataaattgtaaaaatagcactatttgctaatagcgtttcccgccaccatttgccagccaaaccgcaggtggcgtcattccaggcgatccacgcgcgttgacgagacgatagcccgcgcacggtcatgcagaccagctcgccgctgtccagtagaccctgcacctgatagcgcggcaggcacccccagcccagccccaggcgcagcagcgccagctgccccgcggcgtcacacaccgtcagggtctcctgatcgctgagtagcgccccgccctcgccggttgccaccgcccgataacggcgcagggttcgccagctcaacggtgcgcggtgtcgcgccagcggatgctgtggggcaacgaccagcagcagctccagctcgccgagggggagatagtcataaccgctcagcggcggcggctcgccgagcgcccccagcagcagatcggcctgcccgtcagtcagcggccgccagtccagcagggaggggttcagcgtgaagtgcagccgggtcagcggctgttgttgataaaatgcagcgattggcggcgagagcagcgccacgggaaaggtgctgtccaccgccagacgaaggctattctcccacccctgctgcagcttaaccgcccggatctccagttcgcgggcgatatgcagcacctcccgccctttctccagcagcatctgtccgctgggggtaaagcgcgcgcgatggccgctgcggtcgagcagctgaatattgagatcgctttccaggcggtgaatggtgtagctcagcgccgagggcgttttaaagagctttgccgacgccgcggcaaagctgccctctttttccagggcatccaggatcacgaggacatccagcagtggtttcatcgctacccccttacggtatgcgaatcaccgctggcggatcactccatcggcatcaccagcggatcggggtactggtactcaaaccccagctcattgcagatacgattgccatccacaatcttgccctggccgccgtccgggctgtcgctgaacaccggcggcggcagaccgagctcgcgggccatctgcggataaaagaggccgcgcgccggatggcggggcgcacatagattatagatgtgcccgcccttcggggcctgcagcagcagttcgatagcggccaccacatcctgcaaatgcaccagattgaccacgtgctggccatccggcgccgacttgccggcgaaaaaacgtcccggatgacgggaaggccccaccagcccggccaggcgcagaatatccaccgatgtccccggcaggttgtgcagccagtcctccagctccttgagcacctgtccgctggcggtttgcggcagacgcggggaattctccttcactgtaccgttgacgttgccatacaccgaggtggagctggtgaagacgatccgcggaatatggtaagccagcgcggtatcgacgatctcctgcaccgcctgtagataaaacccttcccctgccccggtacgccgggccggcagggtgatcaccagcgcatcgacgttcatcagcgcgtcgaggtcctcggtatcacagaccagctgtggctccaggcgcagcggatagctgtcgatcccgcacatccgcgccgcctccacgccatcctgcgtagttttactgccggtaacctgccagcctcgcgccgtcaacgacagcgccagcggcatccccagccatcccaaaccgactatcgcgacctttttcatcccaggctcctgactctttcgctgtgctgattacaggctacgccagccagcggcaactgacaatttcttcgctcaatatgaaatgaattaatgatagaaaaaagcccttgctttctgcggcggaagtggtttaggttaaaggacatcaaatgcatagtcattcacagagaatttttatgaaccgcgttcaatttaaacaccaccatcatcaccatcatcctgactagtctttcaggcgatgtgtgctggaagacgtttggatcttccagtggtgcatgaacgcgcagagagcccccggaagattcacttccgggggcttttttttggaccaaattcggacagattcagacaggtattcagaggaaaagaacaatgttagacaacacccgtttacgcatagctattcagaaatcaggccgtttaagcgaagattcacgcgaattactcagccgctgcggcattaaagtcaatttgcacacccagcgtctgattgcgctggcggaaaatatgccaatcgatattctgcgcgtgcgtgatgacgatatcccgggcctggtgatggacggtgttgtcgacctcggcattatcggcgaaaacgtgctggaagaagagctgctcagccgccgcgcccagggcgaagacccgcgctacttcaccctgcgccgtctcgacttcggcggctgccgcctgtcgctggcgactccggtggatgaagcctggaacggcccggcggcgctggacggcaaacgtatcgccacctcttacccgcacctgctgaagcgctacctcgatcaaaaaggtatctcctttaaatcctgtctgctgaacggctccgtggaagtggcgccgcgcgccggcctcgccgacgctatctgcgacctcgtctccaccggcgccactctggaagctaacggcctgcgcgaagtggaagtgatctaccgctccaaagcctgtctgatccagcgcgacggcgaaatggccgacgccaaacagcagctgattgaccgcctgctgacccgtattcagggcgtgattcaggcccgcgagtcgaaatacatcatgatgcacgccccgaccgaacgcctggaagaagtggttgccctgctgccgggcgccgagcggccgactattctgccgctggcaggcgacaagcagcgcgtggcgatgcacatggtcagcagcgaaaccctgttctgggagaccatggaaaaactgaaggcgctgggcgccagctccattctggtgctgccgattgagaaaatgatggagtaatcggccagccggtcacgggacacacaggggaatacaatcatgagcttcaacacaatcatcgactggaacggctgtagcgcagaccaacaacagcaactcttaacgcgcccggcgatttccgcctccgacagcatcagtaaaacggtgacggagatcctgaataacgtcaaagccaacggcgacgcggcgctgcgcgaatacagcgcgaagtttgataaaaccaccgtcgccgcgctgcaggtgagcgaggcggagatcgccgccgccggcgagcgcctcagcgatgagctgaagcaggcgatggcggtggcagtgaaaaacatcgagaccttccacaacgcgcaacagctgcaggcggtggatgtcgaaacgctgccgggggtgcgctgccagcaggtcacccgccctatcgcctccgtcggactgtacattcccggcggctcagcgccgctgttctccacggtgctgatgctggcgacgccggcgcgcatcgccggctgtcagcaggtggtgctctgctcgccgccgccgattgccgatgagatcctctatgccgcgcagctgtgcggcgtaaaaaccatctttaacgtcggcggcgcccaggccatcgccgccctcgccctcggtaccgagtcggtgccgaaggtggataaaatctttggcccgggcaacgcttacgtcacggaagccaaacgccaggtcagccagcgtctggacggcgcagctatcgacatgccggccggcccgtcggaagtgctggtcatcgccgacagcggcgccaacccggactttgtcgcctccgacctgctgtcgcaggcggaacacggcccggactcgcaggtgatcctcctgaccccggacgccgacatgggcagccgcgtcgccgaagccgtggagcgccagctggccgccctgcctcgcgcggaaaccgcccgcgtggcgctctccgccagccggatcatcgtggcccgcgatctggcgcagtgcgtggctatctccaaccagtacggcccggagcacctgatcattcagacccgtcaggcccgcgagctggtggacagcatcaccagcgccggttccgttttccttggcgactggtcaccggaatccgcaggcgactacgcctcgggcaccaaccacgtcctgccgacctatggttacaccgccacctgctcaagcctcggcctggccgacttccagaagcggatgaccgtgcaggagctgtcgcgcgacggctttgccgccctcgcctcaacgattgagatcctggccgccgccgagcgccttgacgcccacaaaaacgccgtaacgctgcgcgttgccgccctgaaggagcaagcatgagcattgaagatttagcccgcgccaacgtccgcgcgctgaccccgtatcaatccgctcgccggctgggcggcaaaggcgacgtctggctcaacgccaacgaattccctaccgccgtagccttccagcttaccgaacagacgctgaaccgctatccggagccgcagccgaaggccgtgattgagagctacgcccgctacgccgaggtcaaaccggagcaggtgctggtcagccgcggcgccgacgaaggcatcgagctgctgatccgcgccttctgtgagcccggcgaagacgcggtgctctactgcccgccgacctatggcatgtacagcgtcagcgccgagaccatcggcgtcgagtgccgcaccgtgccgacgctggccgactggcagctcgacctgccgggcatcgaggcgcggctggacggcgtgaaggtggtcttcgtctgcagcccgaacaacccgaccgggcagattatcgacccgcagtcgatgcgcgatctgctggagatgacccgcggcaaagccatcgtggtcgccgacgaagcctacattgaattctgcccgcaggcgacgctggccggctggctcagcgactatccacacctggtggtgctgcgcacgctgtccaaagccttcgccctcgccggcctgcgctgcggcttcaccctcgccaatgccgaggtgattaacgtgctgctgaaagtgatcgccccgtacccgctctccacgccggtggccgatatcgccgcccaggccctgagcgcggaagggattgcggcaatgcgccagcgcgtggcgcagatccttgacgagcgccgctacctggtggaacaactgcgcggcatcgcctgcgtagagcaggtcttcgattccgagacgaactatatcctggcgcggataaccgcctccagcgcggtgtttaaatctttgtgggatcagggcattatcttacgtgaccagaataaacaaccttcattaagcggctgtttgcgtatcactatcggtacccgtgccgagagccagcgcgtgattgacgccttgactgcggagaatgtatgacccagaagtatctctttattgaccgtgacggcaccctgatttccgaaccaccggaggatttccaggtggaccggttcgacaagctggcgtttgagccgcaggtgatcccggcgctgcttaagctgcagcaggaaggctataagctggtgatgatcaccaatcaggatggtctggggacggacagcctgccgcaggaagcgtttgatggcccgcacaacctgatgatgcaggttttcgcctcgcagggcgtcaatttcgaagaggtgctgatttgtccgcacttcccgggcgacaactgcgcctgccgcaagccgaaaacgcagctggtgctgccgtggctggaagagggtgtgctggataaagcccacagctatgtgattggcgaccgggccaccgacctcgagctggcggataacatggggattaccggcctgcgctatgaccgtgagaccctggactggccgaccatctgcgagcagctgacccgtcgcgaccgctatgcccacgtcgagcgcatcaccaaagagacccaggtggatgtgaaagtgtggctggaccgcgaaggcggcagcaagatccacaccggcgtcggcttttttgaccatatgctcgaccaaatcgccacccacggcggcttccgcatggaggttaacgtcggcggcgatctgtacatcgacgatcaccacacggtggaggataccggcctggccctcggcgaagccctgaagctggcccttggcgacaagcgcggcattaaccgcttcggcttcgtgctgccgatggacgagtgtctcgcccgctgcgcgctggatatctccggccgtccgcacctggagtataaggcggacttcacctatcagcgcgtcggcgatctgagcaccgagatggtggaacacttcttccgctcgctctcctacaccatggcggtgaccctgcacctgaaaaccaagggtaagaacgatcaccaccgcgtggagagcctgttcaaagcctttggccgtacgctgcgccaggcgatccgcgtccagggcgatgccctgccgtcttccaaaggggtgctgtaatgaatgtggtgatccttgataccggctgcgccaacctcaattcggtgaaatcggcgattggccgccacggctatgagccggtggtcagccgcgatccggaagtggtattgcgcgccgataaactgtttcttcccggcgtcggcaccgcccaggcggcgatggatcagcttcgcgaccgggagctgatcgacctgatcaaagcctgtacccagccggtgctggggatttgcctgggcatgcagctgctcggcaagcgcagcgaggagaacaacggcgtcgatctgctgggcattatcgaagaagaggtgccgaagatgaccgaccacggtctgccgctgccgcacatgggctggaaccgggtgtatgccaaagctggcgatcggctgttccgcggcattgaagaaggcgcgtatttctacttcgtgcacagctacgccatgccggtcaacccgtacaccatcgcccagtgcaattacggggaggcgttcaccgccgcggtgcagaaagataacttctttggcgtgcagttccacccggagcgctccgggagcgccggggcgcagctgctgaaaaacttcctggagatgtgatgattattcctgctttagatttaatcgacggcaccgtcgttcgtctccatcagggcgattacggccagcagcgcgactatggcagcgatccgctgccgcgcctgcagtcctatgccgctcagggagcggaagtcctgcacctggtcgacctgaccggggcgaaggatccggcgaagcgccaaatcccgctgctgaaatcgctggtcgccggggttgacgtcccggtacaggtcggcggcggcgtgcggaccgaagcggatgtcgcggccctgcttgaggccggcgtcgcccgcgtggtggtcggctccaccgcggtgaaatccccggaggaagtgaaaggctggttcaaacgctttggcccagaacggctggtgctcgccctcgacgtgcgtatcgacgccgtcggcaataagcaggtggcggtcagcggctggcaggaaaactccggcgtgacgctggaggagctggtggaaagttatctgccggtcggcctgcagcacgtgctgtgcaccgatatctcccgcgacggcacgctggcaggctctaacgtctcgctgtacgaggaagtctgcgcccgctacccgcaggtggcgtttcagtcatccggcggcatcggcgatctcaatgatattgccgccctgcgcggcaccggggtgcgcggcgtgattgtcggccgcgcgctgctggaaggtaaattcaacgtaacggaggccattcaatgctggcaaaacggataatcccctgcctcgacgtccgcgacggccaggtagtgaaaggcgtgcagttccgtaatcacgagatcattggcgacatcgtcccgctggccaagcgctatgccgacgaaggggccgacgaactggtgttctatgatatcaccgcctccagcgacggtcgggtggtcgacaagagctgggtgtcgcgggtagcggaagtgattgatattcctttctgcgtggcgggcgggatcaagtcgctggaagacgcggcgcagatcctctccttcggcgccgataagatctcgattaactcccctgctctcgccgacccgacgctgatcacccgccttgccgaccgctttggcgtgcagtgtatcgtggtggggattgatacctggtttgatgcagagaccggcaagtatcacgtcaaccagtataccggcgacgagagccgcacccgggtgacgcagtgggaaaccctcgactgggtggaggaagtgcagaagcgcggcgcaggcgagatcgttctcaatatgatgaaccaggacggggtgcgcaacggttacgacctgcagcagctggcgaaggttcgcgcggtgtgccacgtcccgctgatcgcctccggcggcgcgggcactatggaacacttcctcgaagccttccgcgacgccgacgttgactgagcgctggcggcctcg

SEQ ID NO: 5369 - DNA, 9438 bp, Unknown
  gut microbiota DNA sequence
aatccggcctggaagttagtcagggtaaaggcctgttgaaattgcggtaataaaatatcattcagattatttgccaccgcccacagaaaaaagagggagcacagcagagcgaaaggaataatgtagctcttactctgcccgctctccatggcgcggtaactttgcgttggtatcgttgtgtttcccatagcgtcctcatcagttcagaagcatttacaacagcattcagggcgcagtctggtgctgcagcagaccgcaaaattaagtgagctcaggtgacgcgccggtgagtgaaatgaaagtcacggcggaactcatggcttcattttcaaataaaaaccgcctgttaatatgatgatggtcacacttaacgtactgtgggccattttatgtgattgttgtcactttaatttttcaaaaacgctgaccgtttgagaaaataaattcacaaaaccacaacgcttatgaccgaatgaatatatattgtggaaaacgggcaattgttacaaagaaataaaatgcccgcttgatgaaatattattaagaacgggcattttaatctctctcgtaatgggtatggttgctttattcatggcggaataattgacgcggctcacaaaaaataatcatgaaaattcccctttgaatattcaggttgatgatgaagaccattattcaccctatcccacggtagccgacgatatttctgttgccctgccgttgatggatgatgagtcaccaaaagaggaacgcaatggaaagaaacagactggcccggcagattatcgatacctgcctggaaatgacccgcctggggttaaatcaggggaccgccggcaatgtcagcgtgcgctatcagggaggaatgctgatcacccctaccggtatcccatatgaaaagctgacggaagacaagatcgtctttattgatgccgacggccagcatgagcagggaaaactgccctccagcgaatggcgttttcatcaggcggcctaccagacgcgacccgatgcccaggcggtggtccacaatcacgctgtccattgtacggcggtgtcgatcctcaaccggcccatcccggccattcactatatgatcgccgcggccggcgggaattcgatcccctgcgcgccctatgccaccttcggcacccgcgaactgtctgagcatgtcgcggtggcgctgaagcaccgcaaagccacgctgctgcagcatcacggcctgatcgcctgcgaggccagcctggagaaagcgctctggctggcgcatgaagtggaggtcctggcccagctctacctcagtacgctggcgattaccgacccggtcccggtgctggatgacgaggcgatcgccatcgtgctggagaagttcaaaacctacggattacgcattgaagagtgatgccgcaacgctaacaggagagccacgatggcaaacagaatgatcctcaatgaaacggcatggtttggccggggggcgataaacgcattaaccgatgaagcggtgcggcgcggttatcgtaaagcattgatcgtcactgacagcactctcgcccgctgcggcgtggcggcgaaagtcaccgacaaactggatgccgccgggctggcatgggatatattcagcgacgtgatccctaacccgaccatcgccgtggtccagcaggggcggcaggcctttcaacgcagcggggcggattacctgatcgccatcggcggcggttcgccgcaggatacctgtaaggcgatcggtattattcagcgtaacccggaattcgccgatgtccgtagcctcgaggggctgtcgcccacccgtcagcccagcgtgccgatcttcgcggtgccgaccaccgcgggtaccgcggcggaggtgacgattaactatgtcatcactgatgaagaacagcggcgcaaattcgtctgtgtcgacccgcacgatattccgcaggtggcctttatcgatgccgatatgatggacgctatgccgccggcgctgaaggcggctaccggcgtggacgccctgacgcatgctatcgaagggtacctcactcgcggcgcctgggctttgaccgatgctctgcacctcaaggccatcgagatcatcgccggcgcgctgcgcggctcggttgccggcgacgccggcgcgggggaagctatggcgctcggccagtatgtggcggggatgggattttccaacgtcgggctcgggctggtgcacggcatggcgcatccgctcggcgctttttacaacacgccgcacggcgtggcgaatgccatcctgctgccgcacgtgatgcgctttaatgctgaggcgaccggggaaaaatatcgcgacatcgcccgggcgatgggcgtcagggtggaagcgttaagcctgaccgccgcgcgcgaggcggcagtagaggcggtctgccagcttaaccgcgatgtcggtattcccggccatctgcgcgaggtgggcgtcaggaaagaggatattccggcgctggcccaggcggcgctggcggatgtgtgtaccggcggcaacccgcgcgaggcgagcctggcggatatcgtcgggttatatcaggctgcctggtgattgcctggcccgggtaaagcaggcagtgccggaggcagtcaccctgcaccggcgcacctcttaacgaaggtcagcgcgtcagccgcagctgctgcagattgccgtccagctggaggtcggtctgcaggcgggccacctcccggcaggtgaaggccatctcctgatgcgcggccagctttttgcgccacttctccgggacctcggccagacgggcgtacagcccctccaggtcctgaaactcgttcagcagctgggcggcgcttttgggtccaatgcccgccacgcccggcaccttcgagctgctgatccccgccagcccccagtaatccgccagctgctccggggtgacgccgaactcgctggcgatgaagggggcgtccagccagcgcttctgaaagtagtcgcggatgcggatggtgggcgacagcagctggcagtagcctttgtcggtggagacgatggtggcctgatggcccgcctgggccacctttaccgctagggtggcggcgagatcgtccgcttcgctgcccggcgaggcccagcagcggatcccccgctgttcgaaggcggcccgcagcgccggcatctcggcgaccagcgtctccggcatcggcgcgcggccggctttgtactccggcaggcgctggtggcgccagccgtgggcgcgatcctcatcatcgaacaccgccacagcgtgggtgggctgactgtggacaatcagctgctccagggcatgcaggcaggtatcgacgcagggtgaaccctgcaccgcgtggatgcggcggattagatttaacgcgtcgacgattaacagatgaacagccacagatacccccttattctcagcgtctttagggtaacatcgccatcagatcgaggctatctgcgcctgaacaatcaggaagataacgcgcaaatttcgctaactgaccgccatcagcggtctgatgacgtccggcgcgggttcgccgtaccacaccgcttcgcgcaccgggaccggtttggcgataagcccgagggcgtaaaagcgatcggcgatggtctgctgggcgcggatcaccgacagatccatcggccgcgggcgatggctgcggcgggcgagggccatgctcagcgaccgggcgtcgatccccagctctgccgagagtaagcgggccgcttcgccgcgatgcgagtcgataaactgcccggtgtgggtcagctccgtcagcaggcggcgcatgatatcgccatgctgagcgaggtagtcccgtcgcgaaagataaaactgatggttgttgacccggccttcgccgctggcgaccacccgcagctcgccggtgtgttcggcgtcgctgagcagcggatcccacatcatccaggcgtcaaccgccagatagtcgctggcggtcagcggatatttcggcggggtatagaccacccgcacatcgttcagacccaggccggcgtcctcgaggatctgcagcagcagccagtggacattcgaccctttattgagggcgatgcgtttaccgcgcagatcgctgagctggcgaatgtcgctctcctgcgggacgaccatcgccacgctgcgcggcgccggcggctcccacgccacgtacatcagttcgctattgctggcctgggcaaacaccggcggcgcttctccggtggtgccgaagtcgatctcgttgcaggcgagggcgtggaggagctgcggtccggcaggaaactcactccacagcacgttgacgccgaggctggcgaaggcggtttccaggctctgacgggctttcaggatcccgaggctgccgaagcgctggtagccaatgcgcagttcgcgatcggccccggctgcgttggcgaacgcccgcggcggcgcaggcgggcggcggcggcttttgatcagcccgaggttagcgagctgggtgcgcaaggtatgccggctgatccccaacagcgcggccgcctggctctggttatcgtcgcaatgtgccatggcgtggcgaatcagggcgctggtcactcgctgccacagcggctcgccgggaagcgccagctggtggcgaataaagtcgtccagctcatgatcgctcgccggccccggggcgtcgttgagcgtcgccaggcgcagctgggcaggactgatctcctcttctttactgagcagcaccgcgttgtgcagggtgttttccagctcgcgaatattgcccggccacgaatagtccatcagccgggccagtgattccggcgccagacgcagggttggccgcccgaggcgccgggcgtagagtgataaaaagtggtgcgccagcagcgggatatcctgccgacgctggcgcagcggcggcagcggcaccaccgcgatattcagtcgatagtagagatcctcgcgaaagcggcgctcgcggatcgcctgggccaggtcaacgtgggtggcggcaatcacccggacattcactttaatcgctttgcgtgagccgacgcgggtaatttcacgctcctgcagcactcgcagcagcttgacctgcagcggcaggcttaattcgccgatctcgtccagcagcagcgtccccccttccgcggcttcaaaccagccgggctgtccctgctgcgcgccggtgaaggcgcctttctcatggccgaacagttcagcttcggcgaggctctcggtcagcgcgccgcagttaacggccagaaacggctgctggcgacgggcgctgtgatgatggagatagcgggccaccacctccttgccggtgccggtttcgcccacgatcagcacggtcgcctccgttggcgcgagtttgtccagcaggctctggaaggccttcgacgccgggtcgatcagcgcgggagcggtggaaggggattctgggttcagcatagcgggcctccgatcgttgacgctctgaacttatcctgcggcggccgcagaaaccagagggggaaggcccccggctgttgcaaatgcgccagcggatgcgcggtggctgcgcgatttgcaacagcgcggcgcggcgaagccgttttcagtgcattgattttaaaagattaattttttattcaccattggcatgattatcgctaacacccatataaccaaattaaaacatctcttcgataaatatcggatatggttatataggaaatagataatgacgcagcaagctcccgacaagatcaatgtcttctggttcttacctacccacggcgatggccgttatctgggtaccaccgagggtggacgcccggtcgatttaccttatctgcagcaggtggcgctggcagccgacagcctgggctactacggcgtgctgatccccaccggtaaaagctgtgaagattcgtggctggtggcctcggcgctggcgccgttgacccgccgtctgcgctatctggtggcggtcaggccgggcctgcagccgccaaccctggcggcgcggatggcggccaccctcgaccgtttatcggaaggtcggctgctgatcaacgtcgttaccggcggcgacccggtggaaaacaaaggcgacggtatcttcctcagccacagcgagcgctatcaggtgacccgcgaatttcttgatgtttacacccgcctgctgcgcggggaaaaagtagattatcacggcgagcatattcacgtggaaggcgctgaggtgttgttcccgccggtgcaggagaatggcccgccgctctatttcggcggctcttctgatgcggccattgatgtggcggccgagcagatcgacagctatctgacgtggggcgaacccccggaactggtggcggagaagctggcggtggtgcgcgagcgcgccgcggcccgcggacgcaccctgcagtacggcattcgtctgcacgtcattgtgcgcgaaacggaagaagaggcatgggccgccgccgaccggctgatcgcccatcttgacgacgataccattgcccaggcgcaaaagatcttcgcccgcatggactcggccggccaggcgcggatgagcgccctgcatcagggatcgcgcgataatctgcgcattgcgcccaatctgtgggccggcgtcggactggtgcgcggcggcgcgggtaccgcgctggtaggtaatccgcagcaggtagcggaacgcatccgcgaatatcaggcgctcggcatcagcaactttatcttctccggctacccacatctggaagaagcgcaccgctttgctgagctggtgatgcctctgttgccgctggaaaacggggcctcgtcgaaggcgcgtagcgtgaacaccggtccgtttggcgaaaccatcggcggcgataagcgcccggtgcgccaggtcagcgccagctgatggcccggagcgcgaccatgagacagcataccggaggagggcagcgatgagtgcagaaccgcatatcgtgattatcggcggcggctttagcggcgcggcggtggcgattgagctgctgcgcctggcgccgaacggggtgcgcgtgacgctgctggagccgcgccagtcccccggggccggggtggcctactccaccgcggagccgacgcaccggattaacgttccggccgctcgcatgcagctggccggcgacgaagagggcgccttcgatcattggtaccgccatcagcctgcctttaccgtcgatgtgcaggcgctgcgcccggacggttccgtctaccctcagcgcggccagtttggtcgctatgtggcgcagcgttttgccgacgccgcggcgtccagcggcggacggcttcgccacctgcgcgatcgggcgctcgcttttcatcaggggatggtgaccaccgacggcggcctgcagcttaaggccgatctgctggtgctggcgatcagtcatccaccgccttcgctgccgacgcaggccgaagcctggcgtcatcatccggcgctgattgccaacccgtggcagcccggcgcgctcgatgccatcgccccgcacgcccgggtggcggtgatgggcaccggattaaccatggccgatacggtcgcgacgctggaccggctgggccaccgcggcagtatcgtcgccttttcgcgccatggcctgctgtcgcgcggcaaccttagcggcgcaggggcaacctggcctggcgactatcagcagggcagcctgcgccagcgcctgcgccagatccgcctcgacgtcgcgtatgcggcgcagcagggcctgagctggcaggtggtgctggatgcggttcgtcagcaggggcaacggatctggcaggcgctcagcgtcgccgatcgccagcgttttctgcgccatctgcgccattactgggatgtccaccgctaccgcgtggcgccgcaggtcgccgaggtgctggaggcgcgccagcgcacgggcagtctgcaggtgcaggcggccaggctactgtcgataagcggtgaaggcgaaacgctgcgtctgacgctggcgcggcgcggcggcggcgtgcagacgctgagcgtcgatcacctgatcctgaccaccggacccgcacaccgcgccctgaccgacagccagccatttttacaggacctcgcccgccgcggcctgattcgcgccgatgccctcggcatgggcctggaggtggacagccgttcccgggcagtggctgagccgcacgttgaggcgctgccggtgctggtggccggtccggccgcccgcgggcgttttggcgaactgatgggcctgccgcaggtagccgaccatgccgctgacgtggcggcgcaagcgttactcacgctcgggatcccgcaggactcccgatgtcctgcgtactgaatacctctctttcttttccctgattcattttgccgcgtgcgccccggcgacgggccgcgctatggagattgctatgtcatcacaacgtgaaattcgtcttaacgctttcgatatgaactgcgtcggccatcagtcgccgggcctgtgggcgcatccccgggatcgctcctggcagtataaagatctggagtactgggtggatctggcgcggctgctggagcgcggcaagttcgacgggctgtttatcgccgacgtgctggggatctatgacgtgctgaacggcagcggcgatgcggcgatccgccaggcgacgcaggttccggtcaacgatccgctggctctgatcaccccaatggcgctggtgacggagcatctgggcttcggcctgaccgcctcgctgtcgtttgagcatccttaccccttcgctcgtcgtctgtctacgctcgatcatctgaccaaagggcgggtgggctggaatatcgtcacctcctatctggagagcggggcgcgcaatatcggccagcagacccagaccgaccatgacacccgctatgactatgccgatgagtatttgcaggtgatctacaaactgctggagggaagctgggaggacggggcagtgctgcgcgacagagagcggaagatcttcagcgatccgcggaaaatccatcccattaaccatcagggacagttcttttccgtgccggggatccacctctgcgagccatccccgcagcgcacgccggtgctgtatcaggcgggggcgtccagccgcggcaaacagttcgccgccggccatgccgaatgcgtcttcgtcgcagcgccgtcgaaggtgctgctgaagaagacggtggcggatattcgccgccgggcagctgaggcggggcgcgatccgcacagcatcctgatcttcaacctgcagacggtgattgtcggcgacaccgaccgcgaggcacaggcgaagtggcaggaatataagcagtacgtcagctatgaaggcgcgctggcgctgctctccggctggacggggatcgatttcggccagtatcagccggatcaggtgctgaagtatctgcacaccaacgccattcagtcggcggtggagg

SEQ ID NO: 5370 - DNA, 47429 bp, Unknown
  gut microbiota DNA sequence
ccgctgacccggcggcttgtttgccgttgttccgtgtcagtggaggcgcattatagggagtaattctgaggtgacaaggggaaatgcaaaaaaacttttcgttcgctcgattttccatcacaacgcgagttttacgcgctatttgcgcgccatttgtgcgatttcccgagcaaaccgggatacctgttgccagtcggtatagaccacttctttgcgggtatccgtttcacccccggtcattttcataatcaggcggatcataaaccgatcgtaccagctgtagcgcgggtagcgcagcgcgccggcaaataccgcgcagctctgcggctgccacggcgagttcagcagaaacttacgcgtatagctgttggtctgcggcgtgcgcttctcgggtttacgcgccaccaggttaaccgaaaagaatgcccccggcagcgcctgcaatgctgccagatgctttttcacaaagcggtccaccgccggatgaaagtgcccgtagcgaatcgacgcgccaatgaccacccgatcgtagtgatgccattcgacgacatcggtacggttcagattcagggtgtccgcatcgatgcccagctctttaagctcagaggcgagaaacgaagcgatttcacgggtctgcccgtcgcgggtggagaagagaattaaagttttcacgagcactcctgttattcgcgccagaaagtgggggtaaagagcaccagtaaggtgaacacttccagacgaccaaacagcatattagcaatcaggatccatttcgcgaccgggttcatggtggcaaagttatccgcgacgacgccgagcccaggcccgaggttgttcaatgtcgccaccacggaggcgaaagcagagaagtcatccaccccggtggcgataatcgccagcatactaatgataaagaccagcgcataggcggagaagaatccccataccgcttccagaatacgttccggcagcgcgcggttacctaatttaatgctatacaccgcattcgggtgcaccagccgcttcagctcacggttgccctgcttgaacagcaacaggatacggatcacttttaatccaccgcccgtggagccagcgcagccgccgataaatgcggagcacagcaacagcaccggaaggaacagcggccagcgtgcaatgctatcggtggtgaaccccgcggtggtcgccatcgacaccacctggaaaaacgcctggttcagcgtcgtcaacaccgagccgtacacgttatgaagccatagcaccagcgtacagacgatgaccagcgtcaactggacgccaatgaacatcctaaattcggggtcgcgccagtacaccttcaggctgcgtccgctcaacaacgaaaaatgcagaccgtagttacagccggagatcagcaggaagatggcaatgatggagttgatcatcgggctgttgaaataaccgacgctggcatcgtgagtcgagaaaccgccgatggcgatggtggcgaaactgtgcccgatcgcatcgaacgccggcataccggcaaaccagagcgccaatgcgcaggcgatcgtgagtaacacatagatgagccacaatgtcttcgccgtctcggcaatacgcggacgcatcttgttatccttcagcgggccgggcatttccgcgcggtagagctgcatccccccgacgccgaggataggcagaatcgctaccgccagcacaatgatccccatgccgccgaaccactgcagcatctggcgataaaagaggatagcgtgcggaagcgagtccagccccaccagagtggtcgccccggtcgtcgtcaggccggaaaatgactcgaagaaggcatccgtcaccgtcaggttcggctgttcggagaagataaagggcaaggcccccacgctccccagcacggtccagaacagcaccacgatcagaaacccttcgcgagatttcagttcgcctttttgcttacggttcggccaccacagcatggagccgatcgccagagcgacaaagaaggtttgagtgaaggcccgtcccgcgccatcgcgatatatcagtgccactaatcccgggacgatcatcgtccccgaaaacaagatgaccagcagtccaacgattcgggttatggcgcgaaaatgcatctctggcgcttcctttgataggcaaaaaacagaggggattattcgttaatcttcagtaattgcaatgaaccacgactaaaatcagccagtcttgctgaaaaagccgccacttcggcctggggaagcgccacgcgcagccgaactgacgccagatattcgctttcaacgacgttcccggagaattgggcgagcagcgcttcaacgccggccagttgcccatactcacactgcaaagtatatgccgttaacggcgtcttgcgcagcgtcgtcagctgcgccagcgcctgatgcaccccgccgccataggccttaaccagaccaccggtgcccagcaggataccaccgtagtaacgcacgacgacagcggttatctcgccgacgccgcttcccatcagctgcgccagcatcggtttacccgccgttcccgccggttcgccatcgtctgaaaaccccagctgttgcgaatcatcaggcggccccgcgacccacgccacgcagtggtggcgggcatcagggtgatccgctctgacggactcgacaaaagcttttgccgccgccacgccgtcggtatgcgccaacagcgtgataaaacggctttttttaatctcctcaacgacggtaaccggcgccgccgggattaaccagctctccatcaggccagcttcagatcgcgcgtcatattttcgatactgttttcgtgaatcaccacgttatcttcgatacggatcccaccgaacggcttcatggcgtcaattttttgccagttaaagtgcttgctgaacgggccttcacgccacggcgccagtaacgactcgatgaagtagatgccgggttcaatagttaacaccatccgcggctcgataatacgggtgcagcgcagatacgggtatttcgacggcgccgccagatgcgtaccggtgtcatcctgcataaaaccagcgacatcatgcacctgcagacccagcggatggccaatcccgtgcggcataaacggcccggtcaggtcattctccaccatcgcctcttcgctcatgtcagtaaccaactggtgtttacgcaacagctttgcgatacgctgatggaactggatatggtaatcaatgtaactggtaccggccttcatggtactaatcagcgcctgctgctcatcgttaacgtctttgatcagatgggcaaagtcgttatcgccgtgcgccgcccaggtgcgcgtcagatctgcggcatagccgttatattccgcaccggcgtcgagcaggaaactgcgcatctccgccggggcacgatggtccagtttggtgtagtgcaggacggaggcatgctcattcagcgcgacaatattgctgtaaggcacgtcggtatcacgatggccggtggcggtgagataggcctggttgatatcgaattcgctcatccccgactggaaagcttcgtaggccgcacgatgaccattcaccgccgacttctgcgcttcacgcatgcaggccagctcgtaatcggttttgtaagcccggtagtaatgcaggtagtcgataacccctttcgggttgatcttatccgcggcgatacccaggcccagcgcgcgctcaggcaccgggccgatatagccaatattaccgcgagcggcaggcagctggctgccgatgccatcggccttcggtagcgcgatcacgtctatctcttcggtccagaaagaggtcggcaacggctcaacgttatgccagtaatctaccggcagatagaaccacagcttcggtttattcacaccgtccaccagcagccagcagttaggcacctgagtcacaggcacccaggctttgaactgcggattgaccttgaacgggtagggatggtcatcaaggaagacgttaaccagctcgccggagtgaatcagcagagcatccatttgaaaacgggccaggacgtcgcgggtacgttcttgtagggtaacaatatgatttttatagagcgcggccagggattccatcttttatcctttgcttttatgggatcgtgatacaccgcatcttagcacatcgacctgcgtgcgggtgatttccgccggatgtgatccgaccagcaattatttaaagagtaatttgcaattctttaacataaattccacactccgtctcatctggtatgaccagatcatattgctggattcaggagactgacatgctctacaaaggcgacaccctgtacctcgactggctggaagatggcatcgccgaactggtgttcgatgccccaggttcggtcaacaagcttgataccgcaaccgtagccagcctcggtcatgcgctggacgtactggaaaaacaaagcgatctcaaaggtctgctgctgcgctctgaaaaagcggcatttatcgtcggcgcggatatcaccgaattcctctcgctgttcctggtccctgaggagcagttaagccagtggctgcattttgctaacagcgtcttcaatcgtctggaagatctccccgtccccactatctctgccgtcaatggctatgcgctgggcggcggctgcgaatgcgtgctggcgaccgattaccgcctggcgacgccggatctgcgcattggactgccggaaaccaagttgggcattatgcccggcttcggcggttccgtgcgtctgccgcgcctgctcggcgccgatagcgcgctggaaattattgccgccgggaaagacgtcggcgccgatcaagcactgaaaatcggcctggtggatggcgtggtcgctgcggaaaaactacgcgacggcgcgctggcgatcctacgtcaggccatgaatggcgacctggactggaaagcgaaacgtcagccgaagctggagccgctgaagctcagcaaaattgaagccgccatgagcttcacgattgccaaaggcatggtcgcgcaaaccgccgggaagcattacccggcgccgatcaccgcggtcaaaaccattgaagccgccgcgcgtcttggtcgtgaagaagccctggtgctggaaaataaaagctttgtcccgctggcccataccaatgaggcccgcgcgctggttggtatcttcctgaacgaccagtacgtcaaagcgaaagcgaaaaagctgaccaaagatgtcgagacgccgaagcatgctgccgtcctgggcgctggcattatgggcggcggtatcgcttaccagtcggcctggaagggcgtgccggtggtgatgaaagacatcagcgacaaatcgctgaccctgggtatgaccgaagcggcgaaactgctgaataaacagctggaacgcggcaaaatcgacggtctgaagctggccggagtgattagcaccattcagccaacgctggaatacagcggttttgaccgcgtggacgtcgtcgttgaagcggtggtggaaaacccgaaagtgaagaaagccgtactagcggaaaccgagacaaaagtgcgcccggataccgtgctggcgtccaacacctcaacgatccccatcagcgagctggccagcgttctgcagcgcccggaaaacttctgcggtatgcacttctttaacccggtgcatcgcatgccgctggttgaagtgatccgcggcgaaaaaacctcggataataccattgccaaagtggtggcctgggccagcaaaatgggcaaaacgccgattgtggtgaatgattgtcccggcttcttcgtcaaccgggtactgttcccctacttcgccggcttcagccagctgctgcgcgacggggcggacttccgcaaagtcgacaaagtgatggagaaacagtttggctggccgatgggcccggcttatctgctggacgtggtcggcatcgataccgcgcaccatgctcaggcggtcatggcggcgggcttcccgcagcggatgcagaaagattatcgcgacgccatcgacgccctgtttgacgccaaccgtttcggccagaagaacggcctcggcttctggcgctataaagacgacagcaaaggtaagccgaagaaagaagaagatgctgccgtcgacagcctgctggccgacgtcagccagtcgaagcgcgatttcagcgatgaagagattatcgcccgcatgatgatccccatggttaacgaagtcgtccgctgcctggaagaaggcattatcgccagcccggcggaagcggatatggcgctggtatacggcctgggcttccctccgttccacggcggcgcattccgctggctggacaccatcggcagcgcgaagtatctcgatatggcgcagcaataccagcaccttggcccgctgtatgaagtgccagccggtctgcgtgacaaagcgcgccataacgaagcgtattatccccaggtagagccagcccgtccggttggcgctctgaaaacggcttaaggagtcacaatggaacaggttgtcattgtcgatgcaattcgcaccccgatgggccgttcgaagggcggcgcatttcgccacgtgcgcgcggaagacctctccgcgcacctgatgcgtagcctgctgtcgcgcaatccgtcgcttgaggcaagcgcgatagacgatatctactggggttgcgtgcagcaaaccctcgagcagggttttaacatcgcccgaaacgcggcgctgctggcggagatcccgcattcggtaccagcaaatacggtcaaccgtctgtgcggttcttccatgcaggcgctgcacgatgcggcccgtatgatcatgaccggcgatgccagcgtctgcctgattggcggcgtcgagcacatgggccatgtgccaatgagccatggcgtcgatttccatccgggcctcagccgcaacgtggcaaaggcggcagggatgatggggctgactgcggagatgctggcgcgtctgcacggtattagccgcgagatgcaggatcagttcgccgcgcgctctcacgctcgtgcctgggccgcaacccagtccggcgcattcaaagcggagattatccccaccggcggccacgatgccgatggcgtactcaagtcctttaactatgacgaggtgatccgcccggaaaccaccgtcgagacgctgtccacgcttaaaccggcgtttgacccggtgaccggtacggtaacggcgggtacctcttccgccctttccgatggcgcagcggcgatgctgctgatgagcgaaagccgcgctcgcgagctggggctgaagccgcgcgctcgcgtccgttcaatggcggtggtcggctgcgacccgtccattatgggttatggcccggttccggcctcaaagctggcgctgaaaaaagcgggcttatccaccagcgatatcgacgtttttgaaatgaatgaagcatttgccgcgcagatcctaccgtgtattaaagatctgggcttaatggagcagatcgatgagaagatcaacctcaacggcggggcgatcgcgctcggtcatccgctgggctgttccggggcgcgtattagcaccacgctgatcaaccagatggagcgcaaagacgctcagttcggcctcgccaccatgtgtatcggcctggggcaagggatcgctaccgtgtttgagcgggtttaagcgaaagggtatctcaacgccattgccaccagaacctggcggctatggcgaagagagcaggtttagttgccgttcttcccgcctgtcaggggcgggtttttttattttcagataaacgcaaacgcatcgccaaacaggcgatcttcacgcgcgccgcgctcattacagaacaggtcgcgagcgatcttggccatctcaaaacgaccagcaatgtagatgtcatgctcggccagcgtaccgtaatcctgcagcacggcggtgagtaccgtaccggagcgaccacgccacccttcttccggctgttcaaccaccggctcgatgcgcagattcggatgcttgatgcttaacgcttccagctcggccagatcgtacagatgcttagcctcgcggccgccccaataaatggcgatatcgcgatccgggttacgcgccagcgcgcttaacagaatagaacgcacataagagaatccggtaccgccggcgatcagaatcagcgggcgatcttcgtcatcgcgcagccacgcttcgccatgcggaatatcaacctcaatttcacgctctttcagaatgcgatccatgaccgccatcgcgtacagattgagctccgaggcgccgatatgcagctcgataaattcctgttccgccggcgtggaagccatggagaacgggcgcttgtcgcgctcatccattaccaccatcagatactggccggcacggaaggaaaatgccgcttccggcactaatcgaacacgatatacggtatcggtaatcgcctccaccgaggtcactttacagcttaaggttgtcatgcgtcccctctgtcgggtcaatagagcaaaacagcggcgttagccccgcttactgttgtttaaagatggccagttcatcccagatggcgtcaatacgcgccgtaacggcaggatcttttttgattgggcgaccccattcacgctgggtttcgccaggccatttgttggtggcatccagccccatttttgaacccaggccggaaaccggcgaggcaaaatccagataatcaattggcgtattctctaccagtaccgtatcacgagccgggtccatacgggtagtgatcgcccaaatcacatcgttccagtcgcgtgcattgacgtcgtcatcgcagacaatcacgaacttggtgtacataaactggcgcaggaacgaccagacgcccatcattacgcgcttggcatgtcccgcgtactgttttttcatggtcaccaccgccaggcgataggagcacccttccggcggcagatagaaatcaacgatttccgggaactgcttttgcaggatcggcacaaagacttcattcagcgccacgcccagcaccgctggctcatcgggcggtcggccggtataggtagaatgataaatcgcgtcttcacgctgggtaatatgggttaccgtaaataccgggaagctgtccacttcattatagtaaccggtgtgatcgccatacgggccttccggcgccatttcaccggcctcaatgtagccttcaagcacaatttccgcgctggccggcacttcaaggtcattggaaacgcacttaaccacttcggtcttggtgccgcgcagcaggcctgcgaaagcatattccgacagggtatcgggcaccggcgtcaccgcgccaagaatggttgccggatcggcgccaagcgccacggaaaccgggaagcgttcgcccggacgcgccgcgcaccactcctggaaatccagcgcgccgccgcgatgagacagccagcgcataatcagtttgtttttgccgatcagctgctggcgataaatccccaggttctgccgctctttgtgcggcccgcgggttaccgtcaacccccaggtgatcagcggcgcggcatcttccggccagcaggtcataatcgggattttattcaggtcgacatcatcgccctggatgattttttgctgacagggggcgccgcgcaggcgtttggtcggcatattcagcacttgcttgaactgcggcagcttatcaaacaggtcgcggaagccttttggcggctcaggttctttcagaaaggccaacagtttacccacctcgcgcagcgaactgacatcctcctgccccatccccaacgccacgcgacgcggcgtgccgaacagattgcacagcaccggcatggtgtagcctttcggattctcaaacagcagcgccgggccgccggcgcgcagagtccggtcggcaatttcggtgatttccaggtgaggatcgaccggcagagtgatacgttttagttcgccctgttgttccaggagtgtcagaaagtcgcgaagatcgtgatatttcatggaagtgttattgacctctctacaggcggctaattatacggtgttcgacggcgcgatgctgtaattttgttaaattagcgtgaaagaacgctgaaatttggatttcaattataatggctttcgcgattacaccagccatttgttatgcttgccgttattagaagtggaatgagtcattatgcaagcctggtacttactgtattgcaaacgtgggcagctacaacgagcccaggaacatctggaacgtcagtcagttaactgcctgatgccgacgattgcgctggaaaaaatcattcgcggtaaacgcaccatggtcagcgaaccgttgttcccgaactacctgtttattgagttcgatccagaggtgattcataccaccaccatcagcgccactcgcggggttaacaacttcgtgcgctttggcgccctacccgctatcgtcccctcggcggtcatccatcagctttctatctacaaaccggaagggattaccgacccggaaacgccgcatgagggcgatagcgtgctaatcaccgacggcgcgtttgaaggcctggaggcgatcttcaccgagcccgacggcgaagcgcgctctatgttgctgttaaacctgctgaataagcaagtcctgcagagcgttaaaaataccgacttccagaaaatctaaacgccgttaatgtcgacgccaaacagcgccctgacgtttgcgtccgtttgcgcctccagccattgcgcctcctcgccgcgccaggccgcgacgctggccaggatatgcggcaaatacgcgggctcgttacgccgcgaggccggtttcggcttgagatcgcgcggcagcagataaggcgcatcggtctccagcagcagacgttccgccgggatcgccggcagcagctcgcgcagctccagtccccgccgctcatcgcatacccaaccggtaataccgataaacaggcccagatccaggcattcctgcacctcgctgcggctgccggtaaagcagtgcagcaccgcgcccgggatcttctcaagccagggtttaagcagcgtcagaaaccgatcgtgggcgtcgcggcagtgcaaaaacaccggcatcgacagctcagcggccagcgccaactgggcgctgaacgctacctcctgctcgtgcggcgtggaaaaattccggttaaaatccagaccgcactcgcctatcgccaccacctgcggctcgccggcgagggtataaatcgcctcggcgaccgctggcgtccagctgctaccgtcatggggatgaacccccgccgtggaccagcagccggaatagcggctcgccagtttctgcgcctgctggctctccgccaaatttgtgccggtcagcagcatgccgttaacccccgccgccagggcgcgcgccactacctcatcatgatcgcgggaaaactgcgaactggtcagattaacgccgatatcaaacatgatcgctcccatatgccaaccgccctgacgggcggttggcggtattactcttctctgtgctctgcggcttcagcttcggccgcggcgtcgtcatcgcgcgtcaggcgcttcccggtgtagaagcgggcgaagaacaccccgacttcaaacagacagtacatcggaatggccagcagcgtctgcgagaatacgtccggcggcgtcagcagcatgcccaccacgaaggcgcccaccagcacatacggcctttttttacgcaagtcttccggcgtggtaacgcccatccagcagagcaacacaatggcgaccggcacctcaaaggagaccccgaatgccataaacagcgccatcacgaagtcgagatagctgcgaatatcggtcgagaccagcaccccttccggcgccgcatgggtcaggaagccgaacgccagcggaaacacgacaaaataggcgaaagccatgccgatatagaacagcagggtactggataccagtaaaggcaccaccagccggcgttcgtgcttatacaacgccggcgcgacgaaggcccatacctggtaaagaataatcggcaccgacaggatcaccgacaccatgaaggtcaactttatcggcgtaaagaaaggtgaagcgacatcggtggcgatcatcgtcgcgcccactggcatcttactgataagcggggccgagaccagctggtagatatcattggcgaaatagaccagcgccaggaagatcaccagaatagcaatgatgctgttgagcagacgcttgcgcagctcaatcagatgcgaaattagcggttgtgtatcgtctacgcccatgtttacggtttatcactcgatgcgggggaagaatggggaactgccgccgtagcggacgttttctctgcctgaaggtcagccggtgaagcagattgctcgtcggcaacgggatctggcgcatgagccggagcgctggcctgatgttctgccgtcgccggcgtgacgtcctggcgctgcgcttcgctgcctttgaccaccggattaaggatggtattggcttcgtcgctggctttttcgggatcgtgggcgctataggagcgcttcatcgactccgcggcctcgcgcagttcatccatcgaggctttcagctccggcgtcaggttattcaggctagccttttccaccttcttcaggctctcctggaactcctgcagttttagctcctgggccagctcattttgtaccgtggtcgccagcgagcgtaacgtacggatccagccaactaccgttttaaccgctacgggaagccgctgtggccccagaacaatgaggccaatcacaaacaccagcagtagttcactaaaaccaatatcgaacacgagttacacctgctctttgtcgtggcgttttgtctcgtctttttttgcatcatcctgtttatcggcgatggttttcgccgtgaaatctgcgtctggcgccgacttttcgggtttatcatcatcactcatggcttttttaaagcctttgatagatgcccctaagtcagaccccagcgagctcagcttcttcgtcccaaaaagcagaactacgatgacgacaacaattaataactgccaaatactgataccacccatacacgttcccctatgacagatgatgaattgtgtggacgcattatacacgccatcctgcgagccgcctcttcgtcaggccgccgacatgattttgcgcaaataagcctgcgtcatgaagaggcgaaccgatcagtgggttttccgccagccaataagccaggtcaccacaccgccggccatcagccaaccgggcatcattccccactcagggcgatggataaagagcagcgtaccactgagcaataaaaccgcgcctataccaaacaggtaacgggattggccctggcgcacatgacgcacatgcatatcccgcacaatagtatcgacgctggtctgcagctgtttgctctgctgcaggctctgatacaccagctcaggtatttccggcattctttcgatccagaatggcgctttgtctttaaacgcgcgcaccagcgccggaatgccgacctgatctttgatccacgactcgaggaaaggcttcgccgttttccacaagtctaactgaggatagagctgccggcctaccccttctacgtaaagtaatgtcttctgtagtaaaacgagctgcggctggacttccatattgaaacgccgcgcggtattgaacagattaagcagcacgtggccgaaggagatctccgccagcggcttctcaaagatcggctcgcagaccgtgcggatcgcgaactcaaactcttcaacgttggtatcgggcggaacccaaccggaatcgacgtgcagctcggcaactttacgataatcgcggttgaaaaaggcgataaagttttccgccagatagcgcttatcttctttgttcagtgagccgacaataccgcagtcgatgccgatatactgcggatcttccggatgctcgtagctgacgaatatgttgccaggatgcatatcggcatggaagaagctgtcgcggaacacctgggtgaagaagacctgcacgccccgctccgccagcagctgcatattggtgccctgggcctccagcgcctccacatcggacaccgggataccgtaaatgcgctccattaccatcatgctttcgctgcagtagtcggggtacacctccggcacgtacagcatcgggctgtcttcgaaattacgccgcagctgaatagcgttggcggattcccgcagcaggttcagctcatccagcagcgttttttcatattcacgaactacctcctgcgggcgcagacgacgaccgtcaggcagcagacgcggtacccagcgcgccaggcggtagatgagcttcatgtccgctttaatgatcggcaaaatatccgggcggataaccttgatcaccacctctttgccattctctttcagacgcgcggtatgcacctgggcgatggacgccgaggctaacggctcaacggagaaatcatcaaaccaggtctcgaccggcagcccccccatcgctttctctatctgctgctgcgcgagcttcccttcaaagggcgccacgcggtcctgcaacagcgccagctgatcggcaatatgcggcggaaagagatcccggcgggtggaaagcatctggccgaattttatccacaccggccccagctcctggagcgccagccgaaggcgggcgccaagaggctgatcctgatggcggtttggcatccagaacagcatccgccgccagatacgcagcggcagcgtgatccgcattttggggatgagctcatcgagcccgtagctcaaaaaggtgtgaatgatgaaatacaggcgccgtaattctcctggcgtcatttgccctccagcgtttccagccgtttttccagtgcggccagcgcgcgctcaatagccgttgtctcttcagcaaaccaggccagctccagcggccccggcgccaggcgccactcttcagtgatcgcttccgcgacatagcgctgctggcgctctgcgcccttcagcagaaactgagcgccgccgcgcaggactttaccgacgccttcggccacaatatcgccggtatagggcgccagcagttcagcgggatcaaactctgccaggtcgcacagggagaccatattctgcaccacctgcagatcgccctgcacttccagatcaccgctgcgaataagcgccgtgagctgctgacgattgcgcagttttggcagcacgctgagccgggtaatcacggtgcaatcggcctctccgtcccaggcgctcaggacgtcaacctggcgttcgctgaataccagcaccacgggcgtggcgaaatcctgcagctggacccgcaataccttgcccagcaggcgctggcgagcgggtttaagcgctttgtcgcgccagaggaaagtattcagcgccgtttcaatgccagcggtaaccaggggtgtgaaaggcatagcgtccctcctgtcagaacttgtaaccgcgatgcaaagcaacgatacccgccgtcaggttgtagtaatccacgttttcgaagcccgcatcctgcatcatccctttcagggtttcctggtccggatgcatacgaatagattccgccaggtagcgataactgtcgccatcttttgccaccagctcgcccaccttcggcaggatatggaaggagtaagcgtcgtaggctttgctcagcggttcgataatgggtttagaaaactccagcaccagcagacgtccgcccggcttcagcacgcggtacatcgaacgcagcgctttctctttgtcggtcacgttacgcagaccgaaagagatggtgatgcagtcaaaggtattatcagcaaaaggcagggcttccgcgttggcctgaacatactcaacgttgcctacgatgccgatattgcgcagcttttcgcggcccattttgagcatagaatcattgatatcagcaagcatgacgcggccggtttcccctaccaggcgggagaacttggccgtcaaatcaccggtaccaccagccagatccagcacggtctgcccgcgacgtacgccgctgcagtcgatggtgaaacgcttccacaaacgatggatcccaaacgacatcaagtcgttcatcacatcatattttgcggcgacagaatggaatacatgcgccaccatatctgctttctgctctttagcgaccgtctgaaagccaaagtgcgtcgtttcttgtgaatcctcaaccatctctatgcctgcttgcttttcaagaaaatgttcactgagtgtatcagactcagcgcatttcccatacgtttcagcgtggcggagccgcctcccggctacgcaccgtctcggcagagtcgggtgaaaatgcgtcattttccggcaggttatcctcatcttcgagacgatattgctcgtcctgagccgtagcttgttcgactaaatcaggattaatcccgcgcttgacctccacgcccaggccgcgaaaggcctccgcctgggccagcagattaccacgcccggaagcgagctttttcatcgcctggcgatagctctcttgcgccttatccaggctctggccgatggcggacatatcatccacaaacaggcgcattttgtcgtaaaggcgccccgcccgctcggcaatcttctgcgcgttacgactctggtgctcatagcgccacagattggcgatagtacgcagggctaccagcagcgtcgtcgggctaaccagcataatattattttgcagcgcctcgctgatgagctcaggctggcgatcgatggccagcaggaacgccggctcaacgggaataaacatcagcacatagtcgagcgagcgcaggccaggcagctgttgataatccttgcgtcccagcaggcgaatatggtttcgcaccgaggcaaggtgttcctgcagcgcgacttcgcgggtgtagtcgtcttcggcgttgaaatagcgctcataggcgaccagggtcattttggcgtcgatcaccacgtccttaccctgcggcaggcgcacgataacgtccggctgcatccgcgagcggttgtcggtctcaatactgacctgagtctggtactcatagccttcgcgcaggccggaggcctccagcacgcgggttaagaccacttccccccagttgccctgagttttgttatcccccttcagcgctttggtcaggttcagcgcctcctgtgccatctgcgcgttcaactgctgcagattgcggatctcatgcgccagggtatgtctttcacgcgcctcctggccaaagctctcctgcacctggcggcggaacccgtccagctgttcgcgtagcggcgtcagcaggccatgcaggctctggcggttttgctcatcgacccgccggttgctgtgttcgaaaatacggttggcgaggttttcaaactgctcgctaaggcgctgctcgctgttcatcatctggcggatcttatcttccgcatgcagctgggtggattcgagccgggtggtgacctcacggagatcggcctcgagcgaggtattgatatcccgtaggctgcgcagctcgttgttcagcagctcacactcctcacgccagtgggcctcctgcgccagttgctggcgggcggcgctcagctcaatatccaactctcgccgttcctcgatgagatcggcccgaatttgatcggcacgcgctttggtcgccagccagccgaccattaacccggctgccagtgcgataaccgcgctgataataatggagagatccacgacgccccctgcgataacctgatgacacaaaatagaattgtgctgtacaaacgtccagtttaaaaggaatttcctgcgagaggcgacgcaaaaaagaaaggccggaggatccggcctgacagggaaagagttgaattacagcagacgacgcgccgcttccacgacgattttcaccgcgtggctttcggtttgcttcatggtttcggcgttagggatctcttgctgggtacggttcacgataaccccagccaccatcccggcgcgcaggccctggctggcgcacatggtcagcagcgtggcggattccatttcatagttcatcacgcccattgcctgccactcttccattgagcccttgaagcggctcacgacgcggccggagaaggtgtcgtaacgctcctggcccgggtagaaggtatccgaggaagcggttacgccgatatgggtggtcgcgccgattgatttcgccgcttccaccagcgcggtggtgcaggcgaagtctgcgacggccgggaattccatcggcgcgaagtgcaggctggcgccgtccagacgaacggaggcggtagtcaccaacacatcgccaacgttgatgtgcggttgaatcgcacctgtggtgccgatacgcaggaaggtacgcacccccagctgcgccagctcttccacggcgatggaagtcgacgggccgccgatgccggtagagcagacgatcactggtttgccgtccagctccgcgcgccaggaggtaaattcgcggtgagatgccagtttaaccggcttatccatcagcgcggcgatcttttccacacgctccggatcgccagggacgatagccagcgtagccccttgtaaatcgttcttggtgaggccgagatgaaaaacatcagacttggacataaaaaactcctctgtgggtcgaattatcagcagaagcaaaacggtactgtacagaagcccctggcaacattttgtgatgatagtcaccaagaccaataatggttgcagttgtttttcagtaaatagtgatacacatcacattaacaagttatattcatcatcacagaacaaaagatagccgctttcaggcactgtgctttattaccgcccgaactaaaggtaaagggtctatagttactgatgcgctaataaataagggtacggagaataccatgaccaccaccaagcaacctggattcgcacctgcagcttcaccacacgccgcaaccgccgttcatacgccggaagagcatattatcgccggagagacgtcgattccctctcagggtgaaaacatgccggcctaccacgcccgcccgaaaaatgccgacggtccgctgccgatcgttatcgtggtacaggaaattttcggcgtgcatgaacatattcgcgatctttgtcgccgcctggcacaggaaggctatctggctatcgcgcctgaattgtacttccgtcagggcgatccgaatgagtaccacgatatcccgaccctgttcaaagagctggtcagcaaggtgccggacgcgcaggtgctggcggatctcgaccacgtcgccagctgggcggcgcgccacggcggcgatgcccatcgtctgctgatcaccggcttctgctggggcggacgcattacctggctgtatgccgcgcataacccgcagcttaaagcggcagtggcctggtacggtaagctggtgggagaaaaatcactgaattcgccgaagcacccggtagatatcgccgtcgatctcaacgccccggtgcttggtctgtacggcgctaaagacgccagcattccgcaggacaccgtcgagactatgcgtcaggcgctgcgggcagccaacgccacggcggaaatcgtggtctatcccgaagccgatcatgcctttaacgccgactatcgcgccagctatcatgaagagtcagccaaagacggctggcagcggatgctcgcctggtttgctcagtatggcggtaaaaaagggtaatcgccctaagcatgaaaaaaggaggcaaatgcctcctttttgatttttcgcgtaacgattaggcggactggcgcagatttcgcgccgcttgcaccatattcgccagcgcggcgcgggtttccggccagccgcgagttttcaggccgcagtccgggttaacccacagtcgctccaccgggatacgctgcgcagctttcttcagcagcgcttcgatccactccacgctcggcacgtttggcgagtgaatatcatatactcccggcccgatctcattggggtactcgaacgcttcgaacgactccagcagctccatatcggaccgcgaggtttcaatggtgatcacgtcagcgtccagcgcggcaatggagtccatgatgtcattgaactcgcaatagcacatgtgagtatggatctgcgtgtcgtctttggcgaccgcagcattaaggcggaaggcttccacaccccactgcagataggcatcccagtcgctgcgcttcagcggtaacccttcgcgcagcgccggctcatcaatctggatgatgccgatccccgccgcctccagatccgccacttcatcacgcagggccagcgcaatctgtttcgcgatggtttcacggctgacatcctcccgcgggaaggaccagcacagaatggtcaccggtccagtgagcatccctttcaccggcttgtcggtcagcgactgcgcatacttcgcccagtcgacggtgatcgcctgcggacggctgacgtcgccgatcaccaccggcggcttcacgcagcgggaaccatagctctgcacccagccgttttgcgtgaagataaaaccgtccagatgttcgccgaagtattccaccatgtcgttccgctcggcctccccgtgcaccagtacgtctaaacctaaccgctcctgctcgacgatcgcctgcttaatatgttccgcaatccccgtccgataatgactggcgtcaaggttaccctttttgaagtccaggcgcaggccgcggatctcggtcgtttgcgggaatgacccgatggtggtggtcggccatttcggcaggttaaagcgctggcgctgtgcctgcgcgcgaacctcataggggctggcgcgctggctgtcctgagcagtgatcgccgccagccgtttttccacctccgcgttgtgcacgcgggtcgaatggcgacgggcctggattggcgcgctccactcggtaatcgccgctgtatcgccgctgttcagcgcatcgcgcagcagcgccagctcaccgcatttctgcagcgcgaaggcaaaccagctcttcacttccgcatcaaggcgcgtctccacgcttagatcgatcgggctatgcagcagagagcaggatgacgcgacccatagctcgcgcttaccgacgaggtctttaatttgcgcatacttttcggtgagatcggcgcgccagacgttacgcccattgatcaagcccgcggacagcagccagtcggccggcaggcggttgtgcagttcggcaacatcatctttgccgtgcaccagatcgacgtgcagcccctggaccggtagcgcagcaatggtcgcgagattgtcgctaacgccttcaaaataggtagtcagcagcagcttcacctggccctgcagggcgtcataagccggttgaaaggcctccagccacgctggcggcagctccagcaccagcgccggttcatcaatctgcacccaatcgatgccgcgcttcgccagttcggccagcacctgctggtaaaccggcaggatggtattcagcagggtcaggcggtcaaacggttcacctttcactttacccagccacagataggttaccggccccagcagcacgggcttgatcttgtggcccagcgccagcgcttcgtctacttcatccagcagttgggtccagctcagtttgaactgctggcccttcacgaactccggcaccatatagtgatagttggtgttgaaccatttggtcatttccgcagcggcggccggttcgccagtcggcgcgcggccgcggccaatgcggaacagggtatcgatgtcgatggatccgtctttgttctgatgacgagccggcacgttgccaagcagcaggctggtagtcagaacatggtcgtaccaggcgaaatcccccaccggcagcagatcaacgcccgcctgtttctgctgctcccagtgacgggcgcgcagctcacggcctaccgccagcagttcctcgcgagtggcgttgcccgcccagtagctctcttgcgcttttttcagctcgcggcgcaggccaacgcgaggaaaaccgagggtgtggttaataattgtcatttatgttcctctcttatttcattgaatctgaagaaaaaatctcaatagttcggcttgcaggaaggcggcaacgatgcgcatccccaggagcttactgaaggaagtgactggggtaagcaaggcagccaacgcatctgcaagtcgaaatatgacgagttttagacgtccagatgtttacacatccataattgacagttactgtatattcctcaagcgcaaattgctcatggcgaagtgaaggactttcatgatcgaaattaaacatctgaaaacgctgcaagcgttgcggaacagcggttcactggcgggtgcggcagcggccctgcaccagacccagtccgccttgtctcaccagttcagcgatctggaacagcgccttggctttcgtctctttgtgcgtaagagccagccgctgcgttttacgcctcagggggaaatcctcttacagctggccaaccaggtgctgccgcagatcgctcgcgccctgcaggactgtaacgaaccacagcagacccggctgaggctggctatcgaatgtcacagctgtattcagtggctgacgccggcgctggagaatttccgcgcccgctggccacatgtggaggtcgacttccattccggcgtcaccttcgacccacagcctgcgctgcagcagggtgaactggatctggtgatgacctccgatattctgccgcgcagcggcctgcactactcgccgatgtttgattttgaggtgcgtctggtgctggcgcccgagcatccgttagctatgaagacgctggttaccccggaggatctggccgcggaaacgctgttgatttatcccgtgcagcgcgggcgcctcgatatctggcgccacttcctgcagccggccggcatcagcccgcagctgaaaagcgtcgataacacgctgttgttgatccagatggtggctgcccggatgggcatcgccgcgctgccgcactgggtggtggaaagctttgaacgccagggcctggtggtcaccaaaaccctgggtgaggggttatggagccggttgtacgcggccgttcgcgatggcgaacagcgtcaaccggtcaccgaagcgtttattcgctctgcgcggaaccacgcctgcgatcatctgccgtttgtccggagtgcggagcgacccagcggcgatggacccacagcgaggccaggatcaccaacgctccgctaataaagctcggccagtgcggctgctcctgccagatggcaaggttaaccagcagcccggcggggacatggacgttattcatgatccccagcgtgccggcatccacctgggtggcgccatagttccacataaagtaacccagcccggaagccaccacgccgagccacaccagcacgctccactgcagcgtggtggtcggcagcttctgggcgttgccgagcataaaccacgccgccaccgccacgataaaggccccgacatagaaccaggcaaaggcattgtgctgcggcatcggacgcacctccatcagacgcttataccccaccataccgatggcgaagcagaggtttgacagctgtaccagtaacagcccggtccagaaatgatcgctgactttgtcatagcggataatcgccgcccccagcaccgccagcgcggcactcagcagatagccccagcgcagcttacgtccgctgagcaggtcgtagatcagcgtgatatacaggggagtaaacacggtaaacagcagaaattccgagaccgtcagatagatataggcgcggaaagccagcaggtacatgatgcctagctgcatcgcgcccaccagcatatagagcacgatcgtgcgcggagactggccgcgcgtgcgcaggaaaggcaggaacaccagcgccgccaggcccacgcgcatcagcaccgaaaaatagctgtcgacgctaccggccaggtattcgccaatcaggctaaaagaaaaggcccacaggatagtggtgataattaacagcgccacaatggtcgtctcgttggataaagaacaggcattgtagcgaagagtcaggttgacgactggacgcttattcgccagtcgtcaatctttttcagtcgaggtatagcttacgcaggtagtgcgggacagcatcgtcggcgttactgccgatcacttccagttccggatgcagatccttcagccgctggtgggcgttggccatgatgcagcctttgccagccatcgacagcatctcagcgtcgttcataccgtcgccgaaggcgatgcaatcggaaagagtgtagccgagcatcttcgccaccgcctccagcgcatgccccttcgataccccacccgccatgacttccaggcaggttaaggtggagaagctgacgttcacccgatcgccccagcgggcgttcatcgcctgctccagcggcagcagatgctcatgatcctcgcaggtaaagaatactttgctgatcccctgcggatccagttcgcccggctcatacagcttgtagttaaacaccgcctccttgaagaagcgcatctcttccggacgatggcggttcatataccactcgtcttcccgataaacgttagtgacgattttcgggtcgttacgcacgatctcaaacaggtcggcggcaatatcgcgatcgaggttatgggcaaagatttgctgaccatcgctatcgtgaacgcgggcgccgttagaggtgatcatgtacgaccggatgccgagattatcgcggatttgcccgacgtcgatgtagtgacggccggtggcgaagacgaaattgatcccacgggcggtaagcagcttcagcgtctctttggcatacggggtcaggaaatgatcgggggaaagcagcgtgccgtctaaatcagacgcaacaacctggtacataaaaaagttaacctctaagcagggcgacgagcgttatcgtcggattaagtatgtcgattgaaaaactcgacgatggcattgagcgcgactgagcgcatagcgtccttttcaaaaaggatctcatgatatgccccttcaatgacgagcggcttaccgccctcacagggatggccggcagcggcccgtaattcgcaatagcggtcgtgcatcagattatcgaccacccgctcctcctccgcctgtaaaagcagcgtcggggcggtatctttttccacattcgccagcacttcgtcgccggccagcatgccctcacgcacccagtgccaggtcggaccgccgacctgcagccgcggctcatcggcatagaagcgcaggttgcgacgatagcgttgccgactgtgcgtcagcacgttaacggcaaaaggcagcgcccgccagcgcccggtgccgatggcatactcttcgcgaatgcgctgatggccctcagcccagtcgagaatatggcgcaccatccagtccggcagccgaatgataatcccgaacatcggcgcgcagagcgctattgcatcgcaatgcgcccggtaacgttgcagaaaaagcgtggcaatcgctccgcccatagaatgagcaaggataaaccgttttcgccagtgtccaggaaccacctgctgctgccagagcgcggccaggtcatcaacatagtcgctgaagttaaccacgtgtccgcggtgggtatctgagagcaggcggcccgagcgtccctgcccgcgatggtcaatgatcatcacgtcaaagccgcagtgaaagagatcgtaggccacttcagcatacttcacgtagctttcaatgcgcccggggcaaatcaacaccagacgatcgttatgttgcgcgcaaaagcggacaaagcgtaccggtacatcgtcgacgcctttaaattcagcttcttcgcgctgtcgccagaaatccgtcagcggccccatgctaaaggccgcaaacgcgttttctcgtgtttcccagtcctttttctgcccaaacatcgggtttacacccctgttaaccgctgaaaatcgtttttttaccgtgtatcacacaatgctgacacaatagcgtattgtggcataaaaacagacaatcagggagtttctcatgaccattgagtggtggttcgcctacctgctgacatcaattattctcagcctgtcgccgggttccggagcgattaataccatgaccacctccattaaccacggataccgcggcgcggcggcgtcgattgccggtttgcagaccgggctggccattcatatcgtgctggttggcgttggtctcggcactctcttctcccgctcggtgctggcctttgaggtgctaaaatgggccggcgccgcctacctgatctggctgggtatccagcaatggcgggcggcaggggcgatcgacctgaatacgctggcgaaggcgcagacgcgcggcaaactgttccagcgcgcggtgttcgtaaatctcaccaatcccaaaagcattgtttttctggccgccctgtttccgcagtttatcctgccgcaccagccgcaggtgatgcaatatctcgttctgggcgtcaccaccatcgtcgtcgatatcattgtgatgattggctatgcgaccctggcgcagcgcatttccgcatggatcaaagggccaaagcagatgaaggcgttgaacaaagtctttggttcactgtttatgctagtcggggcgctgctcgcctccgcccgccatgcctgaatcatggaatctcgctcgcaaagagaggctcgccaggtgaacgacgctttctctctgcgcgagccggcgcgcaaagtgggtaattaatttttttgcccgctgtcggcgctgaacccgccgtgccaggatgccgccagatacgtgattcacggatgaacggcaatggcggaaacggcgacccctcatgatgcgatatttaaaacttttctctcacgggtagagacggcgcgcgattttatcgagctccacctgcctccgtcgttaacacagatctgcaaactggacaccctgcgtctggaatccggcagctttctcgaagacgatctcaggccttactacagcgatatcctttattcgctggaaaccacccgcggttcgggctatgtccatgttctgatcgagcaccagagcgcacccgataagctgatggcctttcgcttaatgcgctatgccatcgccgccatgcagcggcacctggagagcggccataaaacgctgcctctggttatccctattctcttctatcagggacgacgcagcccctatccctggtcgatgcgctggctggataattttgccgatcctgagaccgccagccagctgtatagcggggcgtttccgctggtcgatatcacggtgatccccgacgacgacatcatgcagcaccgcagcatggcagccctgacgctggtgcaaaagcacatccgccagcgcgatatggcgcaattgctggataagttgacccacctcttaatgctggagcagatgagcggacaacaaatcaccgtattggtaaactatatggctcaggcaggggatgccgaagatactcggacactcttgtacgggctggcacagcgcgtgccgcagcatggaggattactgatgacgctggcggaaacatggcttgcagaaggtatggagaaaggcatcagggaaggcgtacagcaaggcataaaagaagggaaacaccaggctctggtgcaggttgccgaagcgatgcgcagtcgcggtattgatgaccaggcgattatggaaatgaccggtctgtctgaagacgagctgcagcggcttcgccactgatactttcccacccggaaacaaccgggtgggaaacagcatgccggttaacgcgagataatcaggtggatgccgaagcccgcaaacagcgtaccggcgataccgtcgatccacttcgccatccgctgatagccgcggcgcatccccggcagggcgaacaggctggcaaccaccataaaccaggccagcgtctcaacgataatcagcaggaaaatgccccagcgcgcgccggcgccgacgctgtcacccacgaacagcgaaaacaccgagccgaagtagataattgctttcggattcgccagattggtcagcaatcccttcacgaagctgcgtccgctgcgggccagctccacctgcggctccgccgaggccaccttctcttttttcagcgcgccacgcagcatctggtagcccatccagcatagatacaggcccccgccgaccataataatgttatgcagccacgccatccgggcgaggatcaggttcaggccgagcagcgccactcccgcccagaccatgacgccgcaggtgatccccagcacacccatcattgcctctctgcgcgagcggctgatggccgtttgtgagacaaagaaaaagtccggccccgggctcatcagcgcaatgatatgcaccagcgccacggtgaggaaaagcatcagcatagttaacccgcaggaaaataataaagagagaaactattctggcactttttcagccagctgactactcatcgtcgccatcaacatgcgcccggatcagcgccataaacggcttcccgaaacgctcgagcttgcgtgtccccacgccgttgacgctgagcatctcgccggcggtcagcggcgattgttcggccatctcgataagcgtcgcgtcgttgaagaccacatatggcgggatgttctcttcgtcggcgatcgctttacgtaatttgcgcagcttggcgaacagtttacggtcgtaattgccgccaaaggatttctgcatcgcctttggcttcagcgccacgatacgcggcacggcgagctgcagcggcacttcgccacgcagcaccggtcgcgcggcttcggtcagctgcagcgcggagtgctgggcgatattctgcgtcaccagcccaaggtggatcagctggcggatcacgctcacccagtgctcgtgactttgctcccggccgataccgtaaaccggcagcttatcgtggcccatctctcggatgcgctggttgttggccccgcgcaggacctccaccacgtaacccattccgaaacgttgattgacccggtaaatcgttgaaagcgccttgcgggcgtccattaagccatcgtactgctttggcgggtcaagacagatatcgcagttgccgcacggctcctgacgcccttcgccaaaatagttcagcagcaccagacggcgacaggtctgcgcttcggcaaacgcccccatcgcattcagcttatgccgttcgatatcctgtagcggcccggcgggtttttcttccagacagcggcgcagccacgccatatccgccggatcgtaaaacagcatcgcttccgccggcagaccatcacgcccggcgcggccggtctcctgatagtaggattctatattgcgcggaatatcaaaatgcaccacaaagcggacgttcggcttgttaatgcccatcccgaaggccaccgtcgccaccacgatctgcagatcgtcgcgctggaatttctcctgcacctcggcgcgcacgtcgttttccagaccggcatggtaagccgccgcgctaataccgcggctttgcagcctggcggcggtgtcttccactttcgaacggctgttgcagtagataatgcccgatttgccgcgctgatcctgaacgtagcgcatcagctgatcgagcggcttgaatttctccatcagcatatagcggatgtttggccggtcgaagctgctgacctgaatcagcggatcgttaagccccagcaggcggacgatatcgcggcgggtggtatcatcggcggtggcggtcaacgccataaacgggatctgcggcatccgctgacgcagctggcccagcgcggcatattccggacggaagtcatggccccactgcgagatacagtgcgcctcgtctaccgccagcatcgccaggttccagttcgccagatgctcaagaaagttatccagcatcagccgttccggcgcgatatacagcagacgaacctgcccgctgcggcagccggccatcacctcctgctgctgctcgcggctttgcgtcgagttcagacaagccgccgccacgccgttggccagcagctgatcgacctggtccttcatcagcgagatcagcggtgagaccacgaccgtcagaccgcccatgaccagcgccggcacctgatagcacagcgacttgccgccaccggtcggcatgaccaccaggcagtcccggccttcgagcgccgtctcgataatcgtttcctggccaggacggaactgctggtagccgaaggtctcttgtaaaacctgcttagccagcgattcctgatttaatacttccgcctgtgccacgttgaccccatttgcctgaaaagaaaacaggcgctattttcagcgcctgcgagccagagtgcaacgattaaaacagatcgttgagcattagcccgacgccgacgcgcgtttggttaaagttatagtcgataagcgactcgccatagccgctgtagatctgcgtataggcgcgaacatgtttggtaatgggatagctcacgccaagttccgccccgccgtagccggtgttccagttgtattgcccctgcgcgctgaggatcgcctctcccagctggtagcccaccttcagccggtaatagcccatatatttggtgatatccgggttatcatcggtgttgcccaccacataccagggcttcacttccaccagccagttaccgttttgcgccatcaggcgggcataaagccgattccagctgcgcgaggtggggtcggaacgcccattcgagtcgtggttataccccatctcgatatcgcgcagcgtccagccggcaaactggtagtcggtcgcaaagcccaaaaacagctggggttcataattggtttcgcgaaacggcgccgactctttgctgttagagagctgccaccaggatttctgggtataggacgcgcccagcagcgaattatcgcccaggataccgcgccacagcgggaacgccaggcttagctgaaacttcacttcatctttacgggcattttcggcccagtcatagctgcggatcgcctctttattgaggtcgctggtccacgtatagagcagatagttgctctcataagggtagagcaggaaaggattatcatggtcctggagcaggttggcgataatgctgccgcgcactgccggtttgtcgtgtaccgacgcgtcctgcgccataacaccggccggtagcgcgcacagcgccaccaggcaggccaaagagatacgcatgctggtctcctgaaaaatagtttttatttttgtttaacctgaagccattctacctgtttattaatcacctgccccctaatccgctccgaaagtggaaatcaatattttagaagcataaaatcaacattttattaacgaatggaaccggtgttatgtctgaacttactgccgaagcagccctgaaactggtaggggagattttcgtctatcacatgccgtttaaccgcgccctcggtctcgaactggaacgctacgaaaaagcgtttgcccagcttagctttaataatcagccgatgatggtcggcaactgggcgcaaagcattctgcatggcggggtgatcgcctccgcgctggacgttgccgctggcctggtctgcgtcggcagtacccttacccgccatgacaccatcaacgaagaagagttgcgccagcggctttcccgtatgggaaccatcgacctgcgcgtggactacctgcgtccgggccgcggcgaacgatttaccgccaccagcaccctgctgcgcgccggcaataaagtggcggttgcccgcgtggaactgcataacgaagctcaggtctatattgccagcgcaacggccacctatatggtgggttgattggccaaaatcgagtaacatcactctctttggcaatggattttaccgatggatgcgaaacagacgcggttggggatcattctggccctcgccgcctactttatctggggtatcgcgccagcgtacttcaaacttatctactatgttcccgccgatgaaattttgacccatcgcgtgatctggtctttcttcttcatggtggcgctcatcagcgtcagccgccagtggccacaggtgaaaaagctgctgaaaacgccgcgcaagatcttcctgctggcgctctcggcagtgctggtcggcggtaactggctgttgttcatctgggcggtgaataaccaccatatgctggaagccagcctcggctactttatcaacccgctggtgaatattttgttggggatgattttcctcggcgaacgcttccgtcgtctgcagtggctggcggtgctcctcgccttttgcggcgtgctggtccagctgtggacctttggttcgctgccgataatcggtcttgggctggctttcagttttgccttttacggcctggtgcgaaagaaaattgctgtcgatgcgcaaaccggcatgctggtggaaacgctgtggctgctgccggtggcggcaatctggttgttcggcatcaccgacagcccgaccagccatatgggcgagaacccctggtcgctcaatctgctgctgatggccgcgggcgtggtgaccaccatccctttgctgtgctttaccggggcggcaacgcgtctgcggctctccacgctgggctttttccagtacatcggcccaacgctgatgttcctgctggcggtgacgttctacggcgaagtgccgggcaaggataaaatggtgacctttggctttatctgggtcgcgctggcggtgtttatcgtcgatgcgctgtatacccaacgccggttgcgcagaggctaagcctgcatcagccagtaaagaagggagccgacgctccctttttttacagccagtttttacgcttgaagtagagatatggcgccaggccggccagcatcataaacacgatggctcccggataaccaaagctccagtgtagttcgggcataaattcaaagttcatcccgtaactggaggccaccagagttggcggcaggaataccaccgagaccaccgagaagatcttgatgatgcggttctgctcgatattgataaaacccatcgccgcctgcatcaggaagttcaccttctggaacagcgattcgttgtgcggcagcagagattcgatatcgcgcaggatctcccgcgcctgctccagctggcccgccggcaggcgcgccttgcgcacgaggaagttcagcgcgcgctgggtatccatcagacagagtcgcaccttccagccgatatcttccagttccgccagcgtcgacagcgcttcgtcgtactcgtcgccctgatggccttccataatgacgcggctcagcttttccaggtcgctgtagatgttttcaatttcatccgccagctgctcgattttggtctcgaacaggtcgagcagcagttcgtaggcgttgccgtcgaccagcgtctggttacgcacgcgcatacggtagaggcggaaagcgggtagttcgcgctcgcgcagtgtgaacaggcggccttcgcggatggtaaacgccacggtagagttgccggcgtgatcgtcggcatcttcaaaaaagaagaacgagtggatgtgtaacccgtcttcatcttcaaagaaacgcgcggaggcttcgatatcttccagttccgggcgcgtcgccaggttttgacccagttccgtctgcacgcggcttcgctcatcgtcgtcaggctcgaccagatcgacccacaccgagctggcgaggtgtttgatctcatcggcttccaggcgcgttaaacgattgttttccagttgaaatgcgctcagcatgaccgggactcccaatgcaaaaaaattatcggacagttcggtgggcacacagaaacaaattgggtttcagaccattaagcctgactcagcgcgacgggaatggggcaggtcgctgacaaccgctaaggctatcagcataagaggatagccttaggagttgttcctgaatgacaggaagttgagccagcatctactgggtgtgtccaaggcgaatgtcctcttagcgtaatcgtgcgcgcatgttacgccagcgcaaaatcggcgtcaacacgcaacggaacgcgaaagcgcaaatcaggcgccttaacgtataaaggtagcagaatattacaaaataatgatatttttcttaaagttacactgcctccagccgggcgtaagccgccaccagccatttgattccctggccctgaaaagccacctgcagtcggctgtgctcgccgctgccttcgaggttgacaatagtgccttcgccaaacttcggatgccgtacgcgctggcctaacttgtagccggtatcgctctcggcaatcggcgcgcccagtcgctgatggtttaccgggcggctcaccgtggctcgcagacgcacttcttctacgcactcctgcggcagctcgccgataaagcgcgacgggcggtgataaacctctttcccgtacagacggcgggtttccgcataggtcagcgtcagcttctgcatggcgcgcgttacgccgacgtaggccaggcgacgctcctcctccaggcggccgccttcatctagggccatctggctcgggaacatcccttcttcgacgccgacgatgaacacctgcgggaactccagccctttcgccgagtgcagggtcatcagctgaaccgcgtcctgccaggtgtccgcctgcccctcgcccgcttccagcgcggcgtgggagaggaacgcctgcagcggcatcagatcttcatcttcttcgttgtagctgaactggcgcgtcgccgtcaccagctcctctaagttttcaatacgggtctggcccttctcgcctttttcctgctcgtacatcgcgcgcaggccggagtctttaatcacccgatcggtctgaacgtgcagcggcatatcggtggtctcctgcgccagcgcgtcaatcagctccataaagcgctgcagggcgctggcggcgcgaccggccagcgctttttctttcaatagctcgcgactggcctgccacagcgtcagctggcgatcgcgcgacgtctggcgcaccacgtccagcgtgcggtcgccaatgccgcgggtcggcgtattaaccactcgctcgaacgccgcgtcgtcgttgcggttggcgataaggcgcaggtaagagagcgcgtctttgatttcctgacgctcgaagaagcgcatgccgccgtagatacggtacggcatgctggcctgcaggagggcctcttccagcacgcgcgactgggcgttactgcgatagagaatcgcgcattgctccagcgcaccgccgttctcctgccaggttttaattcggttcaccacaaagcgcgcttcgtcgagatcgttgaaggcgcagtacagcgaaatcggctcgccgtcggcgccgtcggtccacagctttttgcccaggcgcccgttgttgttttcaatcagggcgttggcagcgctgagaatattgctggtcgagcgatagttctgctccaggcggatggtttccgcgccggggaagtcgttaaggaagcgctgaatgttctcgacctgcgcgccgcgccatccatagatagactgatcgtcatcgccgacgatcatcaccttgccggtatcgcccgccagcaggcggatccaggcgtactgaatgttgttggtatcctggaattcatcgacgaggatattggtgaagcgctcgcggtagtgctgcaggatatgcggtttgttcagccacagctcgtgggcgcgcagcagcagctcggcgaagtccaccagcccggcgcggtcgcaggcttcctgataggcctgatagaccttctgccaggtctgctcgaccggattgccgtagctctgaatatgatgcgggcgcagtccttcatctttctggctgttgatgtaccacattgcctggcgcggcggccactgtttctcatcgaggttcatcgccttaatcagacgcttcagcagacgcagctggtcttcgctgtcgaggatttggaagtcctgcggcaggttggcatccagatggtgcgcgcgcagcaaacggtgcgccaggccgtggaaggtgcccacccacataccgccctgggtggtgcccatcagctggccgatacggtgacgcatctccgccgccgctttgttggtaaaggtcaccgccataatggaatacggggaacagttctccacgctcagcagccaggcgatacggtgcaccagaacgcgcgtcttaccactgcccgcccctgccagaaccagcatattggtgcgcgaggccgctacggcttcacgctgtttgtcattaaggctgtcgagcaggtaagaaacgtccattggcaccgccggaagagaaggggttccacgaacccctgttaatatatacagagtgactggtgattatatcagcgaggtcagagatgccaaccgtgaaatttcaatatgcggcagcaggcggctgtccgcggtgtgcatcaggtccgcgccttgcggtttgatccagcaggcctgcatcccacagcgaatagcgccggccacgtcggtggtcagatcatcgccgacgtgcagaatctgcccgagtggcacattcagacgctccgccgcaaggtggtacatgtcggcaaacggcttggagcggccatccggcccggcgcgcagcacgaagcggaaatagtcgctcagaccgaacagttccgggcgggcgttgccattggtaatcgccaccagcggccacttcttcgccagcttcgccagcgtatcgtgcgtttcctgcgggacatcgacgcggctgcgccagtgggcgaagtgttccatcgccgcatcggcccccgctttcgccgcttcggcggagagcccggcattacgcatacctaactccagcgcacggtggcgccagacggtcacgtcatgataaatctcaggttcagcagccagcagcgtctgacgcagctgattaagctcatgggcgtcgaactggctgagcgaaggatggtagctgcgcacaaaggccagcgactcgtgcatcgtccggtcaatcaccgggcggttatcgtaaagggtatcgtccaggtcaaacgtcagcgcggaaatctggcccagaggtcggtaaaaacgcattatttcccccgtttagcgcgcggatgcgcggcatcgtacaccgaggcaaggtgttgaaaatcaagatgggtatagatttgggtggtggagaggttagcatgccccagcagctcctgcacgccgcgcagatcgccgctcgactccagcatatgggtggcaaaggagtggcgcagcttgtgcgggtgcacatggctgttcagcccctgcttaatgccccactcggcgaatcgcttctgtacgttgcgcgccgaaatacgtttgcccagcttcgacaaaaacagcgcgtcgtcatcggtaccgaacaggccgcgcaaatccagccagtgctcaatccatgccaccgcgttgcgaccgatcggcaaacgacgctccttgctgcctttgcccatcacccagacctcaccgctttcgagatcgaggtgtttgatatccaggttgaccagttcggacaaacgcaatcccgcgccgtacatcacctccagcatcgcccgatcgcgcaccgccagcggatcgttgagatcgatattcagcagtcgattgacgtcatcgacgtcaatattttttggcaggtggcggggaattttcggcgcggcaatccccttcgccggattggcgctgagctcgccctggccgaccagccagtcgaagaaactgcgcagcgccgacaggcgaagcgccaggcttgccgggcctaaccccgcgcggcgactacgcaccgcaaagcttcgcacctgagcggcatcgcactgcgaccagcttttcaggcccgcctcatccgccagggcgatcagcgcgtccagctgtcgctggtaattcagtaacgtgatcgggctgagctggcgttcaacgccaagatggcgaagaaagcgggcgacggcggagaagagaggagaatcggtcatgcgcgttcaatccagcgctccagcaggccgggcagcatctgggcaatctcctgcaacagctgcgtcccctgccctggctggtaatgctgcgcatcgcggctgctgaagagcatcacccccggggcattatcgccccccagcagcgatatcgccacagacccaatggccttcgcctccggcagtaccaccagaagctccgggccgttcagcggcccaagatagtggcgcgcctggcccagacgttgaatacggatcggctcaaacgcctgccggtttaatgtcagatgggtaaacttcgagggcgcgccgaggcgccagcagtcaggaaacaggcgcaccgtggcgcccgccagccccagctcgcgtgcccagcggtgaaggcggttgagcatatcgtcgaggctctccgccgccgccagccgcgtttgcagctgcagcaggcgctggaacaggctttcattagcgaccgcctgctccatcagcagcgacatattctcttccagcacatgaatatggttacgcgcccgcatcatgtgccactccaccagcgaaatcgtaccgcgtaccggatgcgggacgcggagatgttcgacctgggcggcattacgaataaaaaattcaggatgttgcaacagatagtccaccactgcgcgatcgttcaacgcgctggcaacctcctgctgttcttccccgattggtttcataaatgaataaatccatcatagacatgggccgccgggccggtcataaacagcggctggcccgggcctttccaggcgatatcaagacgaccgccgggtaattccacgcgtaccgtttccgccagcagcccctgctggatccccaccgccaccgcggcgcaggcgccgctgccgcaggcctgggtttcccccgcgccgcgttcgtagacgcgcagacggatatgagaccggccgaccacctgcataaagccgatattggcgcgctccggaaaacgctcatggctttccatcaccgggccgagagtttccaccgctgccgtatccacatcatcaacctggatgacgcagtgcggatttcccatggacaccacgccgcacaatactgtctgctcggcggcacgcatgatataggtcttttccgctttgttggcgcggaacggcacctgggacggctcgaagttgggctcgcccatgttcacccgcaccagatcgtcttccgttacgcttaataccatacgcccgttggccgtactcacgcggatatcacgtttattggtcaggcctttcagccggacgaagcgggcaaaacagcgcgcgccgttgccgcactgcgacacttcgctgccgtcggcgttaaagatccggtagtggaaatccagatccggatcgtagggcggttcgacgaccaatagctgatcgaacccgacgccaaggtggcgatccgccaggcggcgaatcagctccggcgagaaaaaaacattctgcgttaccgcgtcaacgaccataaaatcgttgccaaggccatgcattttagagaactgcatcatctactccagttgcgcggaacagaacgttatcgttagtaattgacctggctcggaccaccggtatcgccacgatcgttacgatccggcgttgcgctctgaatgccagggttaaccggtttggtcggcggcggcgcggttttgtccgccggtgggaaatagagaggccctttcagaccgcagccggtcaggctgaagatcgcaaacaaaacggcaagcgtaggaaaaacgtttttcattgatagttgcccgtgattcattctttctgctttctatcatcgcaggagaagacgtaaaagcaagcctttagcatccgactgcgcgcgcttttgtttcgcgctatactgcgacccatcttcaaaaatcaaaaaagcagaatcaaattatgaacgacagtgaattccatcgcctggccgatagcctgtggatgaccatcgaagaacgtctggacgactgggacggcgatagcgacatcgactgcgaaatcaacggcggcgtgctgaccatcagctttgaaaacggcagcaaaatcattattaaccgtcaggagccgctgcaccaggtgtggctggccaccaaacagggcggctatcacttcgatctcaaaggcgacgagtggatctgcgatcgcagcggcgaaaccttctgggatctgctggagcaggcggcgagccagcaggccggtgaggcggtgaagttccgttaatgacgtgtttcccggatagcggcgcatcgcgccttatccgggctacccgacaacatagaaccgtaaccctgctaagcgcagcgccagcagggaatatctgcggatagcggctcacgccttatccgggccaaatctacgagtagcgctgctgcagcaccggcgaggcggtaacgtcctggctggtgggtatcgcggcggcaatcgcctgggtgcggaaagggatcacctgggtgcgcccgtctacttcgacaatctgatagaactgcggcaggttgaagttgatgaagctggagccgtaggtgaaacgatcgtgcgatgacgaatagaagcggctgacgtcgcgcaccagctcctctttactgccctcgcagtgatgatagacctcggcgcggttgctctcatcaagaatatagatgttaaagccgctgtcgttgttatccgcgtcttcaaagaagaactgaataatcccttcgctggcgaagccatccaccaccgccggcagcttaacgtgattggtttccacctgcaccgacagcccgtgcagcttgttgtgcgagatagcgccgtagaactcaatggcgttttccagcttctgcaccgaaacgttaagccgctcgaagaacagcccccacgtctggccggagacgcgcagcgctttgaagcgcccggtatcctggcgggtactggagagacgcagttcgatacattcggagatcatctgctgtacgcgggtgcggatcaggccgcgcaggtgctggctatagcagaacacctccacgctgtccggcggcgcggcgtcctggtgcattttgccgaggatcgttttcagcgcctcgatcatcgcctgctcgccgttaaagtgcagcgtacgcacttcgttccacgagttgcgatacagcaggtcgacgctgccgatcaggcatttttgctcttcgccgaagctgaaaacatccagcttacggaaatcgaagtgcaccacctggttacggaaggccgcggttgggtcatattcgaggttgacgataatcgccaggtggcggatttcgcacgggctgtacagcgcctttggcgtcggcgccggcaggcgcagcgggaagtggtgcgacacgtcggccaccatctcctgcagcttcgccagatcgacgatgccgttgcccttaataaacaggcgggtgcgtgaggtcagcaggccgttaaaccaggcccaggccaccagcttattaagataacggttatattccagcggctgatggctgatgatcgattccatgtccggcgcgcggttgtacagataccaaccggtacggttggcgcggcccggcggcacgtggataaaggtcaggttcggttccgacagatccggcgaaatttgcgggtttaccagcgtcactttccccggcagcgcttcaaaggccgcatacagcttacgggtcagcacgccaatatcctgcgggctggcggagacgctaaggttattgcgccgcgcgaagcggatcagattacgatagctctgcatcatggcgtcgagcagttcgttgtgcgccttgcgcacttcatcgattttccagttggcgcggttgtcgagcatcatcagacgcttttcgtcccagccccaggcattcaccaactggctgacgacttcgcgacgccagccgacgcaggcgcgttcgcggctgagtttttcacaaactttcaggtagaagcagcggcgcaccagatcgaggcgggtttcatcttcgatggcctgcagataggtggtcacgcgctccagcatcatgcagtacgggtcgaggccgaaggagacaatctccccgtcgtgcagacgctgtttgatatctttcgctaacaggcggttattggggtattcccaggagtaggcttccagcagcagcgttttcagcaccgctttatagggggagtcgatacttttatacagctgccacaggctggcgccgaagtactcttccgccgacagcgaactgaggccgccgagatcgagccattcgttaggcgtcagcacgccctgggcatacagccccatcacgtaatcatcgtaatgctcttcttcatcgcacggcaccatattccacagaatacgcttgccggcgaggcgcaccgcggtgcggtagaactcatcaagcaacaggatatgctgggtcgaaccgcagtcttcgccgccgaggctaccgctttcgttatgacggaaacggttttcgtcgatcaggaagaagctgacttccacgccgagcgaggcagcccagctctcaagcaggctgcattttcgctgcagcagctgacgctcttcgctatccagccaggcctggtgacatacccagatatcaagatcggaagagcagctctggccgacggaggaagtactgcccatcgagtagacgccggtgatcggcagctcgcctttcggcggctcctgagtctgcataccgcgatgcagttccagttcttcaagatagtggcgttgggtttcatcaggcgtgtagaggcaaatgccacggggaacgttaccgtcaaggtaacccggcatcagcgggtgatgataatgtaataacgttggcagtagactgtaaacctgctggaaagcgggtcccatggcagcaagcgcgcgatccacgcgcaattggttgatggcatccagtctctgtttcagtgtctcaatatagaggtacaagacatatcgcctgatgttcaaaaacccgaggtacaatagtacggaggatttcagtatttcaacaaaaaccgtcaccattcgtcgtcggtgtggttgtgatgagcagcggactgacaaatggtttaaaacgtgatcaatttaacaccttgctcattgaccgtaaagaaagatgcgctacatacaagtgtagcaccgtttattacctgtaaattcctcactacgcctccggcaaccgccacgcgcatgaaaggttaaaaaagagtgggccggagccacctcccacataaaccgtgaaaactaacatccgtaagacaacaatgttaggatggatagtggtcgataatgacggtaacaagcatgttagacaaagttttgaaaattgccacacggcaaagcccgcttgcgctatggcaggcgcagtatgttaaagcgcgcctggaacaagcgcatcccggactgaaggtcgagctggtgccgatggtcacgcgcggggatgtcatccttgatactccgctggcaaaggtggggggcaaaggcttatttgtgaaagagttagagctcgccatgctcgaagggcgcgccgatatcgccgtccattcgatgaaagatgtgccggtggaattcccggagggcctggggctggtgactatctgcgagcgcgacgatccgcgcgacgcgtttgtctccaatcgctatgcctcgattgacgaactgccggccggcagcgtcgttggcacgtcaagtttacgccgtcagtgccagctggccgccacccgtccggacctggcgatccgctctctgcgcggtaacgtcggtacccggctgagtaagctggataacggcgagtacgacgccatcatcctcgccgccgccggcctgaagcgcctgcagctggaagcgcgtattcgccagccgctgtcgcctgagcaatctctgccggcggtcggccagggcgcggtcggcatcgaatgccgtcttgatgatgcatggacccgggggctgttagcgcctctcaaccatacggaaacggcggtgcgcgtgcgcgccgagcgggcgatgaacacccgcctcgaaggcggctgccaggtgccgatcggcagctatgcggaactgaaggacggggaactgtggctgcgggcgctggttggcgctccggatggttcacagctggtgcgcggcgaacgacgcgggccagcggaacaagcggaagccctcggcatctcgctggcggaagagcttctggataatggcgcccgcgagattctcgcggcggtttatgatggagaagccccgcgatgagcatcctggtcactcgtccactaccgcaaggagaagcgctggtcagccgtctgcgggccatgggacgcgtggcctggagctttccgctgatagaatttacgcctggcagggagcttcccgcgctgggcgatgcgcttgcccgactggggcccgacgatctgctatttgcgctatcccagcatgcggtggaattcgcccatgcccgtctgcagcagcagggcctgccctggcccacttctccgcgctattttgccattggccgcacgacggcgctggccctgcatacggtcagtgggcagcatatccattacccgttagatcgggaaattagcgaagtcttgctacaattacctgaattacaaaacattgccgggaaaaatgcgctgatcctacgcggcaatggcgggcgggaactcttaggcgcgacgctgaccgagcgcggcgccagggtcacattttgtgaatgttatcaacgtagtgcaaaacattacgatggcgcagaagaagcgatgcgctggcaatctcgcggagtcaccacgctggtggtcaccagcggcgagatgctgcagcagctatggtcgttaataccgcaatggtatcgcgaacagtggctcctgcactgccgcgttgtcgttgtcagcgaacgtctggcccttcaggcccgggaactgggctggcaggagattcaggttgccgatagcgccgacaacgatgcgctgctacgcgcattacaataactctcaacattggaagccataatgacggaacaacaaaatcaatccgccgtggttgaagagaccagggaggccgtggagaccacaccacagccagagaacactgagaagaagaaggcaggcaataaaaccagcctggcgctcagcgcgatcgctatcgccattgcgatagccgccggcatcggcctgtatggcctgaataaacaacaggccacgcggcaaaacgcaactacctctgaattagcaagccaggtcgcggcgctgcaaaaagcgcaggaaaatcaaaaaagtgaactggaaggtgttatcaaacagcaggccgaccagctaaacgaagccaaacaccagcaggagacgctggccaaacagttggatgagctgcagcaaaaagtggcggtgatttccggtagcgatgccaaaacctggctgctggcccaggccgacttcctcgtcaagctggcgggacgtaagctgtggagcgatcaggatgtcaccaccgccgccgcgctgctgaaaagcgctgacgccagcctcgccgacatgaacgacccaagcctcatcggcgcccgccgggcgatcaccgacgacatcgccaccctctccgcggtaagccaggtggactacgacggcatgatcctcaaggttaatcagctggcgaatcaaatcgataacctgcggctggccgataataacgatgacgattcgccgatggacgctgatagcgatgagctttccagctctatcagcgaatggcgcgtcaacctgcagaaaagctggcagaactttatggacagctttatcaccgtgcgccgccgcgatgaaacggcggtcccgctgctggcgccgaatcaggatatctatctgcgggaaaatattcgctctcgcctgctggtcgccgcgcaggcagttccgcgccatcaggaagagacctggaaacagtcgctggataacgtctcgacctgggtacgcgcctattatgataccgatgacgccaccaccaaagccttcctcgacgaggtggataagctcagtcagcaaagcattaccatgacggtgccggaaacgctgcagagccaggcgttgctggaaaaactgatgcagacccgagtgcgcaacctgatggcgcagcctgccgttaccgcgggcggcgcgtcttcgcccgcacctgctgcgccggccgcccccgctgcgccgcaaggagagtaacgcatgctgaaaattcttttactcttcgcactgttgatcgccgggatcgtgcttggcccgatgatcgccgggcatcagggctacgtcctgatccagaccgataattacaatatcgagaccagcgtgaccgggctggtgatcatcctgatcctcgccatggtggtgctgttcgccattgaatggctgctgcgccgcattttccgcaccggggcgcatacgcgcggctggtttgtcggccgtaaacgccgtcgcgcgcgtaagcaaaccgagcaggcgctgcttaagctggcggaaggtgattaccagcaggttgagaagctgatggcgaaaaatgccgatcacgccgaacagccggtggtgaactatctgctggcggcggaagcggcccagcagcgcggcgatgaagcgcgggccaaccagcatctggagcgcgccaccgagctggcgggcgatgacctgatcccggtggaaatcactcgcgttcgcctgcagctggcgcgtaatgaaaatcacgccgcgcgccatggcatcgataagctgctggaaattaccccgcgtcatccggaagtgctgcgcctcgccgaacaggcatacacccgcaccggcgcctggcagtcgctgctggacatcattccgtcgatggcgaaagctaacgtcggcgatgaagcgcaccgcgcggcgctggaacagctggcctgggttggcctgatggataaagcgctggccgatggcggcagcgaaggactacgcgaatggtggcgcaaccagagccgtaaaacgcgggcgctggtgccgctgcaggtggcgatggccgagcgcctcatcgagagcgacgatcacgataccgcgcagcaaattatcattgatggtctgaagaaacagtatgatgaccgtctggtgatgccgatcccgcgtctgaagaccaataacccggaacagctggagaaagtgctgcgccagcagatcaaagccgttggcgaccgtccgctgctatggagcaccctgggccagtcgctgatgcggcacggcgaatggcaggaggccagcatcgccttccgcgccgcgcttaagcagcgtccggatgcctttgattacgcctggctggcggatgccctggaccgcctgcatcagccggaagaagccgccgctatgcgccgcgatggactgctgctgacgctgcagaataatcctcagccataacctggcatggctatcgcctcctgcggggcgatagcccttctcccccgccttcacattgacggatccc

SEQ ID NO: 5371 - DNA, 36443 bp, Unknown
  gut microbiota DNA sequence
ttttgcccggtggcggctgcgccttaccgggcctacgaactgcgacaaatgtcacggaaacgtaggccggcgcaagcgcagcgccgcccggcaatgaatatccggcgcgacgccatggtccggcttaaaaatccatcttcaccgtgaactgcacttcgcgcgggtcgccaatctggttgccgagattattggtgccgatcgaggaagtgtaataggtcttatcaaacaggttcttcacattcacctgcagcgtcaccggatactgcagcttcatcttataggcagcaaacacatccgccaccgcatacccctgcaaataataatccgcgccgttggtgccggaacgcttgctgaccgcgtggccgccgccgccgacggtcagggtgttgctgttatagacgttatgaatgtcataggtcaggaacagcgaaccggtatgtttcggtacgtttggcagcggtttcccggcgtaatccggatcttccagcactttggcgtcggtgtagccgtagctggcgatcacgctgaggttatcggtgatggaccccgccagatccacttccacgccctgggaacgcactttgcccgccgttttggccaccgtctcatcgccaatgctctcggtgtacagcacgttacgcttatgaatatcaaacaacgcgatattggcggtaatgccgtttaacaggtcgaatttggcgcccacttcgtaagaggtggactcttccggcggcagctcgccgatatagctggcgatcgacgactgcggcataaacgactgggcgacgttggcgaacagggagacgttcggcgtgaccttgtagaccaggccggctttcggcgtccatttctcatcgcggctgtcggtattgacgttaaacggtcggcctttaccggcgtactgggtgtagtactggtagcgcacgccggcgacggcgatccagttgtcggtcaggtacagcgcgtcctgcacgtatgcggcatagctctcctgctgaatgcgctggtcgctgtcggaggcggagacggtattacaggtgtcgagagtgccgtagaccggatgatagatgttaaagcctttaacgttcttacagcgcagcatatcggtgcgcagcagatcgtaattctcataggcgacgccggtcagcagctcgttataaaagccgcccactaccacgttgccctgcaggtcggcgcgggtggagtgcatcttctgcgttgaaccgtgggtaccatcgacccggcgggtgaggttgccggtcgccgaatcataggccattacccgcgcctggttatcgttgtaatgatcctggctgtagctgtagtcgaagcgcgcggtccaggcgtcgttaaggcgatactcggcgttgagctgagcgagatcggaatagccatcggtaatattaaacgcttcatcgaagcgggttttgcgatcgacgttaaccgcatggccggtattcagatcgaagatagttccgcgatcaaagggggcgctgtagtcgcggtgcgaataggacgcggtcaccgttgcccgctcgccaaaccaggtcagggaaggggcgataaagctgcttttgtttttaccgaaattgcgccagtaatcctcattctgatattcgccgatcagtcggtacgccagatttgtgccttcgatggggccggtgatgtcgacgctgccggtgccgccgccaaagctggtggaggtcccggaaaccgaaccggagaactgccgctccggccgtttagtgatgacgttgatcagcccgccggggtcgaggataccgtacagcgtcgaggcgggccccttcaggacttccacccgttcggtggcggcgttaaagctgcgcggcagcacggtgcgcaggccgttggtcatgatcgagccgtcgcggttggcgccgaagccgcggcgggtaaaggcgtcctgggtaccgccgagggtgttggtctgcaccacgttagcgacgttatacagcgcctcatcgagtgaggtggcgtgctgatcttcgagaacccgatcgctgacggtattgaccacctggggaatatccagcagcggcatcgaggttagcgtcgcggtggcggagttgagcggctgatagccgctggtggcgctttgctgcgcgccgtcggccactacggtgatagtctcttccgcgtcgttagtacttttcgccgcgcgattgtcggcggccattaatcccggtgaggctaaaaaaagaagcgaaaaaagcgcgcgccctggcaacgtcctgcaggcgacatggggttgagtcattatctgtttctcgtgaacgaatctgcctttgcggtcagattaagccaataaaatcattgccctgaataataaaagcactctgtttagcgtctgaatgcgccttcagatgtgtaattgagaatcattcaatcatgaagggatgtagtagtaaacgttatgcaagataaaaattcagcggcgaggaacaggacgttttaaacacctccagtagggaatgttctgtagttatctatctgatattattttattttaattatattgcgttggcacagcctcgctgtagtcagcgtccccgtctgaagacgatggcgagtattgactactacattcatccccgtcatgatcaaaagagaatgagatttattttgatttgactgcagaatgtccagctatcgcctggaacgctgcggcgcaggagcgagttatgccacagcgggtgaaacctgcagagcaggggatcgtactggatgccctgtcggccggctacggccagaccctgatcgttgacgatatcaacctgaccattcccaccggcaaaatgacggtgctggccggggcgaacggatccggcaaatccacgctgctctcgaccatcgccagaatgctgaaaccgctcggcggctgcgtgcgtctggacgggcaagccattcaccagatgccgacgaagaccgtctcgcgccagctgggcatcctcccgcaatcgccgttgaccccggaaggattgaccgttttcgagctggtctcgcgcgggcgctacccgtggcaggggctgatgcgccagtggtccgaggccgatgagctggcggtagaggaggcgctgcgcttaaccggtaccgccgaattcgcccatctgccggtggacagcctctccggcggccagcgtcagcgctgctggatcgccatggcgctggcccagcaaacggccaccattctgctcgatgagccgaccacctggctcgatctgcgctatcaggtcgatatccttgagctgctccagaccctcacccgcgaacatggccgcacggtggtgacagtgctccatgaccttaactttgcggtgaactacgccgatctgctggtattccttaaacaggggcgcatcgccggcacgattagcgacaacgatgtctgtagccctgagctgattaaacacgtgtttgacgttgacgtgcagatgtcgattaacccgcaaaccggcaaacccttctttatgccgattcgcgcccgccaggcagcggcacaatgagcgtggccatcctgctttccgcgcggcgtcgcccccgcccccggctggcgctgctactgctaacgctgctgcttatcgccgcctcgctggtgcatcttggcttaggcgcccgctggatcgccccgcagacggtgctgcaggcgctgctggagtacgatccgcgcaactttgagcagcggattatcgtcgatctgcgcctggtgcggctggcggcggcgctgctgaccggcgcggcgctcggcgtcgccgggctgctgctgcagacggtgatccgtaacccgcttggcgagccgcatattctcgggcttaacgccggcgcctcgctggcggtggtggcgacctcggcgctgggcctgtccttcggcgctttccccgccgggcgcccgttgaccgccgcctgcggcgcggggctgctgttcggtggcgtgatggcgctggcctctgccgggcgcggcggggcgacgccgctgcgcatcacgttgtgcggagtggcgctgtcagggtttgcgtcggcggtgacggcggcgatattaattctcgatgaacagacgctgctggcgatgcgcacctggctggccggcgacctggccggactgaactggagcacgctgcagacggcgctggtcccggcgctgatcggccttggcgtcgcgctgctcattgccccacgcctcaacgtgctggcgctgggggataaggtggcgctgggccttggcgttaatctcgtccagacccggctgctgggcctgctggcgattgcgctgctctgcggcgcggcggtggcggtggccgggccgatcggcttcgtcgggctggtggtgccgcacgtggtgcgccgtctggtgacggaagacatccgcctggcgctgcccctggccgcgccggtgggagcgctggcgctggtgctggcggatatcgccgcccggacgctggtcgcgccgcaggagctggccaccggagcgatgaccgccctggtgggcgcgccgttgtttatctttatcgccgcgaggttttttaaatgacgcgcgccgttcaccgggccggttttcggccgctggctttcgcctcccgtcatctgctgctgcgtcctgcggcgttaaaaattgccgccagcatagtgctgacgctgctggcgctggggctgtacagccttagccgcggcagctatccgctgcccgcgtcgacgctggcgcgggccctgctggcgccgcaggagatgggcgagcagccgcgctttattctgtttgatatccgcttgccgcggatcctgatggcgctgctgtgcggggccatgctggggctggccggcgcggcgatgcagagcatcacccgtaacgggctggccgacccggggctgatcggcgtcaaagagggggccagcatcgtggtcctggcgctggtgctgtttttcccggcggtaggcctggtctggcggccgctggcggggatggtcggcggcatagcggtggccctgctggtcctgacgctggcccgcgactgttcgcggccgcgctttattttaattggcatcggcgtctcctggactctggcggccgcggtcggcatctttatgaccaccgccgacgtacgcgacgtgcagacggcgatgatctggctggcgggcagcctgcaggccgccacctggccgctgctggcggtggctttttgctgggcgctgcccggggccatcatcctgttctgtaccgcccgggcggcggacgtggcgctgctcggcgaccggaccgccatcggcctcggcgtacgtctgcagcagctgacggtgctgcgcttttttgcgccggtgctgctgacctcggccagcgtctcctgcgtcggcagcctgggttttgtgggcctgatggcgccgcatatggcgcgtttcgtgctgcgcggcggccaggtatcgctgctgtgcggcagcgcgctgattggcgccttgctggtgctggcgaccgatacccttggccggctggcgtttgccccgctgcagatcccggcggggattgtcattgccctggtgggctgcccgttcttcgttgtcttgctctggcgtcgccgtgatgccctttaaccaggaaggtagtatgcgttggttcgtctcattgctgctgttgctgacgggggccgtcagcgccgccgccccacaaactcaaactttcgccgatgatttaggccgcaccgtcaccgttccgctgcatccgcagcgcattgtttcgatgcacgatctcgatattaccattccgctgattgagctcggggcgccgccgatcgccagccacggccggacgcgcccggacggtagccactacctgcgatccagcgcccagctcaccggcgtcgatttcgacaacagcgatatccgctttattggcaccgccgatatcgatctggaagcggtagccgccgccaggccggatctgatcatcactgagcccagccgccacgtgtcagtggagcaactggagaagattgccccgacggtgagcatcgaccatctgcagggcagcgccccggagatttaccgcaagctggcgcagctgaccggcacccagccgcggctggcgatcctcgagcgccgctatcaggaacaaattaaacagctgaaagcgatggtcaacccaccgcagtacagcgtctcagtgatccaggcgaacaacggcaaggtcacggtgcatcattcgtatcatgcgctgggccgggtgctgcgcgacgccgggttccgctttccgccgctgattgagccgatccccgacggccagcgcattgacgtcagcgcggaacagctgccggagctggacgctgattttgtcttcgccacctggcggtcggataccggcggtaagccgcaggatgagctgcaggcgatggaaggcgtgatgcccggctggtgcgactttatgcgcgcttgccgcaccgggcactatattttactgccgcgggaagaggtgatctccaactcctacgccgcgctgtctctgatggtggcccaggtgcagtcgcatattgccggcaggccgatcccggcggaggccaaatgaaaagcgcggtaaaaaaagagaagggcaaagtcgatctgttcggcgaacgctatcgcgcccgggcgcaccagctctccccccggctgcgggcggtggtcagctatatcaacgacaaccgcgaggtggtgctggagcataccgcgatggagatcgccaccgcgacccagacctccgacgccacggtggtgcgcgccatccaggcgctgggcttcgccgggctgcgcgagcttaagcagaccatggagcgctggttcggcacctcggtcacctcggcggaaaagatgcgctcgacggttaccgcgctctccagcgacgtcaactccagtattgattttgtgcttgaaggccatcagcgggtgtgcgaggtcctgtcgcgggccgacaaccgcgcggcggtggctcaggcggtggcattgctcagcgacgcgcgccaggtggggatcttcggtatcggcgcctcggggatcctcgccgaatacaccgcccggttgttcagccgtattggcctgccggcgtacgtgatgaaccgcacgggctttagccttgccgaacagcttatcggcctgcagcgcggcgatgtgctgatcatgatggggcaaaaatccccccatcgcgaagggttgaccaccctgcgcgaggcgaagcggctgggtattccgaccatcctgctgacccaggcggtggactcgcgcttcagccaggaggcgcaggtggtgatcgacgtcccgcgcggcggggacagtagccggatgccgctgcacggtacggtgctggtctgtctcgagatgattgtcctgtcggtggcctctaccacgccacaaaaaacggtgaaatccctgaaacgaatcaacgatctgcatcgggctatcggtaaatccggcggtaaacggggccattgagaagataattcaccagcgggaaggtttccggttgcatataaaagtgagtgtgtgtatttttatgcaaaataaatgcataaaaaggaaatctcatggtcaagaatttgctcaaagcgtgttgcatgatagccgcgctgacggctgccggacaggcggctgcggaaacctataccgtcggctccggcggcacctaccggccgtttgaatttgaaaatagccagaaacagctggaaggtttcgacatcgacatcatcaaagccatcgccaaagccgaaggctttgacgttaagctggtcaataccccatgggaaggcatcttcgccacgctgaacaccggcgaccgcgacatcatcatctccgggatcaccatcaccgataaacgcaaacagatggtcgatttctccgcgccgtacttcccggccgaacagtctatcgtcgtcgctcaggactcgcaggtggattcgctggcggccctgaaaaacgagaaggtcggggtggtgaactccagcaccggcgatatcgtggtttctgaggtgctgggtaaaaacagcaccgcgatcaagcgcttcgacaataccccgctgatgctccaggagctgtttgaggacggcgtcagcgccgcggttggcgacgtcggggtggtgaagtactacatcaaacagcacccggagaagcagttcaagctggtgccggatgccaaatttgagcgtcagtatttcggtattgcggtggcgaaaggcaacagtgaactgctgggcaaaatcaacgccgggctgcaaaagatcgttgctgacgggacttacgccaaaatctataaaacctggttcgacgacaacgtgccgacgctgccagcgcaataatccacctttttcagtgaccacggctatcgcccaggcgatagccgtattttttagggaaggactatgacgggattccgttgggagatcatcgaggagtacggcccgctgtttgtggacggcgccctgatgacgattaaatgtaccattatctgcgtgatcctcgggacgctgtgggggttaactctcggtctcgggcggatggcgaaggccgagcacgggccgtggaaatatattctccgctacctggtgcagtttccggtgcgcttttacgtcagcgccttccgcggcacgccgctgttcgtgcagattatggtggtgcactttgcgctggtgccgctgtttatcaacccgcgcgacggcctgctggtgaccagcggcctgatgagcgccgactttgcccgcgagctgcgcgccagctacggggcgttcctctcctgcatcgtggcgatcacccttaacgccggagcctatgtgtcggagattttccgcgccggcatccagtcgatcgacaaagggcagatggaggcctcccgcgcgctgggcatgccgtggtggaaaaccatgcgcaaggtgatcctgccacaggcgtttcgccgtattctgccgccgctgggcaataacgccatcgccattgtcaaagactcgtcgctggcctcggcgattggcctggccgatctggcctatgccgcgcgcaccgtctccggcgcctacgccacctactgggaaccctacctgaccatctctctggtctactgggtgatcaccttcctgctggcgcagctggttaaccgtctggaaaagaggtttggcaaaagtgattcacattaataacttacataagcgcttcggcgacagccacgtgctgcgcggcatcagctgcgatattaaaccgcaggaagtggtgtgcatcatcggcccatccggctcggggaaaagcaccttcctgcgctgcatgaacgccctggagacggtcagcgaaggcgaggtggtggttaacggctttgccgcccacgaccggaccaccgacctcaacaagatgcgcgaaagcgtcggcatggtgttccagcgctttaacctgttcccgcacatgacggtgctggaaaacctgatcatggcgccgatgaatctgcgcaatatgccgcgccagcaggcggtcgacctggcggaagccttgctggcgaaggtgggcttaagcgataagcgcgacgcctggccctcgagcctgtccggcggccagcagcagcgggtagccatcgcccgcgcgctggcgatgaagccgtcgataatgctgttcgatgagcccacgtcggcgctggatccggagctggtgggcgacgtgctggaggtgatgaaaaacctcgccagcgaggggatgaccatggtgatcgtgacccacgaaatgggctttgcccgcgaagtggccgaccgggtgatcttcatcgaccagggcgtgattcaggaagagggcaagccggggcagatctttagcgcgccgaccaacccacgcaccgccgcgttcctcagcaaggtgctgtaaaccgggcgggctggcgcgatgccagcccgctgagcattccgggtgtattgacgaagcttttaatcatccgcacaaacattgactgggctcatatatcccgcgataacccctttgttaatctcagggtgtcgattaggacttctccaggaaaataacgttggaaatctttttttaacccactgaaaaatagcgattaactatttttcatacgccaaaaatcatggtccgttaatcacggactcggtttcgtatgggttaaaaaaggtacgttatgacagttacatggacggtcacgcccgtggggtatcagcacattgccaaacgctgccccgcctgcaatgtaaaacgcgactttgcgccttccggcgccatccgggtgaattcgcaaaagaagctgctggatatctggagcatctataaatgcacgcgctgcgattacacctggaatatcgccctgttttccaggctgcacgtcagcaagataaaccgtgaactgcttcagcgcctgctgcagaacgatgcagccatggttcactattatgccgctgacctcgcgacgctgaagcgcaaccgcgccgagccgtcggggcaacctgattttcgtattcacgagcaatggtcggttacgttgatggcatgtcagcggataacggtgcgcgtcagagtcagtcagccatttcgcatcagcctgctatcaatactgaaaaaacagctcaagctgagtacggctgaaatccggtggttggtcgcgacagggcatatcgagggtattccactaaaacagctcaagacgaaaaagctgaaggcgatggaatatcattttcagctggcggcggaaacgctgtatgcgcgacgccggattacgttatcactttgcggtagataacttgccgggaagataagccgcagcgcttgagctgctggcttttttattcctcggtgaataaggacggcgaagttggccgtcctgactcccttatctccgcctgcaaaagccacctccgctgcagccattcaatctgtagacgcatagtaaacaaacgccagcttattgccgtcgggatcgcggacgtaggcgctgtgaaaaccgtcgccatactgcggccggtgaccgggaccgccttcgtcacgtccgccgagttgcagggcgagggcatgcagttccgcaatatgtgcgacggagcgggcgttaagcgccaccatcgttccattacccaccccggcaggctgttggtcaaaaggaacgcccacgcacagcccgcaggtgtgattgccgttgaaggtgccccaggacgccccctgttcgttacggccggctttgacgtgccccagcagcgccattaacgggtcatagaacttgatggcgcgtggcagatcgttcgttcccagcataatgtatgaaaacatagtgttctcctgttgcgggtaaaaaggcctaaaccttcaggctggctgaaggagatgttgttgacgaagttttaacaagcgcgagaccagcatgatgacgacgattcccgctatcagcgccaggcagtgaaaggctattctgccgccagcctggaagtaaacccagcgcgctacttccaccgaggccgccataaaactgagcgccacaatgttgatggtggctgaaaccgtccctttcggcagggagtgggaaaaaagcgcaaaacggaataatacggggaacaacaggcctgttccgagggcatagagacttgttcctgaaacggaccaccaccaggtatggggccatgcaatatttcccgccagtaataccaacaacccggtcagctgtatcgggatagtgcgccagataaagcgaggagaggtgggatccttgataaaacgggccacgatgatgctggcaataataacgccgccaaagacaggcacctgggtccaggcataggcgccgcgcgacatccccccgtcatcgatcaggatcaccggagagagtgctacccaggtgattatcggcaggttactgaatgacaacgccagcgcgcccgtgagcaccaccggctgtttaaaggcgcggacaaactcggaaaatacctctcccggacgaaacccccagccctgagaggtgaccgtttctggcatgttaaaaatcagtaacgcccaggccagcaagctcatggcgccgatgatcgcaaacaataacttccagtgcaggaaattcatcaggccagcgcccgccaggggcccgattaccggcgccagcaaaacgatggatgtcagcgccgccataatgcggatagactctttttcatcaaaagcctcctggatggagacataaccgactgtcgaaatgaagcagatactggttccctggataaaacgggcgataagatattgatcaatcgacgtgacaaagatcatgctgaagcaggccaaagcaaagatgatggctccggtcagtagtacggggcggcgaccaatgcggtcggagagcggccccagcagccactgtaatgccagccccccggctaaatagaggctgacagaggccggggctaacgcaacatcagcctcaaattcccggatgatgtggataatacccggctgaatgagatcggtagtcagataagcagaaaaatcatagataaccatcgccagcggaaataacaagattctgctaaaacggatgtacggtcccaacgctaatttcatacgcgaagactccctggtcggtgacggtttccctggtatcggggcctggttgatgtggatcccttgcggctgtcgtcacaggctggccgcggaatgacaaaccgaaagataaaattcgcctggcgactgtcattgggtaaggcaacgcaacggcatgcagagggagtgatcgagcatggcacagggataacgcaccgggttaactggctgggggtgacgtttcttatgcgagggaggggtctcgctgccatcgcgtggatgtggagcgtttgtccgcaggggacgagaatgaataaagtcgcttgctcctgaggggaaacattcataccgggaaacctttgtcatcatcatgggcaaaataggcgaacactcgccagtgtccgcattcgatttcagcgcagtgataatcagtccggccagtgatggtcggaagtctgattatcagatgattaggttttccagcatcgacgcctcagctatgggtatgaattattcattaaggaaatgataacacccacatttattatgggaattgcgcaggtaagaaaatgtgactttcgcccgcttactgcgtgaagctgatcgcaacagacccggcgctgcgctcagccttgccatggtacaccgcctcaatattattcccctgaggatccagcacaaaagcggcatagtaaccaggatgatagtgtcgttcgccaggcgcgccgttatcacgtccgccatgggtcagcgccgcatggtaaaaagcgtccaccatgtcacgatctctggcctggaatgccaggtggtggcgcccagtcagtttcccggcagcctccgggctgtggcgtgaggccaccaccagttcgtcggccagcaagtattcattggcggtggtgataaccgggatctccagcgccgacagtacggcggtatagaagtttttgcttgcctcaaagtcttcgacaaccagcagaatatgatcgatcaatctgccacgatgtaaggtattactttccatggaatttcctctcggctggggggccggcaatggttaacagcagtgagccagcaagaacaggataccctccggtgagggccataaaaaagggctggcgccaggccagcccgtgaagactaccgtgcggactccgtcgcctcgtccatgtcatcttcctgctcactggcaagcagggttttctcgtttttgcacagacactgaatcaacaggaacagcacgccgctggccaccagggtgacgatcaggccatcgtaaccagtgatgccgatcagcatgccgctgactaccggcccggcaacgctgccggcggaccagaaaaagccgaacagggcgttaatcataatcagcttctgcccattgaaggttttccccgcccgcaccagcgacagggtataaagcgcgcccgccgcggcgcccagcagcagacaaatggccatcagctgaatgcgcgagccgagcatcagcggcagggccagcagcgacaggctgaaaaccaccgcgcagctcagatgcacgcggcgaatcccgacccggtcggccagccagccgagcggggtctggaacatcgcatctccggtaagcaccacggtgaccagcagcaccgccagcccttcattcagccctttgtccatgccgtacagcggcagcagggcgaggatgctggcgtcaaagaaggcgaagcagaagaccccggaggccagtaccggcagaaaggcgccgaggctgcgccagctggcgcgctccccgaggctttcacgagtgccggtgggcagatggcgcagcatcagcaggcagacggcggtgaccgcgacaatcgctatcagcgctgaggtctgccaggcggggccgacggagatcagcagcggcccggccagctggcagccggtaaaggccgaggcgtagagaccggtgagggtagcgcgctggctgcccgccgcgccgccggtgatccagctttcgccgagtacgataatgaccccggaggccaggccggtcagcaggcgcggcagcaaaagcagcgtcatatcggtagtcatgcatgaggcgatggtcgccagcgccagcaggatcagactgccgctcagcagcacgcccatttcaacgcgccggcacagcgcaggagagaggaaagaggagatcatcatgccggcgggcggcagggcggccagcaggccgacgtacagcggcgcgatctgctgctgcgccagctcaagactgattaacggcaccgtatagccggtgataaatcccacaagcgacgcggccatgatcatcgccagcgtgggggcaagacgattctggtctgggttaaacattttatttccgatgacggagaggtcagtagtggatccttcggcaaattgccgtcctgagttgcataataattaatcgactggccgttgtcaccgttgaaatcactaccaaaaaagggccgcagggcagcaggtgggctgtacgccgcgccgccgccgcattccgtgacgttgtcagcgtggtaacgacaggatataacggagggagcggcagcgcccgacgccggtgagcgacggggaaaaacgcgacgcatgaccgattattcagcattacgctatgcaggaaaggagtaatacatggccgtatcgccgtcattgatcgccgaagccgttggctggcgacgtgaatttcacgccgcgcctgagctcggatatcaggagcaggagacctcgcgccgcgttgcggagctgctggcctcgtttgggctgcaggtgcatcgcgggctggccggcaccggcgtcgtggcgacgctggagaacggccccgggccggttatcggcctgcgcgccgatatggacgccctgccgatcaccgagctggggagcgtcagctaccgttcacgccgcgccggggtgatgcacgcctgcggccacgatggccataccgcgatgctgctggcggccgccgcccatctggcgcagacccgccatttcagcggcaccgtccactttgtctttcagccggcggaagagaacctcggcggcgcgcgcaaaatggtggaggaggggttgtttgagcgcttcccgatggacgccatctacgcgctgcataactggccggggatccctcttggcgaagtggcgctcagcgatggcgcgatgatggcctcactggacgccttcgagataaccttgcgcggaaagagctgtcatgcggcgatgccggagagcggggccgatccgatcgtcgcggcggcgcagctgataatggcgctgcagaccattccttcccgccgcttgtcgccgcaggattccgcggtggtcagcatcacccagataaacggcggcgaggcgatcaacgtcctcccggacaccgtggtgctgcgcggtaccttccgctgcctgagcaatcgcgttcgcgcccgcgtgcgggagcttatcgaaagctatgtggcgacccagccgcaggtgtccgatgtgcagggcgagattagctggttcccgggttatccggtgaccaaaaaccatgcgctgcaggcgcagcaggtgcgcgaggtggccgtcgccactctcggcgcgcaagcggtgcgctggaatcaggcgccgtcgatggcctccgaagattttgcctgcatgctggaggcctgtccgggggcctatttctggataggcaccgacggcgaaaccccgtcgaagccgctgcataacgccagctatgactttaacgatgcgctgatcggccccggcgtcgccatgtgggtggggctggtggagaaacagctgccggcggcgtaacccaccggcagcggcagagggagcgcgctgcgctccctgaggtcagacgtcggcagcggctttcagtcgcgctttcatgtcgctgtaggccgtccaggcatagtgctccgcccattgctggtcggcaatcgcttccactttcaccgcacagtatttggtttccggcgttttggagatcggatcgaggttatcctgggtcagctcattgcaggcgcccacccaccactgataggtcatatagaccgcccccggattgatgcgatcgctgaggtcggcgcgggagatcacctttccgcgccgggagctgacccacaccagctgtttgtcggcgatccccagtcgttgcgcatccgcgggattcatctgcacccgtcccggctcgtcggccagcgactgcagcgcggcgcagttgccggtcatcgagcggcaggaataatgcccgacttcccgcacggtgcagagcaccagcggccactcgtcatccgggcgctccgccggcgcgcgccaggcggtggcgaacagctgccctttacccgagggggtgtcgaagcggttgtctttatacagccatggcgtgccgggatgatcgagggtcgggcacggccactggacatggcccatatcgcccattttctcccaagtcacgccgtagaacagcgggcagagctcgcgcatctcgtcccagatctgctggttgttctcatagtgcatcggatagcccaattcgctggccagcaggctaatgatctcccagtcgcgcttcacattccccgccggagggatcgcctgttcaaaccgctggaacccgcggtcggcgcaggtgaagacgccgccgtgctcgccccaggaggtggccggcagcaggacatcggccatttccgctgttttggtcatgaagatgtcctgcacgaccacgaagtccagcgcctcgatgcctttgcgcaccaggccgaggtcggcttcggtctgcagcggatcttcgcccatgatataataggctttgatctcgccggtcagcgctttatgcggcacctcggtgatgcgggtgccgacctggtcgtccatcagcgccgggtcgatgccccaggcggcggcgaatttcgcccgcacggcggggtcggtgacctcctgatagccggggaacaggttcggcagcacgcccatatcgcaggcgccctgtacgttgttttgcccgcggaccggccccacgccgacgttgggccgtcccaggttgccggtgagcagcgccaggcttgccaggccgcgcaccacgtccaccgcctggccaaactgggtgacccccatgccccacataatggtggcggatggggcggcggcgaacatgcgcatcgcctcccggatttcccgcgcgctgaccccgacaatcccttccaccgcttccggggcgtaatccttcaccgcctcgcggtaagcatccagcccttcggtatagcgttcgacataggttttgttgtacagctcctcctccagcagcacatagccgaaggcatttaccagcgccatgttgctgccgttgttgagctgcagatgacgatcggcaatgcgcgcggtttcaatgcgccgcggatcgcagacgatgattttggcgccgttgtcccgggccttgattacccggcgggcgacgatgggatgggagtcggcgcagttgtagccaaagaccagcaggcacttcgagttttcgatgtcgctaatcgagttgctcatcgccccgttgcccagcgcctgctgtagcccggcgacggaggggccgtggcagacgcgggcgcagcagtcgacgttattggtgttcagcaccgcgcgggcgaacttttgcatcacatagttggtttcgttgccggtgccgcgcgaggagccggtggtcatgatggcgcgcgggccatgcttctctttgatctccttgagcttgctggcggtatagcgaatcgcctcctgccagctgaccggcgtgaaggcgccgcctttctggtagcggatcatcggttgtttaagacggggcgtcaggagctgcgtatcgttaagaaaatcccagccgtagtagcctttcaggcacagctggttctggttggtgacgccgtcggcggcctccgcgcgaatgattttattgttgtcgacaaccagtttaagtttgcaacccgccccgcagtaggggcacacgctcgtgatttttttcatcagtaacagacctgttaacagtgaactgaggatcgctgtcgcgccgggcccgacgggcaacgatcgcggtatcgcctggtggtgatgcagacgcaggcctgtcgcgctatgcaggtcttgtgccagaatttaaactcttgatctgtattgaaaaatgaaaagagattgatgacgggagcatgacctcgtcactaatgacgatgacgcagagcgccgacgtcagacgctctgcgggagtaaaacgcggctaggcgagagggcggcagcggtcgaagtgcgattcgctcaggccgacgtcgcgcgcggcggcgcagatagcctgccagctgccggcatccagcgggatcccctgcgccagccgcgcttcgcggttggcggcctcccattcgccgggcgccagcaccggggcatcggcatcgtgcggcgactgcttacaccatgcgataaaggcctccgtctgcgcctggctgtccggggcatcgaacgcgtccgggcgcaggatcaccgtggtcatgcagttaaagatggcgtcgacgctggtctgcaggctctcctgatgggtggtttgcccgccggagagcgcgccgccgagcacttcgcacagcgtcgccagggcatagcctttgtgctgggcgaaggtgagcagggcgcccagcggcgaggtctgcatcaccgccgggtcggtagtgggtcgaccctcggcgtcaatcaggcagccgggggccacggcttcgcctttatgccaggcgacgcgggttttaccaaaggcgatggcgctggtggcgtagtccagcagcagcggcggatggcccgcgcggggaaacaccacgcacagcgggttggtgccgaagcggctgtccttcccgcggaacggggcgaccatcgggtcgccgatgacgctgacgaagtgaatggagatcagcccggcggcggcgcactgttcggcccagtagccgatgcgtccgacgtgatgcgcattgcgcagggcgatagccgccataccatgctgcttcgccttttcaatgcctaactgcatcgcttcgtgggcgaccacctggccgaagccggcgttgccgtcgagggtgaccacggcgccggcgtctttggtcaccgtggcgtggcggttgagctgcagaaaaccaccggcgtgggatttgacgtagctggggatcatcccgacgccgtgggagtcatgcccggcaagattggcggcgatcagatggtccgcgacgagggtggcttcccctggggtactgccgagatgggtaaacagtgagacgacaaactgatgcagatccgtcgccagaaagcggtgtcctgtaggcactgattctctcctgtagtctgttgttattttgttatgtttgccgtttcatgctgcgccgcccggcgcagaaggtcaagggcggcgtctcccggcgacatgccgctgcgccagcgcctgcgcatacgacagacgataaaaaaccgggccgggatcgcgttttaattaacgccataaacaccacatttttaaattctgccagtgtcacaaaagccagaaaaaagccatccccgtcgttgcaaggggagctgataccactatatgttaaatttgtgtttattaattgatgattaaaggttggtatcatgtataagaaaataaggggtttagtggtttcactgacggccgttttcgcctgtgccgcctgggcggaggtgcctgcgggctatcccgcggattatcaaaaaacggttgatgccgccgtaaaagagggcaaggtggtgatctattccacaaccgataccaaagcggccaggccgttaattaaaggattcgaagcgcaatatccgggcgtcaaagtcgaatataacgacatgaacagcaccgagctgtataaccgctatatcagcgagcaggccgccgggggcggcagcggggatgtggtgtggagctcatcgatggatacggcgctgaaattagccaccgaatacgcggaacaatatgcctcgccggaggtgaagcaattgcccgactgggcggtgtggcagcagaaagcctatggcaccacctacgagccggtggtatttatctataacaaacggctgatcccgcagaatgaggttccggattcgcataccgcgctggcaaaattgatcgccagccaggccgataaatttaaaggcaaagtcaccacctacgatatcgaaaaatcgggcctcggctttatgctggcggtgcaggacagccaggccgacgcgaactattttaccgacctggcgaatatcgccaaaggcggcctgacggtgcagtcttccaccggcacgatgatggagcgcgtctcctctggcgaaaacctgatcggctataacatccttggctcctatgcggaagcgcgggcgaaaaacgatccctctttaggcattgcctatccgaaagattacgtgctggtgctctcccgcgtctcgtttattagccaggagagcgaacatcccaatgcggcaaaattgtggctggactatgtcctgtcggaaaaaggccagcagatcctcgccagccaggcggatattccctctattcgtcgcgatattgaaggcaaaaatgatatcgacggcatgaccgcgctgctgggcaaagcgttaaaaccgatcccggtcaacgaaacgctgctggattatttacagccgcaaaaacgtctgcagtttattaaacaatggcgcagcgccgccgcgaaataatcctcccccggggcatcgccgatgccccttattcacacccggcgggtttattcacctgaccaaagggatgaaccatgaatgtattacgcagaaagtggcaggggctgccgcgcggcgtggtggtgtgcatcacggcgctggtgatttatgtcccgctgttatttattgtggtgcagagttttctctccgcgccgttcttttcccgctccaaatcctggagcctggaagccttcgcctttatttttaccgacccggatttttatctggcgttaaggtcaggctttattctggcctttggcctggtgattatcgccattccactgggcggtattttggcctttctgatggtacgcaccgatttacccggccggcggttcattgagccgctgatcctggtgccgatcttcgtctcgccgatggtgctgggctttggctacgtggtggccgccgggccggtaggcttcttttcccagtgggcgcagcagctgatcggctttgtgccgtggaatatctactcgatgttcagcattgtggtcatcgccggcttaacccacgtgccgcacgcctatctttatatctcttcggcgctgcgcagcgtcggttccgacgtggaagaggcggcgcgcaccgtcggcgccacgccgctgcaggtgatgacctcggtgagtctgccgatggtgcggccgtccatcctttacgcctgcgtgctgctcttcttcctcggtctggaggttttcggtctgatgctggtgctgggcgaccccgagggcaacatggtgctggcgacctatctctataagctgaccaacaagctcggcaccccctcctaccatctgatggcggcggtggcggtggtgctgatctgcatcaccatcccgctggtgatgctccagaggcggctgatgcgcaccgccaaccgctttgtcaccatgaagggcaaggcgtcgcaggcgcgggcgctgccgctgggtaaatggcgttgggtggccggggcggtggtggtggcctggctgacggtgaccatcggcgtgccgctgctcggcgtggcgctgcgggcctttatctccaactggggcgtcggcgtgtcgctgtgggatgagctgtcgctgacgacgttccacaatatctggcagcagcccaacctgctgcgggcgatcgtcaactcgatggctatcggcatcgtcggcggcgcgctggcggtgatctgctatctgtttgtcggtatcgccatgcaccgcaaagcggacaacgtcacccgctttcttgattacagcgtactggtcccgcgcgcggtgccggggctgctggccggtctggccttcctgtgggtgttcctgtttgtgccgatgtggctcgatcagtcgctgaagcacggctggctctcggcgctgccggtggccgactggctgcgggagcaccttatcgtgcagctgcgcgcgctgcgcaacaccatcttcagcgtctggctggcctacaccgtggtatggatggcttatggcctgcggctcatctcttcgacgctgctgcaggtgggcccggagctggaggaggcggcgcgcagcaccggcgcctcgcgggggcagatcacccgccacgtcaccgttcctctgtcgcgctatgggctgattggctcctggctgctgatgttcctgatctttgagcgcgagtattccaccggcgtctatctgctgtcgccgggtaccgaaaccatcggctcgatgctggtgtcgctgtgggcggcgggggccatcgatatcgtcgcggcgctctcctttatcaatattctgctggtggtgattggcctgggtatcgccctgcgctttggagtgaaattacatgattgagttatcggtagaaaatctgcatctcacctatggcgacaacccggtgctgaagggggtgtccatgacgcttggccggggagaggtggtgtcgttgctggggccttcgggaagcgggaaaaccacgctgctgcgggcggtggccgggctggaaaaaccgacgagcggacggatcgccatcggcaaccgcacggtgtacgacggcacgccgcgcagcgagatcccggccgaagagcgtaacctcggcctggtcttccagtcctatgccctgtggccgcacaaaacggtgttcgacaatgtggcctatccgctgaagctgcgtaaagtggccgccggggagataaaagagcgggtgcagcgtgtgctggatcagctggggctggggcaccttggcaaccgccatccgcaccagctctccggtggccagcagcagcgggtggccatcggtcgggcgctggtttacaacccgccggtgatcctgctggatgaaccgctctccaaccttgacgccaagctgcgcgaagaggcgcgggtgtttctgcgcgagctgatcattaagctgggcctctcggcgctgatggtcacccacgatcagaatgaagcaatggccatctccgatcgtattctgctgctgaacaatggcgtcattgagcagcaggggacgccgcaggagatgtacggcagcccggcgacgctgttcgccgctgagtttatgggcagcaataactgcctgcacggcaaagtgatggcgctggagaacggcagggcgcggatcgaaggcgccagctggagcctgtgggggcgagcgggcgagggggttagcgttggcgagccggcgacggcggtgatccgcgtcgagcgcctgcgacttgacggcgccgcgcaggataatagcctccagctaccgctgctgaccagcatgtacctcggcgaccgctgggagtacctgttccgtaccgaaggcgacgactttccgctgcgcgcctacggaacggcgctgcgcgatgccgaacactgccatctgacgctcccggcggaggatgtgtggatttttccgcagcggtagccgcccgttaccccgccagatggcacacggcttcaatattgtgcccgtctggcgcaatcacaaacgcggcgtagtaactggcgtggtagtttggccgtagccccggcgcgccgttgtcctttcctccggcggccagcgccgcctgccagaaggcatcgacctgctcgcggctgtcggcgcgaaaggcaatgtgcagcggcgccggtttttccgcactttgatagaggcatagagaagcatcgccgctgccggccagctctgcgccgtagctcggttcgccttcgccaaccagcgttacgccaagcggggccagggcctgcaaaaagaacgctttgctggcggcatagtcgctaacgccgaatttcacatgatcgaacatatcttctcttctcctgtggatgggatatcgccagctgaaggcgctagccggacaatagatacaagatagttaacaacggttattaacttttttaacagctcaaaatgtttaattattcctaatacgagtatttacagacgtttaatctgccatgtaccataaacaaaaaataacatttgtgatacaagtcactcttttttggcgcatgggtaagctcagcgcggtgtgaatgccgctggtttaccgcctcaaggttatggcagcactcttctcacgatgacagaccggtgaatttctctccgatttcccgcgtttcgttgagaatcgtctactatccaaacgataaccctataaatgatatcgcctctggcgatgttttatccgacttgccgggccgggccagacgctaagcggtttaaaagcgcaatggtatcggttccagcacgacattcactggttttgtcagcgacaaaaacagtaattttcaatgacaggaatgtgatgatgtcgagcgagaaaaccaacaattccaggcgtgatttcctggtgaaatcgatggcgctgatcccgacggtggtgatcggcggcgcgggagcaggggctattggcgtggccaccagcgcgaccgcgcaggcggcccccgcttcagagccagcctccgggaacaccgcggcggccagcgactggaagccgcagttcttcaacgatcgtgagtgggcgtttatcaacgccgccgtcgctcgcttaatcccggcggatgaactcggtcccggcgccaaagaggccggcgtgccggagtttatcgaccgccagctcaataccccttacgccaccggctccatctggtatatgcaggggcccttcaatcccgacgtgccgaaagagatgggttatcagctgccgttggtgcccaaacagatctataacctcgggatcgccgacgccgaggcgtggtgtcaggacaaatatcataaaaccttcgctgaactgagcagcgagcagcaggacgaggcgctcggcctgtgggaatcgggtaaagccgagttcaaacagctgccggcctcactgttcttcacctatctgctgcaaaacacccgcgaagggttcttcagcgacccgatccatggcggcaataaaggcatggtcggctggacgctgattaattttcccggcgcgcgcgccgactttatggactgggttgaacggggcgaacgctaccccttcccgccggtatcaattaatggggagagggcgtaatcatggccaccgtattgaaaaaaaccgatgtcgcgatcgtcggcttcggctgggttggggcgatcatggccaaagagctgaccgaagcggggctcaacgtcgtcgcgctggagcgcggcccgatgcgcgacacctggccggacggcgcctatccgcaggtgattgatgagctgacctacaacatccgccgcaagctgttccaggatctgtcgaaaagcaccgtcaccatccggcataacaccagccagcaggcggtgccctatcgccagctggcggccttcctgccgggtaccggcgtgggcggcgccgggctgcactggtccggcgtccatttccgcgtcgatcccatcgaactgcggatgcgcagccactatgaagaacgctacggcaaaaacttcatcccccaggatatgatcatccaggatttcggcgtcacctacgacgagctggaaccgttcttcgataaagcggaaaaagtattcggtacctccgggaccgcctggtcgatcaaaggcaaggtcgtcggcaaaggccgcggcggcaacgccttcgccccggaccgctcggacgacttcccgctgccggcgcagaaaaacacctggtcggcgcagctgtttgaaaaagcggcgctggaagtggggtatcacccctataacctgccgtcggccaacacctccgactcctataccaacccctacggcgcgcagatgggcccgtgcaacttctgcggtttctgcagcggctacgcctgctacatgtactctaaagcctcgccgaacgtgaacattctgccggcgctgcgccaggaaaaacgctttgagctgcggaccaacgccaacgtgctgaaggtcaacctgaccgacgacaaatcccgcgccaccggcgtgacctacgtcgacggccaggggcgcgaaatggaacagccggcggacctggtgattgtcggcgccttccagttccacaacgtgcacctgatgctgctctccgggatcggcaaaccgtacaatccggagaccggcgaaggggtggtggggcgtaacttcgcctaccagaacatgaccaccatcaaggccattttcgacaaagacacctataccaacccgtttatcggcgcgggcggcaacggcgtcggggtcgacgacttcaacgccgacaacttcgaccacggcgcggcgggctttgtcggcggttcgccattctgggtcaaccaggccgggaccaagcccatctccggtttcccggtaccgccgggcaccccggcgtggggcagcaagtggaaagcggcggtggccgacacctacacccatcacctgtcgatggatgcccacggcgcgcaccagtcctatcggcagaactacctcgatcttgatccgaactacaaaaacgtctttggccagccgctgctgcgcatgaccttcgactggcaggaaaacgacatcaagatggcgcagtttatgttcgataagatggcgccgatcgccaaagcgatgaagccgaaatatatcctcggcagcccaaaaaacgccaacagccactttgataccaccacctaccagaccacccatatgaacggtggggcggtgatgggggaagatccgaaaaccagcgccgttaaccgttatctgcaaagctgggacgtgcataacgtcttcgtcatcggcgcctccgcgttcccgcaggggctgggctacaacccaaccggcacggtggccgcgctggcctactggtcagcgaaggcgatccgtgagcagtatctgaaaaatccgggtcccctggtgcaggcataaaggaaggcagatgatgaaaatgcaatggttatcggccctggtgcttggggcattgagctgcgcggcttttgccgaagaggcgcctgcggacagcaatctgattaagcagggggagtatctggcgcgggcgggggactgtgtcgcctgccacaccaacggcaaagcggggaaacctttcgccggcggtttgccgatggagacgccgatcggcaccatctactccaccaatatcacgccggataaagaacacggcatcggcgggtacaccttcgaagaattcgacgacgcggtgcgcaagggcgtgcggaaagacggttccacgctctatccggcgatgccgtatccctcgttcgcgcggatcagcgaagcggacatgcgcgccatgtacgcctactttatgcacggcgtggagccggtgaatgtcgccaacaaggacaccgacatcccatggccgctgtcgatgcgctggccgctggcgttctggcgcggcatcttcgccccgacgccgagcgactttgtcgccaacccgcaggttgacccggtgctcgagcgcggccgctatctggtggaaggcctgggccactgcggcgcctgtcataccccgcgtagcctgacgatgcaggaaaaagcgctcagcgaaagcgaaggcgatgattacctggcgggcagcaatgcgccgattgacggctgggtcgcctccagcctgcgcggcgaaaaccgcgacggtctggggacctggagcgaagccgagctggccgagttcctcaaaaccggacgcaacgataaatcggtggtcttcggcggcatgagcgatgtggtggagcacagtctgcagtatctctctgatgacgacatcaccgccatcgcccgctacctgaaatcgctcccgccgcgcggcggcaaacagaccccagccccggtggaagacagcgtggcgaaagatctgtggaagggtaacgacagcaaaaccggcgccgcgctgtatgtcgataactgcgccgcctgccaccgcaccgacggcgtaggctataagcgcgccttcccgtcgctgaagggcaatccggtggtccagaccgaagatgccacttcgcttatccacatcgttctgaccgggagcaccacgccggcggtgaaagatgcagtctccaacctgaccatgccgtcgttcggctggcgcctggacgaccagcaggtggcggatgtggtcaatttcatccgcaccagctggggcaacaacgcgccggcggtcagcgccagcgatgtggcgaaggtgcgtaaggagaccgcggcgcacgatgagaaggcgttaggcaacgccgatatctcgaagctgccgggggccggacagtaaccgtcagggttgcgtcgcccgcgcggcgcaacccatacttagcgacgacgtaaaatactgtctgaatcaaggagtttgccttcatgctgcatgcagagcgactgacctgcatcgttgacgatcgaccgctgtttgcggcgctgacgctgtccctcgctgccggcgagctgctgcaggtcgccggtgataacggtgcggggaaaacctcgctgctgcggatcctctgcggcctggcgcgcccggaaagcggggtggtgagttggcagggccagccgctggcgaaggtccgggagtcatttcaccgtcagctgctgtggctgggccataaacccggcgttaacgcggcgctgaccgccgatgaaaacctgcgtttcttctttccggccagccgccttcagcagcgggaaagcgccctcgctgccgtcggcctggcgggctatgaagatctccccttgagccagctctccgccgggcagcagcgtcgggtggcgcttacccgcctgtggttaaccgacgcgccgctgtggatcctcgatgagccgttcaccgccctcgacgccacggcgatggaaaacctgacccgtcgcctggagcagcacgcccggcaggggggatgcgccatcctcaccacccaccagccgctgcggccgctgggctgtccgttgcgcaccctgcgcctcggcggcgacgctggaggcgggcaatgatgcgtgcgctgttggcccgggaactgcgcctggcgtggcgcagcggggcggagatcctcaatccgctctggttctttctgatcgtcatcaccctgtttccgttcggcgtaggcgccgcgccgcagctgctggcgcagattgcgccgggcgtggtgtgggtcgccgcgctgctggcggcgctgctggtgatggatcggttgtttcgcgacgactggcaggacggttccctggagcaactgatgctcctgccgacgccgctggtggcggtggtgctggtgaaggtggttgcccactggatgatgagcggcctgccgctgctgatcgtctcgccgctggcggcgctgctgctggggatgagtctgcatgacgccggtgtgctggcgctgaccttgctgcttggcaccccgacgctcagttttctcggcgcggtgggggttggcctgacggtcggcctgaagcgcggcggcgtcctgctgagcctgctggtgctgccgctggcggtgccgctgctgattttcgccaccgcggcctgccaggcggcggccgccgggctcccggtcagcggctatctggcgatgctggcggcgttcttaaccgccagcgccaccctgtgtccgttcgccaccgccgctgcgctgcggctgaccgtgcgataactcgctgcgcctgcgggcgcggccatcataaccgtgtgagtaagcgtctatgtggaaagcgttacatcaactggcgatccccgagcggctgtaccgcctgtgcggatgctggatcccctggctggcggcgttgagcgcgctgttgctggtcatcggcctggggtggggctttggcttcgcccccgcggactatcagcagggggaaagctaccggatcatgtaccttcacgttccgacggcgatgtggtcgatggggctgtacctggcgatggccgtcgcggccttcgtcggggtggtctggcagatcaaaatggccgatctggcgatcgccgccctggcgccggtgggggcggtctgcaccctggtggcgctggtcagcggcgcggcatggggcaagccgatgtgggggacctggtggatctgggacgcccgcctgacctcagagctggtgctgctgtttctgtatgccggggtcatcgccctgtggcacgcctttgacgaccggcggctggccgggcgcgcggcggggatccttgtgctggtcggggtggtcaatctgcccatcattcattactcggtctactggtggaacaccctgcaccagggctcgaccaacctgcagcaaaccatcgacccaagcatgcgtctgccgctgcggatctgcatctttgccttcctcacgctgtcggtcaccctgaccctgatgcgcctgcgtaacctgatcctgcaactggagcgccgtcgaccgtgggtggtggcgctggtgaataaaggagccgcccgatgagccccgccttttcgtctttcgccgccttcctgaatatgggcggctatgccgtgtacgtctggctggcggtggccgtgaccgtcgccgcttttggcctgctgacggtgcataccctgtgggcgcggcgggcgctgttccatgaggtgcgacgccagcaggcgcgcgagcggcggatcgctgccgcccgcgaacatgacaaggaggccgcggatgcaagcgcgtcgtaaaacccggctgtatatcgtgctggcggtgctcgccggacttgggctcaccgtcagcctgacgctatacgccctgagcagcaatatcgatctgttctacaccccgggggaaattatctacggcaaaacggaaacccgggcgctaccccataccgggcagcgcctgcgggtggggggctacgttcagccgggctccctgcagcgcgacccgcaaaccctcgacgtgcgctttaagctgtatgacgcccgcggggtggtggacgtcagctataagggcattctgccggacctgtttcgtgaagggcagggcgtggtggcccagggcgtgctggacggcgagcggcatattaccgcccagcaggtgctggccaaacatgatgaaaattacacgccgccggaggtgaaaaacgccatgacgccggagaaaacgggggcgcagccatgatgccggagctgggcaactttttattgtgtctggcggcggggctggcgctgctcctgagcgtctatcccctgtggggcgcggcgcggcaggatcggcggctgatggccctggcgcggccgctggcctgtgggctattcgcctgtatcggcggcgccttcctgctgctggtgcacgcctttgtggtcaatgattttaccgtcctctacgtggcggaaaactctaacagcgcgctgccggtgtggtatcgggtggcggcgacctggggggcgcacgagggctcgctgctgctgtgggttctgctgctcagcgtctggaccttcgccgtcgccatcttcagccgccggatgccgctcgacgccgtcgcccgggtgctggcggtgatggggatgatcgcctttggtttcctgctgtttatcctcttcacctccaatccgttcagccgcggcctgccgcagtaccccattgatggccgcgacctcaatccgctgctgcaggatatcggcatgattttccatccgccgatcctctatatgggttacgtcggcttctcggtggctttcgccttcgccatcgcctcgctgctggcgggccggctggatactgcctgggcgcgctggtcgcgtccctggacccaggcggcatggatgttcctcaccctcggcatcgtgctgggctcggcgtgggcatactacgaactgggctggggcggctggtggttctgggacccggtggaaaacgcctcgtttatgccgtggctggtgggaaccgcgctgctgcactccctggcggtgaccgaaaagcggggcagcttccgcgcctggacggtgctgctggccatcgccgccttctccctgtgcctgctgggcaccttcctggtgcgctccggggtgctggtttcggtgcatgccttcgcctcggatccgtcgcgcgggctgtttattctggtactgctgattgtcgccatcggcggatcgctgctgctgtacgccctgaagggcggccgggtgcgggcgcgggtggaacatacgctttggtcgcgcgagacgttcctgcttggcaacaatatcttgctgatggccgcgatgctggtggtgctcctcggaacgctgctgccgctggtgcataaagagctgggcctcggcagcatctccatcggcgagccgttctttaacaccatgttcaccgccctgatggcgccgtttgcgctgctgctggggctggggccgctgatccgctggcggcgcgatgacgtcgccaggcagattaagcgcctgattatcgctctgctggtgacgttgtcactttctctggcgctgccgtggctgctgcaggaccgtatcaccgccatggcggtcattggcctgatgatggccctgtgggtgctgatcttcgccctgatggaggttcacgaacgggccacccaccgccatgctttctggcgcggcctgcgcacgctgacccgcagccagtgggggatggtgctcggtcacgttggcgtggcggtgaccgttatcggcatcaccttcagccagaactacagcgtggagcgcgatgtacggatgcgccccggcgacagcatcgatatccaccgctatcactttgtgtttaacggcgtgcgcaatatcgtcggccccaactggaccggcggcgaaggcattatcgccgtgacccgcaacggccgcccggaagcgacgctgtatgccgagaagcgcttttacaccgccagccggatgatgatgaccgaggcggcgatcagcggcgggctgacccgcgatctgtacgccgcgctgggggaagagctgagcgacggcagctgggcggtgcgtctgtactataaaccgttcgttcgctggatctggtacggcggggtgctgatggccctcggcggtctgtgctgcatgctcgacccgcgctaccggatgcgtaagaagctgcaggaggcctcatgaaccggaagctactgtttatcccgctggtgctgtttctggcgctggccgccgcgctgttctggcagctgatgcgcaacgccgatggcgatgacccgacgaccctcgagtcggcgctgattggcaaaccgctgccggaatttcgccttgaagcgctgaatacccccggtcagacgctggaccgacggacgctgattgacggcaagccgctgctgctcaacgtctgggccacctggtgtccaacctgtcgcgccgagcatcagtttctcaacggcctggcgcagcagggcgtgcgggtggtggggatgaactacaaagacgatcgccagaaggcgatgagctggctgcagcgcctgggtaatccctacaggctgagcctctacgacggcaacggcatgcttggcctggatctcggggtctatggcgcgccggagacgtttctcatcgacggtcagggcattatccgctggcggcacgccggcgacctgaacgaacgggtgtggcgcgaggagctccagccgctgtgggatcaatacaaccggagggcgggctgatgagaagtgtaatagtcatcctgctggcgctgatgctgaccggccaggcgtgggccgccatcgatacctggcagtttaaggatgaggcccaggagcaggccttccgcgagatcacctcccaactgcgctgcccgaaatgccagaacaacagcatcgccgactcaaacgcgatgattgccgctgatatgcggcagaaggtgtacgagctgatgcagcagggtaaaacgaaagggcagatcgttgactatatggtggcccgctacggtcattttgtcagctacgagccgccgctgaccgcgggcacggtgctgctgtggctggggccggggttgttcgtgctggcgggcgcgggtgtgattatcgcccgcgcgcgccgtcgcgacattcctgacgcggcgctcagcgccgaagagcgccagcggctggcggcattattgcaagaaggaaaagaacgatgagcctgttggtggttatcgtcgcgctgctgctggctggcgcgctggggctgctgtacttcccgtggtcgggcaaaggggcggtagaccgcgatgccctcaaccgcgccctgtaccagtcgcgcctgcaggagctggcgcaggagcgcggcgaggacaacccggcgctggtcgtcgaactgcagcgcaccctgctgacggatattccgccccaggcacagcctggcgaacggccgctacgccgctgggcgctgcttccgggcgcgctgctgctggtggtcctgagtctgggcctgtatctgaaaaccagcgatattggtcaggtgctgctctggcagcaggctgaacgacattatcctgcactgttgcagcaggttaaggacccgacggcggcgccgctgcgaatggatgagctggcggagctgcggcttggcctgcgcagccacctgcaggataccccgaacgacctcgccggctggcagctgcttgggcggctgggcctgttgttaaacgatggcgagacggcgatcagcgcctttggccgggcgcatgctctggcggcggacgacccggcggcggctttcgattacgccagcgcgctggtgcgggcgggggatagcggtcaggttcggatgggcgagctgctgctgcgcgacctgcatcagcggcagccgaacagcctgccggtgctggagatgctggccctgagcgcggtgcgcaatgaagattaccccgaggccgtggcggccctgcaggcgttgctggcccggctgccggaaggggatgcgcggcgcgcggcgattgtccgccagctggcgcaagcgcagcagcaggcgcagtgactgtccggcggcgctacgcttgcgcgggcctacgaagggcgcgaatagagcgccaaatcgcgggtagcctttgtaggccgggtaagcgaagcgccacccggcaacatgttgggctcggagcctgatttcttgccggagacggttatcggttttcctggttctcagcccgggaaagcgtttctcacgcgtgacttcagcgtactctgtgctcccgcttcgtggtgctgcacctggttctccgtggcgcagggagcgtcatggaacggcaacgactgccgtacggttctctctccctccggaagaaggcctgggtgagggaaagcactgccgggaagtcttttatgttatctgtggcttcagcgtattttgcgctcccggttaatcttctgcgttatgcctggcatggcgcagggagcgcacagggggcggccagtcgccgccgccccctgtacccccgggctccggccagcaaaatcgccgctacgcggtcccttcgacttatccctgcaggcttcgggtcgggccgaggcagcgtccgtgcaaaacacggccctcagcccgcatccatgcgggctgcccggccttccgggaacgtctcagcgattttgaggccgcaacaccggcagtttcagcaacaatggtgaataaattaacgacaagtcgcacggaccgtaggccgggtaagtcgcagccgccacccggcacaaaagcggctccgcacccgctgcccttgcccggcggcgctacgcttgcgcgggcctacgaagggcgcgaattgagcgccaaatcaccgggccgggtaaggcgtagctgtcaccaggcagaataacggcacaacagcgtagcccggattaggcgccatgcgccgccatccgggattttctctgctggcgctgtcatgccgctgacgcggctttcagaagcctctcgatg

SEQ ID NO: 5372 - DNA, 35939 bp, Unknown
  gut microbiota DNA sequence
tgtctctcgcgtctgcaggagatgcagagcgaagagtacctcaaacgtccgcatatgccctgacaggggactttttcaggcggattcagggccgtaaggccgccccgggcgcggcctgaaaaatctcataaaggggtcgatctttgaccccgacttctctataatcttgcgaccccacgttacgagaaggtttttttcccgaaactttctatgcgccggcataggctattcgaaggggtaggtttgctggacaatgtcgtgtgaacctcaactgactaaacgtttgggtgttcaccaacgtgtaacttattatttgggtaagcttttaatgaaaacttttacagctaaaccagaaaccgtaaaacgcgactggtatgttgttgacgcgaccggtaaaactctgggccgtctggctactgaactggctcgtcgcctgcgcggtaagcacaaagcggaatacactccgcacgttgataccggtgattacatcatcgttctgaacgcagaaaaagttgctgttaccggcaacaagcgcgaagacaaaatgtactaccaccacaccggccacatcggtggtatcaaagaagcgacctttgaagagatgattgcccgccgtcctgagcgtgtgattgaaatcgcggttaaaggcatgctgccaaaaggcccgctgggtcgtgctatgtaccgtaaactgaaagtttacgcgggtaacgagcacaaccacgcggcacagcaaccgcaagttcttgacatctaatcgggattataggcaatggctgaaaatcaatactacggcactggtcgccgcaaaagttccgcagctcgcgttttcatcaaaccgggcaacggtaaaatcgttatcaaccagcgttctctggaacagtacttcggtcgtgaaactgcccgcatggtagttcgtcagccgctggaactggtcgacatggttgagaaactggatctgtacatcactgttaaaggtggtggtatctctggtcaggctggtgcgatccgtcacggtatcacccgcgctctgatggagtacgacgagtccctgcgttccgaactgcgtaaagctggcttcgttactcgtgacgctcgtcaggttgaacgtaagaaagtcggtctgcgtaaagcacgtcgtcgtccgcagttctccaaacgttaattgttttctgctcacgcagaacaatttgcgaaaaaacccgcttcggcgggtttttttatggataaaacggctgttatccacaagcatagcgccggttctcgccactttttcagcatttccagaatcccctcaccacaacgtcttcaaaatctggtaaactatcatccaattttctgcccaaatgctggtgattgttcattttttgttttattcgtgaacgaaggtgacatcgcgctaatggggtttttacatctggctggtcatgagtggccggcagcagtacaaaattctgaatatacctggaggttttcatggctgtcgctgccaacaaacgttcggtaatgacgctgttttctggtcctactgacatctatagccatcaggtccgcattgtgctggccgagaagggtgtcagttttgagatagagcacgtggagaaggataacccgcctcaggatctgattgacctcaacccgaatcaaagcgtaccgacgctggtggatcgtgagctcactctgtgggaatcccgcatcattatggagtatctggatgagcgtttcccgcacccgccgttaatgccggtttatccggtggcgcgtggtgaaagccgcctgtatatgcaacgtatcgagaaggactggtattcgctgatgaacaccatccagagcggtaccgcagcgcaagctgatgctgcgcgtaagcagttgcgtgaagaattgctggccatcgcgccggtcttcacccagaaaccttacttcctgagcgatgagttcagcctggtggactgctacctggcgccgctgctgtggcgtctgccggttcttggtgtggagctggttggcgctggtgcgaaagagctcaaaggctatatgactcgcgtatttgagcgtgattccttcctcgcttctttaactgaagccgagcgtgaaatgcgcctcggtcggggctaaataatggatgtatcacagctgacgccgcgtcgcccgtatctgttacgggcgttttatgactggctgctggataaccagctgacgccgcacctggtggtggatgtgacgctgccgggcgtgctcgtgccgatggagtacgcgcgcgatgggcaaatcgttctcaatattgccccgcgtgcggtaggcaatctcgagctggcgaacgacgaagtgcgcttcaacgcgcgctttggcggggtaccacgcaacgtgtctgtcccgctggctgcggtactcgccatctacgcccgtgagaacggcgctggtacgatgttcgaaccggaagcggcctatgacgaagacgtcagcagcctcaacgatgatgacgtcgcgccggagagtgaaagcgatacggtgatgtcggtgatcgatggcgataagccggataatcacgacgacgatcctgacgacacgccgccgccgcgcggtggtcgcccggcgctgcgcgtggtgaagtaaatcccttctctgacaggccctgcggggcctgtttttttgtctgtccgctttgttaactctgccacaaacgaggcgtcccatggctggtatcgtcatcgccacaggtagtttttagggagcagacatgtctttactcgcacaactggaccagcgtatccgtcatcatggcggattaattgtctcctgccagccggtgccgggcagtccgctggataatcccgctatcgtcgcggcaatggcgctggcggctgagcaggcgggagcggtagcgctgcgcatcgaaggcctggccaacctgcaggccgttcgtccgttagtgacggtgcccgttattgggttgatcaaacgcgatttgcccgatagcccggtgcgtattacgccatggctggaagatatcgacgcgctggcgcagggcggagcggatattattgctattgacggcacccagcgtcagcgtccggcgtcagtgtcggcgctattagcagaaattcatcagctggggaaagtggcgatggccgattgctcatctctcgacgatgccctcgagtgctggcagttgggggctgagattgtcggcacgactctctccggctataccgcagaggagacgccggatgagccggatctggcgctggtgcaatgcctgagcgttgcgggctgcagagtgattgccgaagggcgctataacacgcctgcccaggcggcggaggcgatgcgctgcggcgcgtgggcggtgaccgtcggctcggcgattacccgcctggagcatatctgcggctggtataatacggcgctgaaagcggcggtttgcccggcgaatgagcaataaaaaagcccgatgacgttaaccatcgggcttttatgcgtgaggctccggacctaatcagacttcaaggtagttgaggatcccgtccgccgctttacggccttcggcaatcgcggtgaccaccagatcggaaccgcgaacgatatcgccaccggcgaagattttcgggttgctggtctggaaggcgttttcgctgccttccggggcgataatacggccctgggagtccagctcgacgctgtgcttcgccagccactccatgctgtgcggacggaagccaaacgccatgactacggcgtcagccggcaccacgtgctcagagccggggacgatctccgcgcggcggcggcccttcgcatccggctggcccatttcggtgcgcgccatcttcacgccgcaaaccttaccgttggcattcacttccacgcccagcggctggacgttaaactggaactcaacgccttcttcgcgcgcgtttttcacttcgcgttttgagccgggcatgttctcttcgtcacggcgataggcgcagatcacgtgcgccgcattctgacggacggaggtgcgtacgcagtccatcgcggtgtcgccaccgccgagcaccaccacgcgtttgccttccatgctgacatagggctcatcggcggtttcaccaaagcccatgatctgcttagtgttagcgatcaggaacggcagcgcgtcgtaaacacccggggcgtcttcgttgtccagtccaccgcgcatcgactgataggtcccgacgccgaggaacaccgcatcgtactccttcagcaggtcgtcgagctgcacgtcgcggcccacttcggtattgagtttgaactcaatgcccatgccggtgaagatctcccggcggcgggtcatcacctctttttccagcttgaacgctgggataccgaaggtcagcaggccgccgatttccggatggcggtcaaataccaccgccttgacgccgttacgggtcagcacgtcggcgcaggcgaggcccgccgggccagcgccgatgatcgcgacggttttaccggtcggcttcacgtcggagagatccggacgccagcccatctcgaatgccttatcgttgatatagcgttcgatgttgccgatggtcaccgcgccgaactcatcgttcagcgtacaggagccttcacacaggcggtcctgcgggcagacgcgcccgcagacttccggcagagtgttggtttgatgcgacagctcggccgcttcaaaaatacgcccctcgttggccagcttcagccagttcgggatgtagttatgcaccgggcacttccattcgcagtacgggttgccacaggagaggcagcgatccgcctgcgccttggcctggccttctgaaaacggctcgtaaatttccacaaactcaattttacggatcttcagcggtttctttggcggatcaacgcgctgcaggtcgataaattgataaacgttctgactcatcttaaccccttactgcgcctgcacccgcagctcagctgcggaacgactacggtgacccaacagtgctttaacatcgctggactttggtttaaccagcgcaaacttcgcggagaaggccggccagttggcgaggatctcttcgccgcgttgcgaaccggtaagctgtacgtgctcggtgattaaaccgcgcaggtgctcttcatggatggccagagaatcaacgtccagcacttccaccagctccgggttcacgcgtttgcggaagtcgccatcttcatccaggacataggcaaagccgccggtcatccctgcgccaaagttgacgccggtttttccgagcacgcagacgatgccgccggtcatatattcgcagccgttgtcgccgatgccttccaccacggtgatggcgccggagttacgcacggcgaaacgctcgcccgcgcggcctgcggcgtacagacgaccaccggtcgcgccgtacaggcaggtgttgccgataatactggcttcatggctgcggaacgcagagcccaccggcggacgaatggccagcagaccgcccgccatgcctttcccgacgtagtcgttggcgtcgccagtcagatgcagttccacgccgccggcgttccacacgccgaagctctggcccgcggtgccgctaaagtgagcgacgatcgggtcgcccgccagtccctggtcgccatgggtctgggcgatatacccggacagcgaggcccccacggagcggtcggtgttacggatatcaaaccagaacgtcttgctctgcttttcatccacgtacggtttcgcctgctgcagcagctgggcgttgagcacgccgttatcgaacggtgggttgttctcggtgcagtacagcgctttgcccggatgcggctctgcggtctccagcagtttacccagatccagtttctgctgcttggcggtgaacccatccagctctttgagcagatcggtgcggccaatcagatccaccagacgcttgacgcccagctgggccatcagctcgcgggtctcacgggcgataaattcaaagtagttggtcactttgaacggcagaccgtgatagtgattcttacgcagtttgtcatcctgggtcgccacgccggtagcgcagttgttcaggtggcaaatacgcaggtatttacagcccagcgcgaccatcgggccggtaccgaaaccgaagctctccgcgccgaggatcgccgctttgatgatatcgagaccggttttcaggccgccatccacctgcagacggatcttatgacgtagaccgttagcgaccagcgcctgctgggtttccaccaggccgagctcccacggacagccggcatatttcaccgaagagagcgggctcgccccggtgccgccgtcgtagccggcgatggtgatcaggtcggcataggctttggccacgccggtggcgatggtgccaacgcccggctcagaaaccagtttgaccgaaatcatcgctttcggattgacctgcttgaggtcgaaaatcagctgcgccagatcctcgatagagtagatatcgtggtgcggcggcggggaaatcagcgtgacgcccggtaccgaatagcgcagtttagcgatgtacggggtgactttatcacccggcagctggccaccttcacccggtttcgccccctgggcgactttgatctggatgacgtcggcattgaccaggtaggctggcgtgacgccgaagcggccggacgcgacctgcttgatgcgcgacactttattagtgccgtagcgcgccgggtcttcaccgccttcaccggagttggagaagccgccgatgctgttcatcgcttccgccagcgactcgtgcgcttccgggctcagggcgccgatcgacatcgccgcggtatcgaagcgtttaaacagctccttcgccggctctacttcgtcgatgctgatagcgtcttcgcctgggttgagcgccagcaggtcgcgcagcgtggccgctggacgttcgttaaccaatttcgcgtattgttgataatcgctgtattcgccgctctgcacggcctgctgcagggtgcgcaccacgtccgggttgtaggcatgatattcgccgccgtgcacatatttcagcaaaccgccctgggccagcggcttacgcgccagccaggcgcgtttcgacagattcagcagatcctgctggaagtcgtcgaagctggcgccgccgatgcggctgaccacgccctggaagcagagatcggagacatcgcgatgcagaccgaccgcttcgaacagcttcgagcagcggtaggaggcgatggtcgagatccccatcttggacatgatcttatacagacctttattgataccgttgcgatagttcagcatcaccgcacggtacggtttatcgatggctttgctgtcgaccagcttcgccagcgtttcgtaggcgaggtatggatagatagccgtcgccccaaagccgagcagcacggcgaagtggtgcggatcgcgggcgctggcggtttcaacgatgatgttggcatcgcagcgcaggcttttatcgaccagacgggtctggatcgcgccaacggccatcggcgccggtaccggcagacggtctttggcgatgttgcggtcagagagcaccagcagcacggtgccgtcgcgcaccatttgctccgctttatcgcacagcgctttcaccgtctcgctgagggaggcctctgccgggttgaacgtgatatcgaggacgtcggcgcgatagtgctcttcttccatcgtcgtcagctgtttaaaatcggagtacagcaggatcggcgatttgaagctcagacgatgcgcctggccttccgcttcgcagaagacgttcatttcgcggccgatgctggtagccagcgacatgacgtgcgcttcgcgcagcgggtcgatcggcgggttagtcacctgggcgaactgctgacggaagtaatcgtagataatgcgcggctggctggagagcacggcgaaaggcgtgtcatcgcccatcgaaccgactgcttcctggccattttcgccgagcacgcgcaggacggagtccagctcttccgcgctgtagttaaactgtttctggtagctggcgagcgtgtcgtcatccagctggcgactgccaacctcttcgtccggcagatcttcgaacggcaccaggcgacgaacgtttttctccatccactctttatacgggtggcggctcttcagatcgtcatcggtttccgctgagtgcagaatgcgtccggcacgggtatcgataaccatcagctcgcccgggcccacgcggcctttctcgaccacttcgtcaggctggtaatcccagatgccgacttcggaggcgcaggtgatgagcttatctttggtaatgacgtagcgcgccgggcgcagaccgttacggtcgaggttacaggccgcgtagcggccatctgacatgacgatgcccgccgggccgtcccacggctccatatgcatggagttaaagtcgaagaacgaacgcagctccggatccatatccgggttgttctgccaggctggcggcaccagcagacgcatggcgcgcacgatgtccatcccgccggccagcagcagctccagcatgttgtccatagaactggagtcggagccggtttcgttaacgaacggcgcggcgtcgtgcaggtctgggatcagcggggtctggaacttataggtacgggcgcgggcccactggcggttgccggtaatggtgttaatttcaccgttgtgcgccaggtagcggaacggctgcgccaacggccagcgtggtacggtgttggtggagaagcgctggtggaacaggcagatagccgactccaggcgcaggtccgcgaggtccaggtagaagcgcggcaaatccgccggcatacacagacctttatagatgttgaccagattggacaagctacaaacgtagaaatccttgtcttcctgcaggcgtttttcaatgcgacgacgcgcaataaacagacggcgctccatatcgcgcgggcgccagccagccggggcgttgacaaagatttgctcaatacggggcagcgaggagagggcgatttcaccgagcacgccttcgttggtcggcacatcgcgccagccgacaatcgacagggtctcaagctgaagttcttcttcaacgatgcggcgcgccgctttagccagctcaggatctttattcaggaacagcatcccaacggcgtagtttttggctaaacgccagccgcgctcttcggcaacgatgcggaagaaacgatcgggtttttgcagcagcagaccgcaaccgtcgccggttttaccatcggcaaggattgcgccacggtgctgcatgcgggccagtgcgtgtattgcggttcgcactaccttgtggctaggttcgccttctatgtgggcgatcaggccgaaaccacagttatccctctcaagggatttgtcgtacaacatatcagtgaacctccccaggctctacggacaccctccgataccgattgcgcacaggcacagaaagagcatggcgacggggtttacacctcgcattcgccctctttaaatccttttcgcatcggtacacaagtttgaggacttgctgttaagagggaatctcaattactgcataaatatgatgagcagagtgctcatccagaaagcttccagcggattcccaacttatcgggaatccacacttacgtcaaatggcaatcttattaatacaaaaatgtgctatacacaagttaactaattgttattaaagaaaataatggcaatttttatgcttttaatacgcctgctggtggtgcggctagtgtgatctgtctcactgtgcacgcggctttgcattaccaatatgcgctgaaatacatttcattattagcatatttgactgcaatatttttaactactggacattaataccgttttttaccagaaagcagattagggcaatgctaagataaaatataaggaaaactcatcacctgggggttgaatgaaattgcagtaatcttgattgtttatgcaatagggttgatcgccgcgctgacgattgatccaggtcatcgccatcggtgacgaaaagtggcaggcttggccccctttgttgagggcggtctatcagattatgcagttacagaaattagtcaatatgtttggtggggatcttatgcgtcgctatggcgaaaaggtccataagctaacgctgcacggcggttttagctgcccaaaccgcgacggcacgctgggccgcggcggttgcactttctgtaacgtggcatcgtttgccgatgaggcgcagcagcatcgctctatcgccgaacagctcgctcatcaggcgcagctcgtcaaccgggcgaagcgctatctggcctattttcaggcctacaccagcaccttcgctgaagtgcaggtgctccgttcaatgtatcgtcaggccgtcagtgccgcaaatatcgttggcctgtgcgtcggcacccgcccggactgcgttccgcaggcggtccttgacctgctgagtgaataccatcagcaagggtatgaggtatggctggagctggggctgcaaactgctcatgacaagaccctgcatcgcattaaccgtggacacgatttcgcctgttatcagcgtaccgcgcgcctggcgcgagagcgggggctgaaagtctgtgcgcatctgatcgtcggtctgcccggagagagccaggggcattgtctgcagacgctggagcaggtagtggcgaccggcgtggatgggatcaaattgcatccactgcatattgtgaaaggcagcattatggccaaagcgtggcaggccgggcgtctcgatggcattgagctggaggcgtataccgtcaccgctggagagatgatccgccatacgccgccggaggtgatctaccaccgtatttccgccagcgcccgtcggcccacgttgttggcgccgctgtggtgtgaaaatcgctggaccggcatggttgaactggatcgttatctgaatcagcagggcgctcagggctcggcgctgggccgtagctgggttgctccccaggctgagtgagaagtacgagcgtgatgtccggaacaatgccggacatcgcgctcctgccatttatgcctggctggctttcatcgtcacacgcggagttttgatcacgaacagcaccagcagggcgccaagcgcggcgatagtgccggcgagtacgaaagcgctgtcaaatttaccagtagactgcacgatatagccggtaacaatcggccccacgatgccggagacgctgccgataagatggataaagccgctggcgccgccgacgcgggatttatgcaccacgtcctggataatcgcccagtagatcgccccggttacatagaggaaaaagatagagaccgacatcagcagaacggcaggcacgacgctgctgacggtacccgccagtcccacgcagatagcggccatcagcaggcataccaccagcacaattttgcgcgacagcagcaggcgcccggtgagtttaaaaattttatcggaaatatagcccccaagcgccagaccgacaaagccgactatccatgggatcatagtggtaaggctcatctgtttaatatccagatggtgctgttgtaccagataggacgggaaccagctgagaaagaaaaacagaatatagttgtagcagaagaaggcaaaggccgttaccagaataattggctgtttcaaataataacccagcgagtgagttgtttgattttctattgtttccagcgcgacttcttcttctttcattttattaatcagcttaagttcttcctggctgacttttttgtgcttttcgggcgaattagcggcaatgaaaaaccacgctatcatccatacaataccgatagcgaaaataatcataaaagccgggcgccagccgaatgccagggccaggtaaccgacgatggggccggcgaccgcgccgcccagcggagagcctgcgctgagaaagccgacggcggtagccgcttgctttttaggaaaccagccgttgatcatcttgttcgccgatgcgcagatcgggccttccgccatcccgaaaagcacccgcagcaccagcatggaataaaagccggtggctaccgcggttaagccgcaaaacagcgaccacagaccgaccgccaggcccattaccagcgttgcgccaaacttatccacggccaaaccgccaataaaattaaataccgcatagccgaagaaaaagctgccgaaaataatgccgaattgttcagcgttaagtgcaaggtccttttcaatcatcgggaccgtaatggataatgccacccggtccagataatttatcatatatactaaaaataataacaggacgataatccagcggatattttttcccatgataacaccatgctcattatattatttatatcaggcgcggcggatatgcagatatccgtcggccgttattctatacgatgccggtttaacccagctgcagcagcactttgcagcaggtcttacggtcgttagcaaaaatctccatggcctctttcacctgctccagcggcatacaatgggtgattaacgcctccggacgaataaggcctttctccatccagtcgatgaccagcggaaaacgcccgctgttcagccgggaggagaaaatagaaatttctttactggtgatgctttgctgagtgagggtcgaggcctcgccggagaaaccgagtataccgatgcgggcggcgggggaggcgaggagaatggcttcctgcaggatcgccgggtggcaggcggcatcaatgaccagcgtgggggcaagctgccgctgcgccagctgttccgcgagcggctggtcagtgttatcgagcgtcagatcggcgccgttttcccgggccatctgcagacgttcggcaatgcgatccacgacgatcacctgcttaacgccatataccccctttagcgcctgaatgattgtcagccccatcgggccagcgccgtaaaccagggcaatatcttgcgccgtgggctgcagctgggcggtaatatttgccgcgatggtaaaaggctcaaccatcgttgcctgacggtcgctgatagcctcggggatgcgccaggcatttttcgccggcacgcaggcatagtcgctaaatcccccgtcgcggtgaactcctatgacctggagctgcgtacagacattcggccttcctaccgagcaaggataacaatggccgcagctgacaacggggtccaccgcgacacgctcgccgatgcgtgccggagatacctgctcgccgacggcgtcgatgatgccatagaattcatggccgatgacgcggggatatttcgcgaaagggttgtggccgtgatagatgtgtacatcggaaccacagatcccggcaaaagcaattttcacccgtacttcatgggcgcccggaactggaaccggacgtgattcaatgttcagttggcctggctctttgacgacgacgcttctcattttgattccttccattgtcttttttctgaacaaattacgctacttttattaccatacaagtatgcaaaagatcataatcaggccttgatcacatttgagaaagctcggcagaaaaagccatggcatgattaatctattgaaataaattgaaaaaaattatgaatgcgccgacgcattcaccgctggcgagccggtcggcaggaatgtgatcgctatcacgacagccaacgctcaatcatctatgattactggtatggtagtagggtaaattaaactaagttgagcaggtgaagacaatgcagatgacaatgcgctggtttggaccagaggaagacaagatttcattagaacatattcgccaggtgcctggcgttgagggggtggtcggcgcgctctacgacgtcgcggtgggcgaagtatggccggtggataaaattgagcgtctggtcgatcaggcccatgccgcaggcctgaaaatggaggtgatcgagagcgtcaacatccatgacgacatcaaaatcggcctacctacccgtgaccgctatattgccaactaccagcagaccatccgcaaccttgcccgctttggcgttaaagtcatctgctataacttcatgccggttttcgactggatgaagacggatatgaactacgtcctaccggatggctcgctgacgatggcgtttgagaagaaagatatcgataagcggctggaagacgtggtgaaggaggtgcttgagaattcaaacggcttcgccttgccgggctgggagccggaacggctggcggaggtgcagaccctgtttgccaaatatagcgcggtggatgatcagaagctgcgggagaacctggtttattttctgcaggcggtgatcccggtttgcgaagaggttggggtgaaaatggcgatccacccggacgacccgccgtactccatttttggcctgccgcgggtggtcaaaaaccgcgacgatctggactggatctgccgggccgtcgattcacccgccaacggcattacgctctgcaccggctcgattgccgaagatcctgataatgacgtgtacgccatcctggccgaatttacgcggcgtaagcgaattcattttgcccacgtccgcaatataaagctgatgcaggataaagacttttacgagtgcgcccatccgtcagagtacggctccctggatatgtacaaagtgatgcaagcgctgtatgacaacggattcgacggctatattcgcccggatcatggtcgctttatctggggagagaccggacggccgggctatggcttgttcgaccgcgccctcggcgtgacctacctgaaaggactctgggaggcgttaagcaagcgttaatccctctcctgatccccctcttttgcggctggttcgcctcagcggccggccgccgtatcgactcctgcccgcattttttgcacaacttacagcgcattgctcagaattgagtattattgtgcggagttgtcgtgaaggaatcccctatgaagcaaattcgtatgctggcgcagtattatgtcgacctgatgatgaagctgggtctggtccgcttttcgatgctgttggctcttgcgctggtggtgctggccatcgtggtacagatggcggttaccatggtgctgcatggccaggttgaaagtatcgacgttatccgctctatcttctttggcctgctgatcacgccttgggcggtctactttctctcggtggtggtggagcagctcgaagagtcccgtcagcgtctttcgcggctggtggacaagctggaggagatgcgtgagcgcgatctaaagctgaacgtccaactgaaagataacatcgcgcagttgaatcaggagattggcgaacgtgaaaaagcggaagccgagcgcgagaccaccctcgagcagttgaagattgagatgaaagagcgtgaagagacacagatccagctcgaacagcaatcctcctttctgcgctctttccttgatgcttccccggacctggtcttctatcgcaatgaggataaggagttttcaggctgtaaccgggcgatggagctgctgaccggcaaaagcgagaaacagctgatccacctcaaaccgcaggacgtctatagcgaagaggcggcggaaaaggtactggagaccgacgagaaggtgttccgccataatgtatcgctgacctatgagcagtggctggactatcccgatggccgcaaagcgtgctttgaaatccgcaaggtcccctactacgatcgcgtcggtaagcgtcgcggcctgatgggcttcggccgcgatatcaccgaacgtaaacgctatcaggacgctcttgagcgcgccagccgggataaaaccacctttatttccaccatcagtcatgagctgcgtaccccgctaaacgggatcgtcgggctgagccgaattttgctggataccgaactgaccagcgaacaggaaaaatacctgaaaactatccatgtatcggcggtgacgctggggaatatcttcaatgatattatcgacatggacaaaatggagcgccgcaaggtgcagctcgataaccagccggtggacttcaccagcttccttgccgaccttgaaaacctatccggcctgcaggcacagcagaaggggctgcgctttgtgctggagccgagcctgccgctgccgcataaggtaatcacggatgggacccgcctgcggcagatcctgtggaatcttatcagcaacgccgtgaagtttaccccgcagggcggaggggtgaacgtccgcgtgcgctatgacgaaggcgatatcctgcacttcgaagtggaagactccggaattggtattcctgaagcggaacaggacaaaattttcgccatgtattaccaggtcaaagacagccacggcggcaaaccggccaccggaaccgggattggtctcgccgtctcgcgtcgcctggcgcgtaatatgggcggtgatatcagcgttaccagccagccgggtaaaggggcgacctttacgcttaccgtccatgcgcctgccattgcggaagaagtggaagatacgctggcggaagacgacatgccattaccggcgctcaacgtgctgctggttgaggacattgagctcaacgttattgtggcccgttcagtgctggaaaaactgggtaacagcgttgatgtggcgatgaccgggaaagccgcgctggagatgtttgagccaggcgaatatgaccttgtgctgttggatattcagttaccggacatgaccggactggatatttcccgggaactgaaacagcgctttgccgctgacgagctaccgccgctggtcgccctgaccgccaacgtgctgaagaataaaaaagagtatctcgacgccgggatggacgatgtattgagtaagccgctatcggtgccagcgctaacggccatgatcaagaaattctgggatgcaccggatgaggaagcgcaggaagcgccggcggccgatctgcataaagccgacgcggtgctggataccgatatgctggagcaatatatcgagctggtgggaccgaagcttatcaacgatggtctcgcggtgtttgaaaagatgatgccgggctacatgtccgttctggagtctaatctgaccgcccgcgaccaaaaagggattgtcgaagaggggcataagatcaaaggggcggccggttctatcggactgcgccacatccagcagctgggccagcagatccagactccggatctgcctgcctggtctgataatgtcgctgaatgggttgaagagatgaaatccgagtggcaaaacgatgtagcggtactgaaggcgtgggtggcgaaagccagcaaaaaatgaccccggacagaccggggtgcgcgaatactgcgccaacaccagggaactggtggttgagccagtgttgtttgagtgatgttgttacgtggcgcaaccgaagaagtggattgctcgctcattaagatagcaaagcttaactaatttgttacatgaatcagtaaaatatgtgaagcatagcgagttaatcgacatttttgactggtttcagcgagttgcatggaggagcgaaagcgatgaaaaaaattggtgtggtactgggcggctgcggcgtgtacgacggcagtgaaatccatgaggcggtgattaccctgctggcgatcgcgcgcaacggcgcgcaggcagtgtgctttgcgcccgataaaccgcagcgcgatgtcatcaaccatctgaccggggaggcgatgccagagcagcgcaatgtgctggtggaagcagcgcgtatcgcccgcggcgacatcctgccgctggtgcaggcgcgtgcggagacgctggacgcgctgatcgtccctggcggcttcggcgcggcgaaaaatctaagcagcttcgccgccgagggcagcgaatgccaggtggatcccgatctgcgggccctggcgctggcgatgcatcagaccggcaagccgctgggctttatgtgcattgccccggcgatgctaccgaagatctttgcgtttccgctgcggataaccattgggaccgatcttgataccgccgatgtggtggaagagatgggggcagagcacgtgccttgcccggtcgacgacatcgtggtggatgaagacaacaaagtggtcaccactccggcgtatatgctggcggaggacattgcgcaagccgccaccggaattgagaagctggtggcccgcgtgctggcgctgagcgcatgaggctccgcgttgcgccctttgcgctgctgaaacgtctggcattgcgtctgctgctgatcgccgccgtcctctggggcggggggatcgcgctgtttagcgtgctgccggtgccgttttcggcggtgatgcttgagcggcaggtgagcgcctggctgtccggcgatttccattatctggcgcattccgactgggttgccatggataagatctctccatggatggggctggcggtgattgccgccgaagatcagaagttcccggaacactgggggttcgacgtgtcggcgattgagaaagcgctggcgcacaatgaacgtcacgagacccgcatccgcggcgcgtcaacgctgtcgcagcagacggcgaaaaacctgtttttatgggatggccgcagctggctgcgtaaggggctggaagccgggctgactgtcgggatcgaaaccgtgtggagtaaaaagcggatcctgaccgtctacctgaatattgccgagttcggcgatgggatatttggtgtggaagcggccgcccagcgctattttcataaacccgccagtcagctgacgccgggggaagcggctctgctggccgcggtgctgccgaacccgatccgctatcgcgccgatgcgccgtcaggctatgtgcgcagtcgtcaggcctggatcttacgccagatgcgacagctgggcggggaagggttcatgcgcgagcataagctctattagcaggttactccggcgccggggctggtacagtcgccagtcgtccgtcgccgggaagcgtcacgtttagtcttcgtcaaagccagcgttaaacagggcaatcaccgcggcgagggcttcaacttcctgcggaccgctggcctccacctctatctgtcgccctttcgccgagtccagcatcagcagggcaatcacgctgttagcttccgcctccgtgccttcatcgttgcgcagcagtacttcggcatcgaaattctgcatcagttcgaacagcttcatcgccgggcgggcgtgcatgcccagcttattggtgatttcaacggtctgctttacggtcatgatttacgtttttccagcgtccgatgacgagactgcacgttcttgccgcgcgagcggaagtagtcagccagttgttcagcaatataaaccgaacgatgtttaccgccggtacagccaatggccaccgtcagatagctgcgattgttggtctccagcatcggtaaccatagctcaagatagcttcgggtctgataaataaagttgtgcacttcagtgtgccgatcgaggaaggcggccactggtttatccagaccggtcattggacgcagtttcggatcccagtgcgggttgggcagaaagcgcacgtcaaagacgtaatcggcatcgatcggaataccgtgcttgaagccgaaggattcgaagaccatcgtcagttcacgctcgcgtttacccagcagtcgggtacgcagcatttccgccagctcatgcaccgacatttccgacgtatcgacgatcagatcggcgcgggagcgcaggggctccagcagatcgctctcttcgtcgatggcgctttccagcgacagattcttgctcgacagcgggtgcagacgacgggtgtcgctgtaccggcggatcagggtattgcggtcggcatcaaggaacagcagctgcggagaaaaacattccggcagattctgcatcgcctgctcgaagatctccggggattccggcatgttacgcacgtcgatgctgacggccgcggagatattacggtcagccagcgaccgcgccaggtcgggcagcagcacgaccggcaggttatccacgcagtaaaagcccatatcttccagcgctcgcagagcgacggatttccccgagcccgagcggccgctgacgatcatcagtaccatgtaccgtttctcctcagtacgataaaggataaggtgcgactgccgttatgcgtcatcgctgcttcctgcttcggtgatgatctcatacaactcttcatcgctctgcgccgcgcgaaggcgacgacaaatcgctttgtccgccagccgtttggccaccagggagagcgtatgcaggtgagtttttgtctggtcggccggcaccagcagcgcgaacagcaggtcgacaggctgattgtcgatcgcgtcgaaggcgatgggggtttccagctggacaaaaacgccgacagcacgcagcgtatcctcttccagttttccgtggggaatggcaataccattgccgatcccggtactgcccattttttcgcgggtgaggatcgcttcgaacaccacctgcggcggcaaacttaactgtttggcggccagttcgctgatgatttccagagcacgcttcttgctctggcagtgcacctggctacgggtacattcctggttcaggacgttgctcagttgtagagccgaatcgttgttcatcataatttcacctgagcgcccccgcgcccgtcgccgatgatatccagcggcgggcgcaagggggcccggacaattagtgttgttttagtttatctttgtgcttcgttaactgtcttgccagcttgtcgataagaccatcgacagccgcatacatatcctgcccttccgcactggcatggatttcgccaccgttgacatgcagattcgcgtccgcaatttgcgtcactttctctacttttaacacaatatagacctgattgatccggtcgaaaaattgctccagcttgctgaacttcgccgtaacgaattcgcgcatcgcaggcgtaatttcgacgttgtgtcctgtaatgttgagctgcatagtgtcttccttatcggttatgtcagaccagttgtttacgctggtttgacggcgggatggataaagactctctgtacttcgcgacagtgcggcgcgccaccataataccctgctcggacagcatggaggtgagcttactgtcgctcaacggcttcgcggggttttccgcggcgatgagcttcttcaccagcgcgcgaatcgccgtcgacgaggcttcgcctccgccttcggtattcacatggctggagaagaaatacttcagttcaaaaataccgcgcggactgtgcagatatttttgcgtggtgacacgggaaattgtcgattcatgcatctcgacggcctgggcgatatcggccagcaccatcggcttcatatactcttcaccctgttcgaaaaaagcctgctgctgctctacgatgcagcggctgacgcgcagcagggtatcgttgcggctttccagacttttaatcagccagcgggcttcctgcagattgctgcgaatgaactggccgtcggcgtcattgcgggcgctgttgcccattgccgcatactgctgatttattttcaaccgtggaatgctgtcggcgttgagctcgacggtccagcggccgctcaccttgcgcaccagcacatccgggatgacatattccggttcgctggtctgaatggactggccagggcgaggatccagggactggatcaggttgaccgcctctttaagcacctcttctttcaggcgggtgactcgcattagagtgcggaaatcatggttggccagcagatcaagatggtcgctgataatcagccgggcctcttccagccacggcgtctctttagcaaattgcgacagctggatcagcaggcagtcgcgcagatctttcgctgcgacgccaaccggatcaaaacgctggattcgcttgaggaccgcttccacctcctccaggccgatctcgtcatcgccgatgctgtcgacaatatcttcaatctgaatcgtgaggtagcccgtatcgtcgacggcgtcgacgatagaggtggcaatagcgcggtcggtgtcggtgaaaggcgtcagctcaacctgccacatcagatagtcctgcagcgtctgggtggtctcgccttgatagacgggaagctcgtcgtcctgatagtcgacgccgttacccgacggcgtgccagcggtatagatttcatcccagctggcatcgagaggcagttcgtcgggcatctctttttgctcaagcgcatcgacggtatcgagggactcgcggtcctccacctcttttgcctctacctcgtcgtgaagatcggtttgctcaagcaacgggttactttccagcgcttgctggagctcttgctggagttctaacgtggacaactgcagcaaacgaatcgcctgctgcagctgcggcgtcatggcaagctgttggctaagccttaattgcaaaccttgcttcatgttcagggtaaatatctccggctaaaacgtctgtaacctctaccctatcagagtctgaagtcttccccaagatacacgcgcttaacctgctcatcttcgaggatctgctgcggtgtaccatgagcgataaggtgtccctgactgacaatatacgcgcgttcgcagaccgcgagggtctcacggacgttatggtcggtaatcagaacgccgagaccgctgtcgcgcaggtgctcaatgatgcgtttaatatcgataacggagatcggatccacgccggcaaagggttcatccagaagaataaatttcggattcgccgccagcgcgcgggcgatttcgacgcggcggcgttcaccaccggagagcgcctgaccgaggctgtcgcgcaggtgctcaatatgaaactcttccatcagctctttagcgcgatcttcccgttgttcgctggttagatcgtcacggatctgcaggaccgccatcaggttgtcatagacgctgaggcgacggaaaatcgacgcttcctgcggcaggtagccgatgccccgtcgcgcgcgcgcgtgcagcggcagcaggctgatgtcttcgtcatcgatgatgatattgcctgcgtcgcggggcacaatcccgaccaccatgtagaaggtggtcgttttaccggcgccgttcgggccgagcaagccgacaatctcgcccgagttaacggtgagactgacatcttccaccacgcggcggcctttatacgctttagcgagattcttcgcagttaaggttgccataacggattagttactcttcttttgctggttgccgcttttgtcctgcagctcggacggcaccagaacggtggtgacgcgtcgacctttgtcgctgaaggcctgcattttttgctctttcaccagataggtgatcttgtcgcccttgatgttgctgtcgagctgttccagataagcgttgcccgtcagcacgacgtaatcgttctgcagctcgtagcgcattttcgacgcccggccttttaccggcttgccgttatcctgcatctgatagaaagtagccgggttaccgaaaccttcgatcacctctttgcctttctcgttgcctggacgggttaccaccactttatcagcgttaatcttgatcgtcccctgggtcacgaccacgttaccggtgaaggtgacgacattgccctgcatgtccagcgactgctgatcggactcgatatggatcggctgatcggtatcgcccgtcttggcgagggccggcaggctggcggccagtaacgcgccggcgagcgcaatcttaaggctgagtttgtttgttctgaatttcataagaggttctcaccttttcaatcagctcggcatttttgctgcgaaggtttccacgcattttcaggccgctggaattaaatgtggtgccgtataacgtcaccatgtcatcggaggtaacgtcctgcgttaccagatttatctgggcgttatccgtcgtaattttgcgcagttgagaatctggcgcgagcgcattcacctcaacgtgcccgtaaagatagagcatccggtcattcgtcagcttcgctttgtctgctctgaccgaccaggtaggcaccttgttagtatcaaaggtggtcatcaccggtttggtaaaccaggagacctcctgatcggaaaaatattccacgtgctcggcaatcagccgatagctcagggcgccttccggactgtataccacggtgtcggtatgttcgcttttatacgtagggtcgttaggattgacctccggctgggccgtgtcgtccgtattcgccagattcaggccgataaggatcagcgcgagcagcgacagtaaaatgataacccaacgtctggttttactcatattgattgccctttggcctcatccaacttgccctgcgccaatagtaacaaatcgcagacttcgcgtaccgcgccgcgtccgccgttaattcgcgtgacataattcgcccgcggtagcagcagcggatgcgcatcggcgacggcgacgctaaggcccacttcggccatcaccggccagtcaatcagatcgtcgccgatgtaggcgacttcttccggccgcacgtgcagtttgtccgtcagatcgcggaacgccagcagcttgtccgactgcccctggtacaaatgcgtgatgcccagcgtctgacagcgatcttctaccagtttagcttttcgcccggtaataatcgccacttcaatacccgaggtcagcgcgcagcggataccatagccatcgcggacgttaaacgctttcagctcctcgccgtgattacccatatagataagcccgtcggataatacaccgtcgacatcaaggatcagtagacggatcttcgccgcgcgatcgacaaacgcctggcttaccggcccgtagcaggtcgctaactgagcatcagcattattcattattttttccttacttacactacgcccgcgcgcagcagatcgtgcatatgtaccacacccagcagatggtcgccatcggcaaccagcacgcaggtgatatgacgggattgcatcaggtttaacgcatccaccgccagagtgccggggcggatgcggatacctccccgggtcatgacgtcggcaatgctggcatcgcgcatatcaacgccggtatcgaagacccggcgcaggtcaccgtcggtaaagataccgatgatgttcatatcgtcatcgcagatagcggtcatgcctaaatttttacgcgtgatttccagcagcgcatcgcgcagggtcgcctgcaggccgacgtgcgggatttcatcaccggtatgcataatatcattgacccgcagcaacagcttacggccgagtgcgccgcccggatgcgacagggcgaaatcctcagcggtaaagccgcgggcttccagcagggcgacggcgagggcatcacccatcaccagcgcggcggtggtgctcgacgtgggcgccagtcctaacgggcaggcctccttcggcactttcacgcacagatggatatccgccgcgcgcgccatgctgctctccggccggctggtgatacagataagcttcacctgctggcgcttgaggaccgggatcagcgcgaggatttcattcgattcgccggagttcgacagcgcaattaccacatcctgtggggtgaccatacctaaatcaccgtgcgccgcttcgccggggtggacaaaaaatgccgaggtgccggtactggcgaaggttgccgccattttgcggccgatgtggccggatttgcccatccccatcaccacgactttcccgccgcagcggaaaatcgtttcgcaggcatgggtaaagtcttcatttatgtattgatcgagctgggccagaccttcacgttcaatttccagcacctgacggcctgcctgttgaaagtcaaaatccgtgggcaaatctatttgcgacatgatgttatcccgaatcattcaacgaagagcggtgctgtccaaaacagcatcgccaaccaaaccacaaagccgccgaccagcagcgcgccaaccagtcgtcccggctgctgctgacggcgccagcacagcactgcgaagatcaggctgaccagcagcatcacgccataatcgcgagtgaaggcttcggtcgcaaagctccccggcgcgatcagcgccggtaaacccagcaccagtgcgatattaaggatattggcgccgatgatattgccgatggcaatatcatcttcccctttccgcgccccggcgatggcggtggccagctccggcaggctggtgcctatcgccaccaccgtcaggccgacggtcagttcgctgatggcgaaatagtttgccagcactgtactgttatccaccaccatgcgggtcgccatcggcatgacgatcatcgctacccctaaccagagcagggcgaccggcagcgacccttcgcgtggcagctccgccagctgttcgcgggtcaggctatcgcttccctggcgctccgccaggcgagcgattttgatggtgaacagcagccacagaagcgctaacgccagtaaaaatagcccgtcgagacgggtcagttgtccatcgtagagcaccagtcccgccagcacgctgaccagcaacattagcggtaattcgcggcgcagaatatcagaatgcacggtaaatggcctgagtaaggcggcgagaccgaggatcaataagatattggtgatattagatccgagcgcggtgccgaccgccagatcggtctgcccgtgcagcgaggccgcggtggcgaccatgatctcaggcaggctggtgccgatactgaccactgtcatgccgatgatcagcggcgggatccccaacatacgacacaggatggaggcggcatagaccagacgatcggcgctgtagacaaccagcaataaaccaataattaacagagccgtcgctaagagcatctaaagtcctttcttcaggtataatcgtcgcctcgctgggttatccctacgcagcgtaacgaattcttaattttgactttatgtgtgccaaaagtaaaacaaatgccagctttcgctaacctgtgcaggtaagattctgtaaaaatgttgtgattgtggcgcaagaaagggccatgcttgcccgtcaggtgtttagtaaggatgattttatgagccaaactcaggcgaatttagttgaagtgcgcggtatccgcttttcacgcggcgatcgtgtgatcttcgacgacatctcgctgtcggtgccgcgcggtaaaattactgcgatcatgggaccttcggggatcggcaagactaccctgttacgcctgatcggcggccagatcccgccggacaggggagagatcctgtttgatggcgagaacgtgccgcagatgacgcgttcgcgtctttatacggtgcgtaagcggatgagcatgctgttccagtccggcgcgctgttcaccgatctcaatgtctttgacaacgttgcctatccgctgcgcgaacatacgcatttgccgcctgcgctgctgcatacgacggtgatgatgaagctggaagcggtggggctacgcggtgcggcgaagttaatgccttctgagctttccggtgggatggcgcgccgcgccgccctggcgagagccattgccctggagccggatctgattatgttcgacgaaccgttcgtcgggcaggatcccatcactatgggcgtgctggtgaagctgatttctgaactcaacagcacgctgggtgtcacttgcatcgtggtttcgcacgatgtgcccgaggtgcttagcatcgcggactacgcgtatatcgtggcggataaaaagattgtcgcccacggtagcgcccagtcgctacgggagaataccgatcctcgggttcgtcagttcattgatggtattgccgacggtccggtgccgttccgttatcctgctggcgactatcaccatgatttattaggcatagggagttgagcgactcatgctgtttaatgcgctggccgcgctaggtcatcgcggtattaaaaccaccgcgacgtttggacgcgccggattaatgctattcaacgccgttgtcggcaaaccagagtttcgcaagcacgcgccgctgctggttcgtcaactctataacgtcggcgtcctgtcgatgctgattatcattgtatcgggcttgtttatcggtatggtgctcgggctgcaggggtatctggtgttaaccacctacagcgcagagaccagtcttggcatgctggtggcgctgtcgctgctgcgtgagctggggccggtggtcgccgcgctgctgtttgccggccgcgccgggtcggcgctgaccgccgagattggcctgatgcgggccacggaacagctctccagtatggagatgatggcggtggatccgctgcgtcgcgtcatttccccacgcttctgggccggtgtcatttcgctgccgctgctgacgattatcttcgtcgcggtagggatctggggcggtgcgctggtgggtgtgagctggaaaggcattgacggtggttttttctggaccgcgatgcaaaatgccgtcgactggcgaatggatctggtgaactgcctgattaagagtctggtgttcgctattacggtaacctggattgcgttatttaatggttatgacgctatccccacttccgccgggattagccgggcgacaacgcgtaccgtggtgcatgcgtcgctggcggttctggggctggattttgtgctgactgcgctgatgtttgggaattgagttcatgcaaacgaaaaaaactgaaatctgggtaggggtgttcttactggtggcgctgctggcggcgctgtttgtctgcctgaaggcggcgaacgtcacctcgctacgcaccgagccgacttatcgcctttatgcgactttcgataacatcggcggcctgaaggcgcgctcgccggtgcgcatcggcggcgtggtagtggggcgggtagcggacattacgctcgatccgaaaacctatctgccacgcgtggagctcgatatcgatgagcgctacaaccatatcccggataccagttcgttggcgatccgcacctctggcctgctgggcgagcagtacctggcgctgaacgtcggttttgaagacccggacctcgggacgactatccttaaagacggcggcactatccaggacaccaagtccgccatggtgctggaagatctgattggtcagttcctttataacagtaagggcggcgacaatcagaattctggcaatgataaggccgaggcagaaggtcatactgacgcgacgccggcagccggcacgacgcattaatttcaggagaaatacgatatgtttaaacgcttactcatggtcgccatgctggtgattgccccgctgaccgccgtccaggccgcagatcagtccaatccgtataagctgatgaatgaagcggcgcagaaaaccttcgatcgcctgaagaatgaacagccgaagattaaagctaatcctaactatctgcgcgacatcgtcgaccaggagttattgccgtatgtacaggtgaaatatgccggcgcgctggtgctgggccgctattacaaagaagcgacccctgcgcagcgtgaggcctattttgccgccttccgtgaatacctgaagcaggcctacggtcaggcgctggcgatgtaccatgggcagacttaccagattgctccggagcagccgctgggcagcgcaaccatcgttccgatccgcgtcactatcatcgacccgaacggtcgtccgccggtacgtcttgacttccagtggcgtaaaaatacccagaccggcaactggcaggcctacgatatgatcgcggaaggggtgagcatgatcaccaccaaacagaatgagtggagcgatctgctgcgcaccaagggcgttgatggcctgaccgcgcagctgaaagcgatctctgcgcagccgatcaccctggaacagaaaaaataatgagcgggcagctgagctggactcgcgagggcgagacgctggcgctgcacggggagctggatcaggatctgctggtcccgctctgggaggcgcgcgcccaggcgacggcgggaacggcgatcatcgatctcagtcagaccacgcgcgtggacaccgcgggcctggcgctgttagtgcattttatggcgctgattcgccgtcagggccgggaagcgcagctggtcggcaagagcgaaaacctgcaaacgctgatcggtctttacaacctgcctgccgatctgatctcataatcttttcagtgcgttagcactgaagctattccgaaagccctggcaatcttttcgccggggctttttgcttgtttaagaccgcgccactttcctctaagatgttgggctgttttcactatcagataaatttgagcccatggaaaatcatgaaattcagaccgtgctgatgaacgcactccccctccaggaagtccacgtctctggcgatggcagccactttcaggttattgctgtgggtgagatgttcgatggcatgagtcgggtgaaaaagcagcagagcgtctacgcgccgctgatggaatatattgccgacaaccgcatccatgcgctgtcgatcaaggcctttactccgcaggagtgggcgcgagaccgcaaactcaatggcttctaagctgtgggggatcccctgcagcgtatgtgaatttttaatagagaacagaatcaatggataaattccgtgttcaggggccgactcgccttcagggtgaagtcaccatctccggggcaaaaaacgccgccctgccaatcctcttttccgcgctgcttgccgaagagccggtagagatccaaaacgtacctaagctgaaagacatcgataccaccatgaagctgctgagccagctgggcgcgaaggtcgagcgcaatggttcggtatggattgacgccggcccggtcgatgtattctgtgctccgtacgatctggtgaaaaccatgcgcgcctctatctgggcgctgggcccgttggtggcacgtttcggtcaggggcaagtttctctgcctggcggctgcgctatcggcgcgcgtccggtcgatctgcatattagcggtctggagcagctgggcgccgagatcaaactggaagaaggttatgtcaaagcctcggtcagcggtcgcctgaaaggcgcgcatattgtgatggataaggtgagcgtcggcgccaccgtaaccatcatgagcgcagcgacgcttgcggagggaacgacgattattgaaaacgccgctcgcgagccggagattgtcgataccgccaacttcctgaacgcgctgggcgcaaaaatcacaggccagggtagcgatcgcattaccatcgaaggcgtgcagcgcctgggcggcggcgtctaccgtgtgctgcctgaccgtattgaaaccgggactttcctggtggccgcggcgatttccggcggcaagatcctctgccgtaacgcgcagccggataccctggatgccgtactggcgaagctgcgcgacgccggggctgacatcgaaacgggcgaagactggatcagcctcgatatgcacggcaaccgtccgaaagcggtcaacgtgcgtaccgcgccgcacccgggcttcccgaccgatatgcaggcccagttcacgctgcttaacctggtagcggaagggaccggcgtgatcaccgaaacgatctttgaaaaccgcttcatgcacattccggagctgatccgtatgggcgcgcacgcggagatcgagagcaataccgctatctgtcacggcgtgaagcagctttctggcgcgcaggtgatggcgaccgatttgcgcgcgtcggcgagcctggtgctggccggctgtatcgctgaagggaccaccatcgtcgatcgcatctatcatatcgatcgcggctatgagcgtatcgaagataaactgcaggcgctgggcgccaatattcaacgcgtgaagggcgagtaaccgcgtcctgacagcgccccgggacgttgttccggggcgctgtcgagcaatcacatcacttgtcgatcttcttctgacgcatcatctgcgttctgtcgataaactcatgagtcaccgggtcgtggtagcgtgacggccagatgacccacggctgcgtttccagcgccgtggcgataatcaattcgcctttcggccaggggcgggtcagggcgttcgccagcgttgaagaacttagtccgtgccgtcgcgactctgccgccagcgatgttccccgtttacgtaatcccgcaacaatatctgcgggatgccagtcgatgaacttatccataaattctcctggtgttaaaggtccagatcgtcccacatgggcgatagagacactatacccgcgtactatgtagggttctaacaagttctgttaaagcgccggaatattcagaatctatcaagatattcggaagtttagggagagaaatggcattttactggaactttcccgcgcgtcgcgcgggaaaggagggggattaatgatcgcgctggactgcaatatgcgccagcccaatcaaggcttcgcgccagggcgtgtccgggaggatctgcagcgcggcaatggctttgtcagcttcttcttcggcacgcttctgcgtccattccagcgaaccgcaggtcgccatcgtttccagcacagcatccagtagatggcggccgttgccttgctcgatcgcaccgcggatcatcgctgattgatcgggtgtgccatggtgcatggcgtgcagcagcggtagcgtgggtttaccttcgttcaggtcgtcaccgacgtttttaccgagccgctcgccgtcagagctataatcgagtaaatcgtcgattagctggaaagcggtgccgagatagcggccataatcctgcaacgcgcgctcttcttccgcagtgcagtcggccagcagtcccgcacactgcgaggcagcttcaaacagacgcgccgtcttgctgtagataacgcgcatgtagttctcttcggtgatatccgggtcattgacgttcatcagctgcagcacttcgccttcggcaatgacgttcaccgcttccgacatgacctcaaggatcttcagcgagcccagctgagtcatcatctgaaaggcgcgggtatagataaaatcgccgaccagcacgctggcggcattgccaaacgccgcattggccgtggctttgccgcgacgcatatcagactcatcgacgacgtcgtcatgcagcagggtggcggtatgaataaattcaatcagcgcggcaatggtgacatgcgcgctcccctgatagcccaccgcgcgtgcggcgagcacagcaatcatcgggcgaatgcgtttgccgccgccgctgacgatgtaatagcctaactgattgataagctgaacatcggagttgagttgctcaagaatcgtcgcattgacacccgccatatcttgcgcggttaactcattgattttttctaaattcatcgcaaaagccgggccaaatgtcctgttaccatgaatccaggtgggatcacagaaggattaagacagaattaaaagaagatatgattgtactgaaaaattgccgtagataaacgttgtcgtgaaagttgtgttttttttctgcattgatcgctaatcgctcttgtcaaaggctcgcgttttgcgtaatattcgcgccctattgtgaatatttatagcgcactctgaatcacataaagaggtgcgcggaagcggagttttatatgtacgcggttttccaaagtggtggtaaacaacaccgagtaagcgaaggtcagaccgttcgcctggaaaagctggacatcgcaactggcgaagctgttgaattcgctgaagtgctgatgatcgcaaacggtgaagaaatcaagatcggcgttcctttcgttgagggcggcgtaatcaaagctgaagttgttgctcacggtcgtggcgagaaagttaaaatcgttaagtttcgtcgtcgtaaacactatcgtaagcagcagggccatcgtcagtggttcactgatgtgaaaatcactggcatcagcgcctaagacctgaggagtagatttaaatggcacataaaaaggctggcggctcgactcgtaacggtcgcgattcagaagctaaacgtctgggcgtaaaacgtttcggcggtgaagcagttctggcaggtagcatcatcgttcgtcaacgtggtactaaattccacgctggtaccaacgttggttgcggccgtgaccacactctgttcgctttgactgacggtaaagtcaagttcgaagttaaaggcccgaaaaaccgtaaattcatcagcatcgttgctgaataagtttttcgcgtcccggtaacggatgaaagccccgcaacacgttgcggggctttttacattcgtctaccggaaaatttttgcagggaaacaggcatgaagcagcaggctgggattggcattattctggcgcttaccaccgcgatgtgttggggagcgttgccgattgcaatgaaacaggttctcgaggtgatggcgccgcctacggtggtcttttatcgcttcctgatggccagcattgggcttggcgcgatcctcgcgatcaaaggcaaactgccgccgatgcgaatttttcgcaagccgcgctggctggtgttattagcgattgccaccggcggtctgttcggtaacttcatcctgtttagttcttccctgcaatacctcagccccacggcttctcaggtcatcggccagctatcgccggtggggatgatggtggctagcgtcgtaattctgaaagagcgcatgcgcggcacccaggtggtgggcgcgttgatgctgctcagcgggctggtgatgttcttcaataccagtctgattgaaatctttacccgcctgacggactacacgtggggggtaattttcggcgttgctgccgctacggtgtgggtaagctacggcgtcgcgcaaaaggtgttattgcgccgtctggcatcacagcagatactatttttgctgtacactttgtgtacgattgcattattgccgcttgctgagcccggagtgatttcccggttaagcagctggcaactggcatgcctgattttttgcgggctgaataccctggtcggctacggggcgctggcggaagccatggcgcgctggcaggcggcgcaggtcagcgcgttaatcaccttgacgccactgtttacgctactgttttctgatttattatcaatggcctggcccgatgttttcgccagaccgatgttaaacctgattggttatctcggtgcgtttgtcgtggttgcgggcgcgatgtattccgccatcggtcatcgtctttggggacgttggcgtaagcgagaggcggtagtaccgctgccccgctcaggcgaatgatttacggagagtaaaatgaagtttgtagatgaagcaacgatcctggtcgtagcaggtgacggcggcaatggttgcgtaagcttccgccgcgaaaagtatattccgaaaggcggtccggacggcggcgatggcggcgatggcggcgatgtctggctggaagcggacgagaacctgaacaccctgatcgactaccgttttgaaaaatcgttccgcgccgaacgtgggcagaatggtcaaagccgcgactgtaccggtaagcgcggtaaagacgtgacggtaaaagtgccggtcggcacccgggttatcgatcagggcaccggcgagaccatgggcgatatgaccaaacacggtcagcgtctgatggtggcgaaaggcggctggcacggtttgggcaacacccgtttcaaatcgtccgttaaccgtacgccgcgtcagaaaaccatgggtaccccgggtgataaacgcgacctgcagctggagctgatgctgttggccgatgtcgggatgctgggcatgccgaacgccggcaaatccaccttcatccgtgcggtctccgccgccaagccgaaagtggctgactatccgtttaccaccctggtgccaagcctgggcgtggtgcgtatggacaatgaaaagagcttcgtagttgccgatatcccggggctgattgaagg

SEQ ID NO: 5373 - DNA, 6242 bp, Unknown
  gut microbiota DNA sequence
ccgctgacccggcggcttgtttgccgttgttccgtgtcagtggaggcgcattatagggagtaattctgaggtgacaaggggaaatgcaaaaaaagttttcaaccgtctcttttttcagcaatgcggcgaggaatgtcgcaaaaaaccgccgttttgccgttttaaccgacgaaacggggcgcctggtggcatactgttagagtagaggaaagaaaggaacggcatttatgtctttaagcgcacagcaactggcggcacaaaagaacatctcctgggtactggccgaaaagctcgcccaaaaaatactgactggcgaatatcagccggaaagcattcttcccggcgaaatggagttgggggagcagttcggcgtaagccgtaccgccgtccgcgaagcggtgaagacgcttactgcaaaaggcatgctgctgccccgccctcgcattggcacccgggtgatgccgcgcagcagctggaatttccttgataaggaactgctctcctggtggctaacagaagataacttcgaagaggtggtaagccactttctcgtcatgcgcagcagcctggagccacaggcctgctttctcgccgccgccaacggcaccgccgggcaaaaagcgcagctcaatacattaatggaagagatgattgctctgaaacgccattttcagcgcgaacgctggatagaagtcgatatggcctggcatgagcatatctatgaaatgagcggtaatcctttcctcagctctttcgcctcgctgtttcattcggtctaccacacctacttcacgtcgattacgcaaaatgaagtggtgaagctcgatctccaccaggcgattgtcgatgccattcttaacagtgatgcgccgggggcgttgctcgcctgccaggcattgttgaacgccccacaccacgtaaatcaataacaaggatttggcatgagcggaaaaaagggcgcagcatggctggcctgccgtggatcgcggcgatggccttctttatgcaggcgctggatgccaccattcttaacaccgccctcccggctatcgcccacagtcttaatcgttctcccttagcgatgcagtcggccattatcagctatacgctgacggtggcgatgctgatcccggtcagcggctggctggccgatcgcttcggcacgcgccgggtctttatcatcgccgttagcctgttcaccctcggttccctcgcctgcgccctctccagttccttaacggaactggtcatttttcgcgtaattcaggggatcggtggggcgatgatgatgccggtggcgaggctggccctgctgcgtgcctacccccgcagcgaactgttgccggtcctgaactttgtcaccatgccgggattggtggggccgattctgggcccggtactcggcggggtatttgttacctgggccagctggcattggattttcctgataaacattccgatcggcgtaattggcattctgtacgcccgtaaatacatgccaaatttcacaacgccgcgccgacgcttcgatataggcggttttctgttatttggcttaagtctggtgttattttccagcggtattgaactgtttggggaaaaaatcgtggcgacatggcaggcgctggccgtgattgccgtcagtctgttactgctcgtggcctatgtgcgtcacgcgcgtcgccatccgacgccgcttatctcgctctctttatttaagacccatacgttctcggtcggcattgccggcaacctcgccacgcggttaggtaccggctgcgtaccgtttctgatgccgctgatgctgcaggttggtttcggctatccggccattatcgccggctgtatgatcgcccccaccgctatcggctcgattattgcgaaatccaccgttacccaggtgctgcgctggtttggctatcgtaagaccctggtggggatcaccgtgtttattggccttatgatcgcccagttctcgctgcagtcgccagagatgccgctgtggatgcttcttctgccgctgttcgtgctggggatggcgatgtccacgcagtttaccgccatgaataccattaccctggccgatctgaccgatgataatgccagcagcggcaacagcctgctggccgtcacccagcagctttcaattagtctcggggtggccatcagcgctgcggtgctacgcttctatgaaggttttgataatgcaagcacggtacagcagtttcactacacctttataaccatgggcgtgataaccattatatcggcgctgatgtttatgctgttaagagcgaaggatggccgcaacctgattagcgagcggcataaacgctaagcggaaccgcgaaccaccagctccggcgttaactgaacgcgctgctgtttttgctgcggatcggccatgcgatggatcagtacgtcgatggccagttcccccagctcatcctttggctggtgaatggtggtcaatggcggcgtcatataacgtgccagctcaatatcatcgtagcccaccagcgccatatcctgcggaatctgcagcccggcctggtataacgcctgataagcgccaaccgccatcgcatcgttaccgacaaacaccgcctgcggacgctgcggcaacgccagcagctgctgcatcgcgctaaacccgccgccaaactcaaaatcactggtcaccacgtatccttcggcaaccggcaggccgcagcgcgccatcgcggcatgatagccttcaagacgcaggcgcgccggggttttatccagcgggccggcaatacaggcaatgcgtgaatgcccctggtcaatcagatactgggtcgccatatcgccgccgagcagcgagttatcctgaatcagatcgctatcgccatcaaagggggcccagtccatcataaccgtcggtaccgacggatagcgctgcatgatttccggggagggctgatgagtctccgtgcacagcaggagtaatccatcgacgcgtttttgcattagcgtctccagattacgattcattcgctgctcatcaccttcggtattgcagagcacgaggctataaccccgctcaaagcagctacgctccacgccccgcaccagctccgaataaaacggattggtactggcggtgatcagcatgccgatggtacgggtttgattgagcttgaggctacgcgccagcgcagagggggcgtagttgaggcttttgatcgcagcgtcaactttggcggtaatcgcctcgctgacaaagcggtccttattgatgacgtgtgacaccgtcgatgtggaaacgcccgcgatgcgggccacatctttcatcgtagccaagcattacccctgttgcgctaaaaattcatcgatctctgtgcgccaaggcacggacggctgagcgcctttgcgggttacggcgatcgccgctgcggcatgcgcaaagcgaatcgcctccggcagggcggtcccttccagcagcgcggtcaccagcgcgccgttaaaggtatcaccggccgcgatagtatcaatggcctgtacgcgaaaccctgggatccggcggctttcgccttcggcactgagccagacgccgcggctgccgagggtgatcatcaccgtaccaatgcctttggcatgcagcacgttggcggcttttgccgcatcttcgtcactctcaacgcgaataccggtcagcttttccgcttcggtttcgttaggggtaataatatccaccagcgccagcagttcatccggtagttcacgcgctggcgcggggttcagcaccacggtggtgtgatggtgatgggcgattttcgccgccgctatgacgctctccagcggcgactccagctgcatcaacaacgcctgtgcgctggcgatacgctctttttccgcctcaacctgggagacggaaagcgccgcattggcgccggcatgaataccgatgacattctcaccttcggcgttaacgaaaattaatgccaccccggtcgcttccccggcaaccgcgcgcacgggcgccacgtcgattttatcgctcgccagctgacgacggatgcgttcaccgatatcgtcatcgccggtgcaggcgataaacgcgatatccgctccgctgcgcccggcggccaccgcctggttggccccttttccaccgaacgccacctgataatggtggccggtgacggtttcgcccggcgtcgggaaagcgtcaaggttaagaatgtgatcggcattgatactgccaaggacgacaagtttgcctgcagttttcatcatttctgttcccgggaaagcgcgccaccgggatccggtggcgcatgccctgcttttctttttttatattgtccctcggaccgttgccagtccgaatcgcatattactgcttaacgaccagcttcagctcaaccgggtagttagcttccactttttcgcccttcagtaccttatcagcagtctcaacgcctttcgcgccgatctgctccggcaactgtgcgacggtcgccgccagtttgccactgtttactgctttttcgccatccggagtgccgtcaaatccaaccaccatcacatcggacttgcctgcggtctgcagcgcgcgcagggcgcccagcgccatttcatcattttgcgcgaacactgcctggacgtcaggatgtgcggtcagcaggttctgcatcacgttcaggcctttggtgcggtcgaaatcggccggctggctggccaggacgttgaatttgtgcgccgccacggcctgtttaaagccttcgccacgctcgcgcgccgcagaagttccggcaatgccctgcagctcaatgacttttgcactttcacccacttttttcgcgatgtaatcgccagccattttcccaccctgcacgttgtcagaggcgatatggctcacaacatcgccttttgtcgcctgacggtcgagagtgatgaccgggattttcgcctggttcgccatcttcacggcgttgccgacggcatcagagtcggtggggttgatcagcagcagcttggtgccgcgcaccgttaaatcctggacgttcgccagctctttcgccgggttgttctgggaatccagcaccaccaggttgtagcccagcttgtcagcttctttttgcgcgccgtctttcagcgacacgaagaacgggttgttgagggtagagataaccagagcgatggtgtctttggccatcgcgttcgcgctaacggtcgcacttagcgcaacagcagagaccagggtcgccagttttttcatattcatagttaagatgtcctgtagagttctcagttactgctttttgttatctaccagtaccgccagcaaaatcaccaccgctttaacgatcatctggtaataggaagaaacgcctaaaagattaagaccattattcaggaagccaaggatcagcgcaccaatcagcgtgccgacaatgcgtcctttgccaccagcgaggctggtgccgccgagcaccaccgccgcaatggcgtccagctcatagcccgtccccgctgtcggctgcgcggaggagagacgcgccacttcgatgatcccggccagcgaagccagcattccgcacaaggcgtaaacgataattttaactttattgacgctaatcccggacagacgcgtcgccgcttcattaccgcccagggcataaatataacggcccaggcgagtatggtgcagcatgtaccaggccgccaggaagacaatcgccatgatccataccggcgtcgggatccccagcggacgcccgatgccaaaccagccaaacagatcggcattatcgctaaagccggtattgatcgggctgccgttggtgtacaccatggttacgccgcgcagcagcagcatcatcaccagggtggcgatgaaggcctgcacgcggcctctcgctacaatcaccccggtgactgcgccgatcgccgcacctaatgcgagggcagccgcgaccgccaccagcgcattaacctcaatgccaacgatcgacgctgccaccgcaccggtgagcgccagcagggagccgacggacagatcgatccccgaggtcagtatgaccagcgtcatccctaccgccataatggcgttaacggaggtttgctgcagaatattgaacaggttattgacggtaaaaaagttggggctcatggtcgataccaccgcgatcagcaccagcagggcaatcagcgatttttgctccatcagccacgcttttgtgaaatagcggcgaccagaaacagcctgggtt

SEQ ID NO: 5374 - DNA, 28297 bp, Unknown
  gut microbiota DNA sequence
agaaattcggtggagcggtagttcagtcggttagaatacctgcctgtcacgcagggggtcgcgggttcgagtcccgtccgttccgccacttatttaacattaagcctgctcaaatagcaggcttagtggtaagaaaattttaggggcgtagttcaattggtagagcaccggtctccaaaaccgggtgttgggagttcgagtctctccgcccctgccatttataagaatcctttgctcaggcaaaggattttttttatctctaatctccattggcaatatcctctacgaaaataccttgctgatctccgtccatggagagtagcgtttattccagaatagggtttttcaggatctcatggatctgcgcctgcttatcgctattttgtaaccagatcgcataaagtggacgggataacgtagcgctgtccatgaccgtatgtaacccatgcttctctttcgcccagcgagcaggtagccaacagcagccgttcaggcgcgataattgctgatagatcagttcagctgaagaggtagtgagcagcggaacatcatcgcttcctatcagtcccacttcgttttgctgaaaatcaggcccccattcaaggcgcaagtaattcaattcatttctgttttttgcaggcgatgcgcaatacagggcaagagtaaaattacccaacagctggctgcttaattcatccatcttcggcgattcggtggtgatcagcagatccaactggcgttcgtgaagctgtttaaccaacgactgccgctgcgcgatacgggcttcaaactggagattgtaaggtgcgctgtagagggtaccgagccagctgttaagcatacattcccacagggaggcgctggccccaatggagaattcattatgtcgcgaagagtgtgccacctccttgcgcgcagcctgccaggtattcatgagcgtttcggcataggggaggagcttttcgccggcggtcgtcaggcggatgttattacgatgacgggtgaacagattcacaccaagttgattttccagctgacgaatacgaaagctgactgctgactgtgtcaggtaaagcgcctctgctgctcgcccaaagtgacgagttctactcacttccaggaaagtcttgagcaattccgtatccacaccgttctccacaaaattatttgtcgtgatgatttaaatgttttgtttgacgctctgtcaagcgtaactaatactccgcgccataaatagctcggccaaagaatcaggagcgtgtaggatggcggaaagctttacgacgactaatcgttttttcgacaataaaaattatccacgcgggttctcccgtcacggtgatttcaccatcaaagaggcgcaactgctggaacgtcatggttatgcctttaacgaactggaactgggtaagcgcgaacctgttaccgaagatgaaaaacaatttgtctcggtgtgccgtggtgaacgtgagccggtgacggaagcagaacgcgtatggattaagtatatggcgcgtatcaagcggccgaagcgtttccatactctgtccggcggcaaaccgcagatggaaggcgctgacgattacaccgaaagcgatgactaagaaaaaagggcgtaagccctttttttacgccatcattttctgcagatggttgagcatccgatctattgcccgatagctgagcgcctcctgcaaatgacagcgttcaatctcttcaacctctgccagatcggcaatggttctcgcaacctttaacagacgctgccaggcgcgaatagaaagccccagctgcgttagcgtctgttccagccagacagcatcctcccgccttaagcgacagcagttcttcatttcacgattctcaagatgggcattgagtttattttgcctgagcatttgtcgttcacgcgccgccagcacccgctgccggaccgttgcgctcgattcttcgccctgcgagccctgactcagtattcctggcggcggcaatgggatctctaaggaaagatcgaagcggtcgaggaaggggcctgacaggcgtccaaggtagcgcaatgtctgctccggcgatgcacgattatgtttaccctgataatgtcctgtcgggcttggattcatcgctgcaataagctgaaagcgcgccggatagtcaattttggcgcgcgagcgtgatatgtggatcttgcctgactcaatgggttcgcgtagcgcatccagtacccgccgctcaaactccggcagttcatcaagaaacagcacgccattatgggccagggaaatctcaccggggaccggtatcgagccgccgcccaccatcgctgccagcgaggcgctatggtggggggcgcggaacggcctctgacgccaccgcgtctttgcggtgtggaggttgaccagactctgtatggccgcgctctccagcgcttcctgattgcttaatggcggcaggagaccggggagtcggctggctagcatggttttcccggtcccgggcgggcctatcaggagcagattgtgaccaccggcggccacaatctccagcgctcgtttgccctgctgctggccgataacatcgagcagatcttcgtagcgttcatcccgagcaggcgcctcggcgagaggcggcgaaagcgatgtctgccccgcaagaaatgcgcaaacctcctgcagatggtcggcgaccagacaatcgctgccgccgatcaggccgacctccgccgcattgtcagaggagacgacaatgcgccggccggctttgatggcctccattgcgctggggatcgcccctggaacgcctcgtaacccacctgtaagggcgagttcgcccacaaactcatattgattcagtcgcgtcgtgttgagctgctctgaggcaacgagaagcgcgagagcgatgggcagatcgtatcgtccgccttctttgggcagatccgctggcgccaggttaatggttatcttcttcgcaggaaaagcgtagccgctgttgatcagggcgctgcggacccggtcgcgggcctctttcacggtggtttccggcagcccgaccatagttagaccaggaagaccgttgctgagatgaacctcaacggtaatcaatggcgcttcgataccgagcgccgcgcgagtatagacgatagcgagcgacataaaacctcctggacagagaagaattatggttggcatgacgtaaagcgagaatggaaaaagtgcgaatttagaactgcgtatccatacttttcgcggcatatcgttacatttagccgaaaatggacgtttgatcgcaaaacagagctatgttggcaaagagggcgacgaagagcgcggcaggcgtgagaaaactgaatttttttcatttttgatttttttcatataaaacaattatttttattgaaaccgttaggctgatcagcaacgaagatataaaaaaatcttgtgctttatgtgatgtctgtggtaactctttaggtattccttcgaacaagaagccagaaagtatagaaaatgacagcccttctacgagtgattagcctggtcgtgattagcgtggtggtgattattatcccaccgtgcggggctgcacttggacgaggaaaggcttagaaatcaagccttaacgaactaagacccccgcaccgaaaggtccgggggtttttttataactgaaataacctaagcgaggagcagatgatgacttttagcataaaattctgtttctcccgatttatgacggggaactaactatgaatggcgcgcagtgggtggtacatgctttgcggacacagggagtcgacacagtttttggctatccgggtggcgcaattatgccggtttacgatgcactgtatgacggcggcgtggagcacctgctgtgccggcatgagcaaggggcggccatggcggccattggttatgcgcgagcaaccggtaaaaccggggtgtgtatcgcgacgtccggcccgggcgcgaccaatctgatcaccggcctggcggacgccctgcttgactctattcccatcgtagctatcaccggccaggtggccgcacccttcatcggcacggatgcgttccaggaagtagacgttctcggtttgtcactggcctgtactaagcacagtttccttgtgcagtctctggacgaactgccgcgggttattgctgaggctttccaggtggcaaactcaggccgtccaggtccggtgctggttgatatccctaaggatattcagatggcgcagggcgacctcgatccccatttctctaccgtcgccgatgagatggcatttccgcaggcggaagtggcgcaggctctgcagatgctggcccaatcgcagcaaccgatgctgtatgttggcggcggggtcggcatggcgcaggcggtaccggctttgcgcgaattcctggcggtgaccaggatgccggcaacctgcaccctgaaagggctgggcgtggtggatgctgattatccctattatctcggcatgctgggaatgcacggcactaaggcggccaacctggcggtacaggagtgcgatctgctgatcgccgtcggcgcgcgctttgacgatcgcgtgaccggtaagctcaataccttcgcaccgcatgccaaagtgatccacatggacatcgatccggcggagctgaacaagctgcgtcaggcgcatatcggtctgacaggcgatctgaactgcctgctgccggcgctgcagcagccgttagctatcgatggctggcgcgagcggagtgccgcactgcgtgccgagcatgcctggcgttacgatcatcccggtgaggcaatctacgcgccgctgctgctgaagcagctttccgaccgcaagccggcggacagcgtggtgaccaccgacgttggccagcaccagatgtggtcggctcagcatatgacctatacccgcccggaaaactttatcacctccagcggcttaggcaccatgggctttggcctgccggccgccgttggcgcccaggtggcgcgccctaacgatacggtgatctgtatctccggtgacggctccttcatgatgaatgtacaggagctgggcaccgttaaacgcaagcagttaccgctgaagatcgtgttactcgacaaccagcggttagggatggttcgacaatggcagcagctgtttttccaggaacgttatagcgaaaccactctgactgataaccctgatttcctcacgctggccagcgccttcggtattcctggccaacacatcacccgtaaagaccaagttgaagcggcactcgacaccatgctttcgagccaggggccatacctgcttcatgtctcaatcgacgaacttgagaatgtctggccgttggtgccgcccggcgccagtaactctgaaatgctggagaaattatcatgatgcaacatcaggtcgctttacaggcacgtttcaacccggaaaccttagagcgcgtgctgcgcgttgtccgccaccggggtttccacatctgcgcaatgaacatggaaaccgcgccggacgcacagaacataaatatcgaattgaccgttgccagcccgcggcccgtcgaattactgtttagtcaattaagcaaactggtcgacgttgcctgcgtcgagatccagcaacccacatcacaacaaatccgcgcctgagcgcaaaggaagaaaaatgacgacgaaaaaagctgattacatttggttcaatggcgagatggttccgtggggcgaagcgaaagttcatgtgatgtcccatgcgctgcactacggtacctcggtattcgaggggatccgttgctacgactcgcacaaaggcccggtggtgttccgtcatcgcgaacatatgcagcgtctgcatgattcagccaaaatttatcgtttcccggtctcccagagcgtcgacgaactgatggaagcctgccgcgaagtcattcgaaccaataatctgaccagcgcttatatccgtccgctggtgtttgttggcgatgtcggcatgggggtaaacccgcctccgggttacaacactgacgtgatcatcgcggcgttcccatggggagcctacctcggcgcagaagcgcttgagcaggggatcgatgcaatggtctcttcctggaaccgcgcggcgccgaacactatcccgacggcagcgaaagccggtggtaattatctttcctcgctgctggttggcagtgaagcgcgtcgccatggctatcaggaaggtatcgccctcgatgttaacggctatatctccgaaggcgcaggggaaaacctgtttgaagtgaaggacggtgtactgttcaccccgccgtttacctcttccgcgctgccgggcattacccgcgacgcgatcatcaaactggcgaaagatcttggtatcgaagtccgcgagcaggtgttgtcccgtgaatccctgtatctggcggatgaagtcttcatgtccggcactgcggcggaaatcaccccggtgcgcagcgtggacggcatccaggtcggcgcaggccgtcgcggtccggtaaccaaacgcattcaggaagccttctttggcctcttcaccggtgaaacagaagataaatggggctggttggatccggtaagtaagtaattaaaaatgggacggcacgcaccgtcccatttaataaacacagatgggagtaaaaagagcatgcctaagtaccgttccgccaccaccacacatggccgcaatatggcgggcgcccgcgcgttgtggcgcgcaaccggaatgaccgatgccgatttcggcaaaccgattatcgccgtcgttaactcctttacccagtttgtccccgggcacgtgcacctgcgcgatctcggcaaactggttgccgagcagattgaagccgccggtggcgtggccaaagaattcaacaccatcgcagtggatgatgggatcgctatgggccacgggggtatgctctattcactgccatcccgcgagctgatcgccgactcggtggagtatatggttaacgcccactgcgctgatgcaatggtttgtatctccaactgcgacaaaatcaccccggggatgctgatggcctccctgcgtttgaatattccggtgatctttgtttccggcggcccgatggaagccgggaagaccaagctgtcagataaaatcatcaagcttgacctggtggatgcgatgattcagggggcggatccgaaagtgtccgacgagcagagtaatcaggtggaacgctccgcctgcccgacctgcggctcctgttccgggatgttcacggcgaactccatgaactgcctgaccgaagcgctgggcctgtcgcagccgggcaacggctctctgctggcgacccacgccgatcgtaaggagctgttcctaaacgccgggaaacgtatcgtggagctgaccaaacgctattacgagcaggatgacgcttccgcgctgccgcgcaatatcgccagcaaggcggcctttgagaacgctatgacgctggatatcgccatgggcggctccaccaataccgttctgcacctgctggcggcggcgcaggaagctgaaatcgacttcaccatgagcgatatcgataagctctcccgcaaagtaccgcagctgtgtaaggtggcgccgagcacgcagaaataccatatggaagatgtgcatcgcgccggcggcgtgctgggcattctgggcgagctgaaccgcgccgggctgctgaatcgcgaggtcaaaaacgtccttggcctgacgctgccgcagaccctggaacagtacgatgtgatggtgacccaggacgatgcggtgaaaaaaatgttccgcgccggcccggcgggcatccgtaccacccaggcgttctcgcaagactgccgctgggataccctggatgacgatcgcgccgaaggctgtatccgttctctggaacacgcttacagcaaggacggcggcctggcggtgctgtacggcaatttcgcagaaaacggttgtatcgtgaaaaccgccggcgtggacgacagcatcctgaaatttaccggtccggcgaaagtatatgagagccaggacgatgcggttgaggccatcctcggcggtaaagtcgtggaaggcgacgtcgtggtgatccgctacgaagggccgaaaggcgggccggggatgcaggaaatgctttaccccaccagcttcctgaagtcgatggggctgggcaaagcgtgcgcgctgatcaccgatggccgtttctccggcggcacctcagggctctctatcggtcacgtctctccggaagcggcgagcggcggcaacattgcgctcattgaagatggcgacatgatcgcgattgatattccgaaccgcagcatccagctgcagctgagcgatgcggaaattgcggcgcgtcgtgaagcccaggaggcgcgtggcgaccaggcgtggacgccgaagaatcgccagcgtcaggtctcctttgcccttcgcgcctacgccagcctggcgaccagcgccgacaaaggcgcggtacgcgataaatccaagctgggtggctaatcatggcggattcacaacccttgtccggcgcccctgagggcgccgagtacctgcgagcagtgctgcgcgcgccggtttatgaagcggtgcagaaaacgccgctgcaaaaaatggataagctctcgtcgcggctggataacgttattctggtgaagcgtgaagatcgccagccggtacacagctttaagctgcgcggcgcttacgcgatgatgtccagcctgactgccgaacagaaatcccacggggtgatcaccgcttcggcgggcaaccatgcccagggcgtggcgttttccgcatcgcggctgggcgttaaggcgctgatcgtgatgccggtagcgaccgccgatatcaaagtcgatgccgttcgcggctttggcggcgaagtgctgctgcacggcgccaactttgacgaagcgaaggcgagagcgattgagctggcgcaacagcagggttttacctgggtgccgccgttcgatcacccaatggtcatcgccggacagggaaccctggcgctggagctgctgcagcaggatgcccatattgaccgcgtattcgtcccggtgggcggcggcggtctggcagcgggcgtggcggtgctgatcaagcagctgatgccgcagatcaaagtgatcgcggtggaggcggaagattctgcttgcctgaaggcggcgctggacgcaggccatccggtggatctgccgcgcgtcggcttgtttgccgaaggcgtggcggtcaaacgcatcggcgatgaaacgttccgtttatgccaggagtatctggacgatatcatcaccgtcgatagcgatgctatctgcgcggcgatgaaggatctgttcgaagatgtgcgggcggtggcggagccttccggcgcgctggcgctggcggggatgaaaaagtatatcgcccagcataacatccgcggcgagcgtctggctcatattctgtccggggccaacgtcaacttccacggcctgcgctacgtgtccgagcgctgcgagctcggggaacagcgcgaagcgctgctggcggtgacgatcccggaagagaaaggtagctttttgaagttttgccagctactggggggccgctcggtgacggagttcaactaccgctttgccgatgccaaagacgcctgtatttttgtcggggtacgcctgagtcgtggcctggaagagcgcaaagagatcctccagttactgaacgacggcggctacagcgtggtggatctctctgatgatgagatggctaagctgcatgtgcgctatatggtcggcggccggccgtcaaaagcgctgcaggagcggctgttcagcttcgagtttccggaatcgccgggggcgctgctgaaattcctgcatacccttggcacccactggaatatttcactgttccactaccgcagccacggtactgactatggtcgggtactggcggccttcgagttgggcgagcacgagccggactttgaaactcgtctcaatgagctgggctatgagtgccacgacgaaacgcataacccggcattccgcttttttctcgcgggttagtggttgggaagaattttccagaaagcatcaataagcggctcatgcagccgctttttttgtgcgcaaacgcccagctcaaacggagtttgctcatcgctgcgctccaggatcatcaccctgttgcgtaccggctccggactgttctccagcaccacttccggcagcagcgccacgccgcatcccagggcgaccatcgacaccatcgcttcgtgcccgccgacggtggcgtagatcgacggattgctgattttatgccgccgaaaccacagctcgatgcgccgacgtaccggcccctggtcggccatgataaagggcactgtcgaccagtcggggcgctcgacggtcacctggttgcgcaccgggcagggaagggccggggcaattaacaccacggcgaggttctccagcatcgaaaacgccaccgaccctggcagagtctccggcttaccggcaatcgccaggtcggcttcgccggtgacgaccttctccatagcgtcggcggcgtcgccggtcgagagcttgatctccaccgaggggtgcgcggcgcgaaagcggtcgaggatcggcggcagatggctataggcggcggtgacagagcagaagatatgcagctcgccggagagcgaagggccctgctgatcgatgacgtgacgaagctgctggtactgcaataaagtttgctgggcaaaggtacgtaactcttccccggcttcggtaagggtcaccgtgcgattatctcgcacgaacagcggctggccgaggtcctcttccagacgttggatctggcgcgaaagcgtcgacgggctgacgtgcatggcccgcgcgctgcggccaaaatggcggctttccgccagatgcagaaaggttttcagatcgcgtaaatccacggcgcgtactccccggttttgtatttcataaaatgcaacgtgacgttgtgaatatatcaatttccgcaataaaattcctgtcatatagtaagttcattctcgcaaaagcgaaccgaacaataagcacgacacaacatcacggagttacagacatggctaactactttaatacactgaacctgcgccagcagctggcacagctgggcaaatgccgctttatggcgcgcgacgaattcgccgatggcgcaagctaccttcagggtaaaaaagtggtcatcgtcggctgcggcgcgcagggtctgaaccagggtctgaacatgcgtgactccggcctggatatctcctatgcgctgcgtaaagaagcgatcgctgagaagcgcgcctcctggcgtaaagcgactgaaaacggcttcaaagtcggcacttatgaagagctgatcccgcaggcggacctggtggttaacctgacgccggacaaacagcactcagacgttgtgcgctccgtacagccgctgatgaaagacggcgcagcgctgggttactcccacggcttcaacatcgtggaagtgggcgagcagatccgtaaagacatcaccgtggtgatggtggcgccgaagtgcccgggcaccgaagtgcgtgaagagtacaaacgcggtttcggcgtaccgacgcttatcgcggtacacccggaaaacgacccgaaaggcgaaggcatggcgattgccaaagcatgggctgcggcgacaggcggccaccgcgcgggcgtgctggaatcttccttcgtggcggaagtgaaatctgacctgatgggcgagcaaaccatcctttgcggcatgctgcaggcgggttctctgctgtgcttcgacaagctggtggcggaaggtaccgatccggcgtatgcagaaaaactgattcagttcggctgggaaaccatcaccgaagcgctgaagcagggcggcatcaccctgatgatggatcgcctctccaacccggcgaaactgcgcgcttatgcgctgtccgagcagctgaaagagatcatggcgccgctgttccagaaacacatggacgacatcatctccggcgaattctcctccggtatgatggcggactgggcgaatgatgataagaaactgctgacctggcgtgaagagaccggcaaaaccgccttcgaaaccgcgccgcaatatgaaggcaaaatcggcgagcaggagtacttcgataaaggcgttctgatgatcgcgatggtgaaagcgggcgttgagctggccttcgaaaccatggtggcctccggcatcatcgaagagtctgcttactacgaatcactgcatgagctgccgcttatcgccaacaccatcgcccgtaagcgtctgtatgagatgaacgtggttatttccgataccgctgaatatggtaactacctgttctcttacgcttgcgtaccgctgctgaaagagttcatgaccaccctgcagaccggcgacctgggcacagcgattgccgaaggcgcggtagataacgcgcagctgcgcgatgtgaacgaagcgattcgcagccacgctatcgagcaggttggtaagaaactgcgcggttatatgaccgatatgaagcgtatcgcggtagccggctaattcctcgtcgtctttcgacttgccgatgcgttggctacggtacgtacaccccagtcacatagtaatctttgttcctggggatgtacttccttgccgccttccggcaagccgaaatccatagaggcatggatttgtttagtaggcctgataagcgaagcgccatcaggcaaaaacccggagattaagatccccgggtttttttattatttccggtacagcactttgatgatgtggtagccgaactgggtatgcagcgggccggttggctccagttcagggcaggagaagaccactttatcgaaggctggtaccatctggccctggcggaactcacccagatcgccgccgcgtttgcctgacggacaaatggagtgtttctttgccagcttgccgaaatcggcgccgtttttgagctgctcgagcagatcgagcgccagtttctcttcttttaccaggatatgcagtgctgccgcggttttagccatgattgcgccttgagtgagttggaataaatcagggcgccatagtatcacgcgctagcggcgatacagcaccttgatgatgtggtagccgaatttggttttcaccgggccatagggtttgagcagcggacagctgaagacggcttgatcaaacggaccgaccatcgcgccttgctgaaactcgcctaagtcgccgccgttgcggccagacggacatttagaatagcgtttcgccagatgatcgaagctgacgccccgctccagtttggcgaggatctccagcgccagtttctcttcttttaccaggatatgcagggccgctgcgctttttgccatgacatcattctcaggatggtttgcgtggctgacactttaccatcagtcagtaaatctcggctccgctttctgctacaatccccaccccgttcgaagattgagcaagactcccatgcgtttaaaccctggccaacaacaagccgtcgaattcgtcaccggaccgtgcctggtgctggcgggcgccggttccggtaagacccgcgttattacgaataaaatcgcccacctgatccgcggctgcggctatcaggcgcgccatatcgcggccgtgacctttaccaacaaagccgcgcgcgagatgaaagagcgcgttgggcaaacgctggggcgcaaagaggcgcgtgggctgatgatttccaccttccacactttggggctggatatcattaagcgcgaatacgctgcgctgggtatgaagtctaacttttccttattcgacgataccgaccaggtggcgctgcttaaggaactgaccgaagggttgatcgaagatgacaaagtggtgcttcagcagctgatctcgacgatctccaactggaaaaacgatctaaaaaccccggcgcaggccgccgctggcgcgaaaggcgaacgggatcgtattttcgcccactgctatgggctatacgacgcgcacatgaaggcctgcaatgtcctcgattttgacgatctgatcctgctgccaacgctgctgctgcagcgcaacgaggaggtgcgcgagcgctggcaaaataagatccgctacctgctggtggatgagtatcaggataccaataccagccagtatgagctggtgaaactgctggtgggtcagcgggcgcgctttaccgtggtgggcgatgacgaccagtcgatctactcctggcgcggcgcgcggccgcagaacctggtgctgctcagccaggacttcccggcgctgcaggtgatcaagcttgagcagaactaccgctcatccgggcgtattctgaaagccgccaacattttgatcgccaataaccctcacgtctttgaaaagcggctgttctccgaactgggatatggcgcagagctgaaagtgctctccgccaacaatgaagatcatgaagcggagcgcgtggccggggagctgatcgcccaccacttcattaataaaaccaattacaaagactacgcgattctttatcgcggcaatcaccagtcgcgggtctttgaaaagatgctgatgcagaaccgcatcccgtacaaaatctccggcggcacgtcgttcttttcgcgtccggaaattaaagatctgctggcctatctgcgcgtgctgaccaacccggacgacgacagcgccttcctgcgtatcgtcaacacgccgaagcgcgagatcggcccggcgacgctgcaaaagctcggtgagtgggcgatgggccgcaacaaaggattgttcaccgccagctttgatatgggtctcagccagacgctgaccgggcgcggctatgaatccctcacccgcttcacccactggctacgcgagatccagcagctggccgaacgcgagccggtcaacgccgtgcgcgatttgattcgcgggatcgactacgaatcctggctgtatgaaacctcgcccagcccgaaagccgcggaaatgcgcatgaaaaacgtcaaccagctgtttacctggatgaccgagatgctggaaggcagcgaaatcgatgagccgatgaccctgacccaggtggtcacccgctttaccctgcgcgacatgatggagcgcggcgaatcggatgaagagctggatcaggtgcagctgatgactctccatgcgtcaaaggggctggagttcccctacgtttatctggtgggaatggaagagggattgctgccgcaccaaagcagcattgatgaagataacgtcgatgaagagcgacggttagcctacgttggcatcacccgtgcgcagaaagagctgacctttacgctctgtaaggagcgccggcaatatggcgagctggtgcgtcctgaaccgagtcgttttctgctggagctccctcaggacgaccttatctgggagcaggcacgcaaaaccattacgcctgaagagcggatgcaaaaaggccaggccaacgtcgctaatattcgggcgatgctggcaaaggcgaaaaaagcttagcgtctcaggcgataaactgctgccaggcggcggagaagggcatcaccagtattagcgagggcagcatattggcggtagggaaggcacggatcccgcacagacggaaaccggtcgccagcataatgatgccgccgcaggcggtgaagtcggcgatcatcgacggattgattaacgccatgataaaggttgccgcgaaaaacaggataacgaaaacaatcagctggggaataaagatcacggtgatgatataccccagcgtggaggcgaaaatcgcggcagtaaaaaagtcgaggatcgacttggtcagcagaatggtcgggtcgccggtcatcccttcggttaaggcgccgaagatgccggtaccgctggcgcagaacaggatcagcacggcgataaactgattcataaaatcttccgcaccgacgctggcgctggactgcgccggaaagatacgttcaatggggctgcgcagcgttgttccggctcgttcaatccatttttcaatattcaacaggccgccgataatcgtgccgacaataatagccagggcaatcggcggcaggttatgcaatttattgacaaagaatatgcccatactgattgagatcagtccggcgatcaacggtaaggtttttttaaaatgttccggaataaaacgattcagtgaagcgcccgccagcgcaccaacgagaagcgagccgctacagacaaatatacctatagccataatttattttccctaataaaaatcagggcctgaatatacaggccctgaaatatttaaattaattatttaatgttaaatacgcggctggcattaccccaggcgattttctctttcaggcctgcttcaagttctaaaggatcaaaccagtcgcaggcctgatgaatatcttcatacggataatcgacagagaacatcacgcgatcggcgcccatgacttcaatagcattattcagtgaatgggtattgaaatggccgctggtggtaacgatgaagttattctgcaggtagtgcattaacggtttttccgctttacccagaccgcagccgaaacgctgacgatagagacgatgttgagtgcgcggcagcatatgtaccagcccttcgccgaggtgacccagcaccagattgaggttaggataacgatcgaacagaccgctcatcatcagacgaatagcatgcactgccgtttcctgagcgaagccccaggcagagccgatcaggctttcgtaaccggtatagatgccacgcgccgggccttccagcggttcacgaggatgcagatagacaggcacgttcagctcgttgaccttatcccagaataccagcatggattcgtcatcaagatacaggccatgctcgctatctttaacgttggtgtagccgttgatcagcgcacctttcatgcctaactttttcacggcgcgctccagctcttccgccgcggcttccgggttctgcaatgccagggtggcgaaggcgctgaatttgtccggatttggcttaacataattctcaacgataaaatcgttggtatcgcgggcaaaagagacggctttggctttatctaaaatagactgggcgccaggtgaagtcagagaaagaattacatgatcaatatgacgctgcgccatttcttccagctgaatgctgcgatccagcaggcggcgttcaacatctttcatatattctgtgccgttacgacctgcttcaccagatgaatcccacagacggttattttcaggagtggatacgtgttcttctaaagcaatttttccgcgcatgatattttccttgcgatatgagtcagtgtggcttgatgcgaggagaataaaagctttcgcgtattaccagcaataaaccaaacgtaataggggttattaataaaaccaatacacgggcgtattttgttacttagattttaatagaagtactctgctgtgcgggatcggcaagcgtagcgatcagcgagcgtagccagatatgtccgggatcgcggtgcagccgctgatgccagacctgacggatggcgattttggcgaggggaaaaggcagcggccagctgcggcagggatagcgccgggtgatatgccgcgccacctgttccgggacgacggcaatcatatcgctttcggccaccagctcaccggtacctaaaaaacttggtaacgttagcgcaatgcgccggggcatgtggtgctcatcaagcagcttatccatatcgccatgggcagtcccctccacgcggatcgccagatgcttttcctggcgccagtcttcggcgcggagctgtgcgcgaatgcgaggatggttttccgcagccaggcagacatatgattgttcgaagagatgttgctggtagacgctttccggaagctgcgtcagatagccgatcgcgagatcgcatttcccggattcgagggcgttgagggtctgctcatccagattctgtaccgtaaaggtgatcccgtccgccgcctgctgctggagcgcaatttgcaataaaggcagcagcgtcatttggctgatatcggtcataccgatcgtaaaattacgctggctctgctggggaagaaattcaggtttgaccgctaaatcgttatcggcaagctggagaagagtcgagatggtgggggcgatcgcgtccgctcgcggcgtcgggatcatccgctgcccgacccggacaaacagcgggtcagcaaaatgatctcgtagttttttcagcaaaaggctgccggtgggctggctgatatcgagcgcgtcagccgctggggaaacattgcccaagcggtagagcgcagagaaaaagcgtagcgatttgaaatccagttcttcccgcatccgccctcctggctggatattatttcagcgtatcgccgctggcgacccgaagtatccagtggacgtagctttgccactgacactcctgatcgaccatctcccgacccagcggatgttcatccagccagtttcccggcaatatcagcgtcagttgttcgtcttgagcggtcagctgaatggcgggcaacagatcgtcgcgccgccggctggcaaacaggattgccagtcgcagcagacgacacagatgctcagccacccgcggtgggacggcattctgttgatgaagcgaagagaggtcgatagcgttagtctggttaaggagcagcgtggcaatcagcttcttctgcgccggggtaaagcccggcaggtcgaggttattgaccagataggcggcatgctgcggcgcgcgcttaaaatccacgctcagcccaatctcatgcagcgcacaggcgctaaggagtaaatcacggcttagcggatccagctcccagctgccatccaactgactgagcagatgactggcaaggccgccgacgcgctgggcctgttcggtgtcgatcataaaacgacgctgaatattacgcagcgtgcggctgcggatgtcctgctcaacggagagatgcagcatgccgtacaccaggccttcgcgtaacgcgccgcccgcgagggtcatacactgaatattcagttcgctgaagatagcgatcaggatcgccagcccgctaggaaacaccagcgcccgctcaagggttaagccttcgatctccagctcttccagacgtccgcactggatagcgcgctgtttaagctgctggagtttggcgagggtgattcgttcatccatcccctgcgccatcataatttcctgcagagcctgaacggtgccggaggcgccaacgcacactttccatccgtgatagcgcagcacatcggcgacgggcagtagtacctcgcgcgcagccgcttcggcgagatcgaaattctctttcgtcagactacggtcggcaaaatagcgttcaagccaggtgacacagcccatcgacaggctaaacagcgaggttgtttgtgcgccggtcccggtcaccagctcggtgctggcgccgccgatatcgaccaccaggcgctgatcggcgccgccggtggtgtgggcgacaccctggtaaatcaggcgcgcttcttcttcgccgctgatcacttgcactggagtgccgaggatctcctgcgctttcgccagaaactcccccgcattgacggcaagacgcagcgtggcggtggccacgacgcggatttgcgtcggcggaatatcctgcaggcgctcggcaaacaggcgtaagcactgccagccccgttccatcgcttctgcggagagggtgttgtcgctattcaggccggcggccagtcgaaccttacgcttaatgcggctcagcgtctggatgctgcccgccacctcgcgcaccaccaacatatggaaactattggagcccaaatcaatggcggcatatagcgaggtggagctcatactcttcatcgttcagaaggctccctggtcggcggggcgcttaggcccgatccacatcactgagcgggtcgccagaggaaggtcgccctggcagattctgaatgactgagcgtatggcatagatctcttaacctgaacgacgacgattgcgcggtggaccgttacggcgcgggccgttgcctgggcgcgcacgggtcagacgcagcggcttaggcaggtcggtcatcagcgcgtccgggttgtacttactgaccggaattgagtgaccaatataggtttcgatcgccggcagattcagcgcatactcttcgcaggcgaggctaatggagtgaccgctggcgccagcgcgaccggtacggccgatgcggtgaacgtaatcttcgcagtcgtccggcagatcgtagttaaagacgtgagtcacggccggaatatgtaagccacgggcggcaacatcggtcgcgaccagaatatcgaggtcgccacgggtaaattcttcgagaatgcgcagacgttttttctgcgccacgtcgccggtcagcagacctacgcgatggccgtcggcggcgagatggccccagatatcttcgcaacggtgcttggtattggcgaaaacgatggcgcgatcgggccactcttcttccagcagcgtctgcagcaggcgcattttttcttcgttggacgggtagaagagctcttctttaatacggtggcccgttttctgttccggctcgacttcaacgtactcggcgttattcatttgttcgaacgccagttcgcggacgcgataagaaagggtcgcggagaacagcatgttcaggcgctgagtggccggcggcatgcggcggaacagccagcggatatctttaataaagccgagatcgtacatgcgatcggcttcgtccagcacgacaacctgaatggcgccgaggttaatgtggttctgcttcgcgtaatcgatcagacgaccagtggtgccgatcagaatatcgacgccgctttccagcactttcaactgcttatcgtagccgtcgccgccgtaagccagacccagcttcagaccggtggcctgcgccagtggctcagcgtcggcgtggatctgtaccgccagttcacgcgtcggcgccataatcagcgcgcgcggttggttaacctggcgatcggcgatagccgggtgagagagaagataatgaaacgttgacgtcaggaacgccatcgttttaccggtaccggtttgcgcctgcccggcgacatcgcggccttccagcgtcagcggaagggcgagggcctgaatgggtgtgcaattatgaaaccctttcttttcaagggcttcaatgactgccgggtgcagggcgaagtcggaaaacttctgttctgttaaatgtgttttgctcatagtgtggtagaatatcagctaactattgcattaagaaagcgtatccggtgaaataacgtcaacctttcgttggcggtgtacgaaattattcaaggtacgtctacggtaactgaacgaatccaggatagcttagactactaagcgagtcgggagcgataaatctgcagcatgcagttcgcgttcaggcaccctggcgtcaacaggcgagtccatgatggattgcgccagttggcaggccagagaattgaggtatcctgaagaatagcgtgcataacgtagccgcagcgcgtcgttgatggctacgacaccaacacaccaggcttattcctgtggagttaaatatgagcgataaaattattcacctgactgacgacagttttgacacggacgtactcaaggctgacgggctgaccctcgtcgatttctgggcagagtggtgtggtccgtgcaaaatgatcgccccgattctggatgagatcgctgaagagtatcagggcaaactgaccgtagctaagctgaacattgaccagaacccgggcactgcgccgaaatacggcattcgcggtatcccaaccctgctgctgtttaaaaacggcgaagtggcggccactaaagttggcgccctgtccaagggtcagctgaaagagttcctcgacgctaacctggcgtaagcgaattgctgttccggcgtccagattcctattttttgcggaactctggacgcccggctggagtcgtgctaagttaatccacagacttcgttttaaacataccttgtttgaatcttgttttacccgaagcatcccgcataaatgcgcgtgaagctaataattccgggcttttcactcattccgtctagtcgtttcagttctgcgttctttcctgtgaccaggcaacgtacagacacgagatgaaggccgttaacaggcatggaagttcctgccataccattcacaacattaagttcgagatttaccccgagtttaagaacccacaccactatgaatcttaccgaattaaagaatacgccggtttctgagctgattactctcggcgaaaatatggggctggaaaacctggctcgtatgcgtaagcaggatattatttttgccatcctcaagcagcattcgaagagtggcgaagatatctttggcgacggcgtactggagatactgcaggatggatttggattcctccgctccgcagacagctcctacctcgccggccctgacgacatctacgtatcccccagccaaatccgccgtttcaacctccgcactggtgacaccatttccggtaagattcgtcctccgaaagagggtgaacgttactttgcgctgctgaaagttaacgaagttaactacgacaagccggaaaacgcgcgtaacaagatcctgttcgagaacttaacgccgctgcacgcgaactctcgcctgcgtatggagcgtggtaacggttctaccgaagacttaaccgctcgcgtactggatctggcctccccgattggccgcggccagcgtggtctgatcgtcgcgccgccgaaagccggtaaaaccatgctgctgcagaacatcgcgcagagcatcgcatacaaccacccggactgtgtcctgatggtactgctgatcgacgaacgtccggaagaagtgaccgagatgcagcgtctggtgaaaggtgaagtggttgcttccacctttgacgagccggcatcccgtcacgtgcaggttgccgagatggttattgagaaagcgaaacgtctggttgaacacaagaaagacgttatcatcctgctcgactctattacccgtctggcgcgtgcctacaacaccgtggttccggcttccggtaaagtgttgaccggtggtgtggacgccaacgccctgcaccgtccgaagcgtttctttggtgcggcacgtaacgtcgaggagggcggtagtctgaccatcatcgccacggcgctgatcgacaccggttccaaaatggacgaagttatctacgaagagtttaaaggcaccggtaatatggaactgcacctctctcgtaagattgctgaaaaacgcgtcttcccggctatcgactacaaccgttccggtacccgtaaagaagagctgcttaccactcaggaagagctgcagaaaatgtggatcctgcgcaaaattatccatccgatgggtgagattgatgcgatggaattcctcatcaataagctggcaatgaccaagacgaatgatgacttcttcgatatgatgaagcgctcgtaaggtaaaaaaagccaaaaacgccacgcctttgcgtggcgttttcattttggggtttgtatgatccagagacagagaaagcgggacgaaagttgtcgtataatggcgccggatagcaggcggagacagctttaacagactaaaatctatacaataaatttgtaatgttctgcttttccccttctggagttggggcatcatcgctatacttcccggattaactatgctgagagcacatgcgttgtgaatttactcactgctattactgaattaatcagtattttcttattcacgaccctctttatttttgtcgcgcggaaagtggcaaaaaagatcgggttagtggataaacccaactatcgcaaacggcatcaggggttgattccgttggtcggtggtatctcagtttatgcaggtatctgtttcactttcgccatcgccgattattatattcctcacgcctcgctgtatctggcctgcgcgggggtattggtgctggttggcgcgcttgacgatcgcttcgacatcagcgtgaaaattcgcgcggtcattcaggccgcgatcgccgtgattatgatgatggcagggaatctgcatctgagtagtttgggctttatttttggatcgtgggaactggtgctggggcccttcggcttcttcctgacgctgtttgccgtctgggccgctatcaatgcgttcaacatggtcgatggtatcgacggcctgctcggcggactgtcttcggtctcttttgcggcgaccgggattatcctttggtttgatggtcagtacagcctggcgatgtggtgtttcgcgatgatcgccgccattctaccctatattcttctcaatcttggcgccctcggccgccgctataaagtctttatgggtgacgccggcagcacgatgattggcttcaccatcatctggatcctgctggaaaccacgcaaggtaaaacgcatcccattagcccggtgaccgcgctgtggattatcgctatcccgctgatggacatggtggcgattatgtatcgccgcctgcgcaaaggcatgagtcctttctcaccggaccgtcagcatattcatcatttgatcatgcgagccgggtttacttcccgccaggcgtttgtcctgattaccctggccgccgccctgctggcgctggttggcgtcgtggcggaatacacccgcattgtgccggaatgggtgatgttaattctctttttggtagccttctttctttatggctactgtattaagcgcgcctggaaagtggcgcgcctggttaagcgcatcagacgcagaattcggcgacacagcggcaataatccgaaactaaccaagtagagctggggatgtgatgactcaaccattaccgggagcacaagcagtgaacgttgagaacgagctggatattcgcgggctgtttcgcgctttatgggcaggaaaaggctggatagtcggcggcgccgtactcttcgccgccatcgtgctggtgtacaccttctttgctcgccaggagtggagcgccacggcgatcaccgatcggcctactgtcaatatgttggggggatactattcccaacagcagttcttacgcaatctggacattaaagccgacctcgcctcggtcgaccagccttccgccatggatgaagcgtataaagagttcatcatgcagctggcctcctgggatacccggcgcgatttctggctgcaaacggactactacaagcagcgtcagtcgggtaatgcccgcgctgatgcggcgatgctggatgacctgattaacaatatccagtttatgccaggcgatgcggccaagagcattaacgacagcgtcaaactgaccgccgagaccgggcaggatgccaataatctgttgcgtcagtatgtggccttcgccagccagcgggcggcaggccatcttaacgacgaacttaaaggcgcctgggcggcgcggacggtgcagatgaaggcgcaggtgaagcgccaggaagaggtggccgaggccatcttcaaccgccggacgcacagcgtggagcaggcgctgaaggtggctcagcagcacaatatttcacgtagcgaaacggatgttcctgccgatcagttgccggattcagagctatttttattgggcaggccgatgctgcaggccaggctggaaaacctgcaggccgtcgggccggaatatgacctcgattacgaccagaaccgcgccatgctgagcacgttgaacgtcggtccaacgttagatccgcgttttcagacttaccggtatttgcggacgccggaagaacctgtaaaacgcgatagcccgcgccgtgtatttctgatggtgatgtgggggattgtgggtgcgctcatcggcgcaggcgtggcgttatcgcgtcgtcgtgtcctgtgattgcggcctgtggtgaagggcagatgaccttcatcgcctaatcgaagagaatcgatgtgaaagtactaactgtatttggcacgaggccggaagccatcaagatggcgcctctggtccatgcgctggcaaaggatcctcattttgaggcgaaagtatgcgtgaccgcgcagcatcgggagatgctcgatcaggtgttgaaacttttctctattgtcccggactacgatctcaacatcatgaagccggggcaggggctgaccgagatcacctgtcgcatccttgaagggctgaagccggtgctggagtcgtttaaacccgacgtggtgctggtgcatggcgataccaccaccaccatggcggcgagcctggcggcgttttaccagcggataccggtgggtcacgtagaggccggcctgcgcaccggcgatttaagttcgccgtggccggaagaaggcaaccgtacgttgaccggccatctggcgacataccatttcgcccccacggaaacctcgcggcagaacctgctgcgggaaaatattgccgacagtcggatcacggttaccgggaatacggtcattgacgccctgttctgggtgcgggatcgggtgctgggtgatgaagcgctacgggagaccctgctgcagcgctatcctttcatcagccatggtaaaaagatgattctggttaccggccaccggcgggaaagctttgggctcggttttgaacagatctgccaggcgctggccgagatagcccatacccaccctgaggtgcagattgtctatccggttcacctgaatcctaatgtcagcgagccggtgaatcgtattcttggtcatattgacaatgtgatgttgattgaaccgcaggattacctgccgttcgtctggctgatggatcgcgcctggctgatcctgaccgattccggcggcattcaggaagaggccccctcgctgggtaagccggtgctggtcatgcgcgatatgaccgaacgtccggaagcggtggccgccggcaccgtgtgtctggtgggcaccgacagccagcgcatcgtcgcggaagtgacgcgactgctggaggatgatgctgcataccaggcgatgagccgcgcgcataatccctatggcgatggcgaagcatgtcgtcgcattttgtctgcacttaaaaataatcaggtaacgctatgagtttttctaccatttcagtgattggccttggctatatcgggctgccaaccgctgccgcgttcgcctcccggcagaagcgggtggtcggcgttgatgttaatcaacatgccgtggagaccattaaccgtggagagattcatatcgtggagccagatctggcgagcgtggtgaagaccgcggtcgagcaggggtatttaagcgccaccaccaccccggtggaggcggatgcttacctgattgccgtgccgacgccgtttaaagatcgccacgagccggatatggtgtttgtcgagtcggccgccaaatctattgcgccgacgttaaagaaagggtcgctggtgatcctcgagtccacttcgccggtcgggtcgaccgaacagatggccgagtggctggcggagatgcgcccggatcttagcttcccccagcaggtgggtgaagcggcggacgtgaatatcgcctactgcccggagcgggtattgcccggtcaggtgatggtcgagctgattaaaaacgaccgcgttatcggcggcatgtcgccggtctgctccgctcgcgccagcgagctgtataaaatcttccttgaaggcgaatgcgtggtgaccaactcgcgcaccgccgagatgtgcaagctgacggaaaacagcttccgcgacgtcaacatcgcttttgccaacgaactgtcgctgatttgcgccgaccaggggattaacgtctgggagctgatccgcctggcgaaccgccatccgcgcgtcaatatcctgcagccgggcccgggtgttggcggccactgtatcgccgtcgacccatggtttatcgtggcgcaaaacccgcagcaggcgcgtctgatccgcaccgctcgcgaggtcaacgaccacaagccggaatgggttatcgaacaggtgaaagcgcaggtggcggactgcctgaatgccaccaacaagcgggccagcgaactgacgatcgcctgttttggcctcgcttttaaaccgaatattgacgacctgcgcgaaagtccggcgatggaaattgccgcgcagattgcccgctggcacagcggcacgacccaggtggttgagcccaacattcacgcgctgccgaagaaactcgatggactgtgtacgctggcgacccttgaggcggcgctggccagcgccgatgtgctggtgatgct

SEQ ID NO: 5375 - DNA, 4072 bp, Unknown
  gut microbiota DNA sequence
ccaggagggcgcatggacggaatggaaaatctgatgccacgggagaagatgctgcaatacggcatcgaaacgctaacggatgttgagctgctggcgctgtttctgcgcgttggcacgcgtcgtcaggatgtgctcagctatgcccaggcgttactacagcgttttggctcactctacgctctgctttccgctgataaagcgcaactgattgctgtggacggactggggctggcgaaatatgcgcaactgaagggcattgccgagctggcgcgacgctattttagctcgcagctggtcgaggaggccgcgctggtcaccccctcgatgacgcgcgagtttttacaaagccagctgacggaagaggagcgcgagatctttatggtgatctttttagataatcagaaccgggtgttgaaacatagtcgtcttttttctggtactcttagccacgttgaggtgcatccgcgagaaattgtacgcgaagccatcaaagtgaacgccgccgccgtgatccttgcgcataatcatccctccggtagcccggagccaagtcaggccgacagactgattaccgaaagggtgataaaatgttgtagattcatggagatacgcgtgcttgatcatctggttatcggccgcggtgcgtatgtatcttttgccgaacgtggctggatttagccccgaactggcgatccttcgggatctttgtctgttcgggacttgagcacatcgccgagtcagcgtatactacgccacctttgagaatctcgggtttggcatttgggcctggcagtcgagagttcacattgaactgcgatgaccaggctgtaaagcctgacgaggcgccaataccccatacgaagctcgagctaatttgatttttggagaatagacatgtcccgagtctgccaagttactggcaagcgtccggtgaccggtaacaaccgttcccacgcactgaacgcgactaaacgccgtttcctgccgaacctgcactctcaccgtttctgggttgagagcgagaagcgttttgtcaccctgcgcgtatctgctaaaggtatgcgtgtaatcgataagaaaggcatcgatacagttctggctgaactgcgtgcccgtggcgaaaagtactaagtacttagaggaaataaatcatggctaaaggtattcgtgagaaaatcaagctggtttcttccgctggtactggtcacttctacaccaccacgaagaacaaacgtaccaaaccggaaaaaatggaactgaaaaagtacgatccggttgtacgtcagcacgttatctacaaagaagctaaaatcaaataattttagcctccttgtataaaaaccccgcttcggcggggttttttgtttttaaaactcccccatattgctttcacatactcccttttcagtcacctgtccgtgaagcacaatacgtcgggtaaacggaggaaaatcatgcctgaattaccagaggttgaaaccagccgccgcggcatcgagccgcacctggttggcgcaaccattctgcacgccgtcgtgcgcaacggacggctgcgctggccggtttccgaagagatttatcgcctgagcgacgttccggttctcagcgtgcgtcgccgcgccaaatacctgcttctggagctgccggacggctggatcatcgtccatcttgggatgtcggggagcctgcgcatcctgagcgaagagctgcctgctgaaaaacacgatcacgttgacctggtcatgagtaacggcaaggtgttgcgctacaccgatccacgccgctttggcgcctggttgtggaccagaacgctggaaggccatccggtactggcgcatcttggcccggagccgctcagcgacgcgttcaacgccgactatctccagcaaaaatgcgcgaagaagaaaaccgcgatcaaaccctggctgatggataacaagctggtggtgggcgtggggaatatctacgccagtgaatcgctgttctccgccgggatccatcctgaccggctggcgtcctcgctgtcgcgggaagagtgtgagcagctggtgaaggtgattaagctggtcctgctgcgttcgatagagcagggcggcaccacgttaaaggatttcctgcaaagcgatggcaagccgggctacttcgcccaggagctacaggtctatggccgcaagggcgaaccctgccggatctgcggcacgccggtcgtcgggaccaaacatgcccagcgggcgactttttattgccgtcagtgccagaagtagtctcaggaacaggaatgtttgtcggccaggtcagcgggcctgcgggtgcgcatctggtgggccgggggcgtttgtaggccaggtcagcgtagcgccatctggcacaaagaccgggacagagccggtgtgaatggcccagcggcgtagtgctgcgccagccgacgtggctcatgtcccggcagatgcgttacttcagcttattcaacagcgcctgatgcacattagctggcagaaagtgagaaacgtcgccctggtggcgcgccacttccttcaccagtgaggaagagataaacgaccactctttgcacggcatcagaaacacgctctcaagggtgggcatcaggtggcggttcatatgggccagctgcatctcatactcgaaatccgccaccgcccgcaggccgcggatcaggatattggcctgctgcgcgcgcgcgaaattggccatcaaatcactgaagccgataacctccacgttcaccaggtgggccgtcgcctgctctgccagcgcaatgcgctcatcaaggctgaacatcggctttttactcgggctggcggcgatagccagcaccactttatcgaacatacttgccgcgcgggtgacaatatcgatatgaccgttggtgatggggtcgaaggtacccggatagatcgcttttgtgctcatgatgactctttctccgagtagccgtggctcagcgcccacagctcggtatatttcgtaaacgtatactgcgcgttgaccatcgccagtaaccatccctgtttaccgtccagcaccccaccgcgcaatagcaacgtcttgaggaacgcgcccagcgtatggctgaaaatccctgccatcgaggtcttcttgcccttctggtgacgctcaagcgcccacgcggcggcatacgccagctgtttttgctggaagccagcgaagtcgcggcaggtcaggtgcaggagatcgccggtcagcggaataacctcggcgcccaggctatccagcgattcatggaccagattatcgttatagcggtaacgggcgcgttcgtacaggcgcaggacgcgatcgggataccaaccgctgtggcgcataaagcgtccgagaaaatagttacggcgggcgatgctgtagatggcgccgcgctggggggcgtccagtaccttaagaatagcctgcctgagttctggcgtgacgcgctcatcggtatcgatcatcaacacccagtcgccggtggcgtaatcctgcgcgcgctggcgctgaatgccatagcctcgccagtcggtatgggtatagacctgggcgccgaggcggcgggccagctcaacggtgttgtcggtgctgccggagtcgaggacgataatttcatccgcccagctaacggagcccagacaatccggcagcaggtcggcggcgtttttagcgatcatcaccacggaaagccggttcgacattaatgactccgctgcggcaggtaaggttgcagtaactgtagcagacgcgacagcgcgccctggttctgatgcagcacttccaccgcgtgacggccataccacagacggtaatcttcatcggtcaggagcgtggacacctccctgaccagcgaatcggcatcggtaacggtgatcaggccatcgtcctgctgcagcttggcgcagatatctttgaagttgaaggtatgcgggcccatcagcaccggaatggcgtgcgccgccggctctagcgggttatggccgccgcgctccaccaggctgccgccgacgaaggcgaggtcggcaatgccgtagagcagcatcagctcgcccatggtatcgccaatgac

SEQ ID NO: 5376 - DNA, 3530 bp, Unknown
  gut microbiota DNA sequence
gttccgtctgaacctgatggggaaaaaacccatgacgctggtcgggaccgcattgaaaacgaacgctatggcatcgcaccgtcgctagccttcggccttgataccccaactcgtctgtatctgaactatctgcacgtccggcagaacaacaccccggatggcgggatccctaccgtcggcctgccgggctattcggcgccttcgccgaagtatgccgcactcaactccaccgggaaggtcgataccagcaatttctatggcaccgactccgattacgataaatctactaccgacagcggtaccctgcgcttcgaacacgatctgacggagaataccaccgtgcgcaataccacccgctggtcgcgagtgaaacaggagtatcttttgaccgcggtgatgggcggcgcgaacaatatcaccgcccccgatatcaatgacgtcaacacctggagctggtcgcgtctggttaataccaaagatgtcagcaaccgcattctgaccaaccagaccaatatcacctcgaccttcgatactggctcgataggccatgacgtcagcgccggcgtggagtttacccgggaaaaccagaccaactatggcgttaacgccaggaccgcgccggcggtgaatctctaccatccggtgagcaacctgtcgattggcgggctggacagaaacggggcgaacgccaacggccagaccgataccttcgggatttatgcctttgatacgctgacgctgaccgagcggattgagatcaacggcgggctgcgtctcgacaattaccataccaaatatgacagcgccaccgcctgcggcggcagcggacgcggggctatcgcctgcccgcccggacagtcgaccggcagcccggtcaccactgtcgataccgctaaatccggcaatctggttaactggaaagccggggcgctgtaccgcttaaccgagcagggcaatgtctacgtcaactacgccatctcacagcagccgccgggaggcagcagcttcgccctggccgccagcggcagcggcaacagcgctaaccgaaccgactttaagccgcagaaggcaaaatccagcgagctgggcaccaagtggcaaatcttcgacaaccgtctgctgctcagcgcggcattattccgcaccgatattgaaaacgaagtggccgccaacgatgacggaacctggtcgcagtacggcaaaaagcgcgtggaggggtatgaactctccgcgaccggaaacctgaccccggactggacgattatcgccggctacactcagcagcatgcgacagtgacggagggacagaacgttgcacaggatggatcttccgccctggcctacaccccgaaacatgcctttacgctgtggacgcagtatcaggccaccagcgatctgtccgtcggcggcggtgtgcgctatgtcggaagcctgcgccggggcagcgatggtgcggtcggtaccccggatcacaccgagggctactgggttgccgacgccaaactgggctatcgggtcaacagaaacctcgatctgcagctcaatatgtataacctgtttgataccgattacgtggcctccatcaacaagagcggctatcgctatcatccgggcgaaccccggacctttatgctgacggcgaacgtccatttctgagtctgcgcgtggggccgttgcgccccaccttttagagagaacaccgcgatgatgtatcacattcctgacgtgctatcgacagaccaggtggcggaatttacccggcagctggcgcaggccgagtgggtcgacgggcgggttacggtgggtagccagggggcggccgtcaaacagaaccagcagatcgatacccgaacgccgctgtatgcccgcctgcaggccgctgtgctcgatatgctgcgcggccatccgcagtttttttccgccgcgctgccgcggacgatttccgcgccgttgtttaaccgctatgggccaggggagacctatggttttcacgtcgatggcgccgttcgccagaacggcgaggcgggctggatgcgcactgatctgtcagcgacgctgttcctttgcgatccggagagctatgagggtggcgaactggtgattgaagacacctatggccaacatcgggtgaagctcccggccgggcatctggtgctctatcccgccagcagcctgcactgcgtcaccccggtcacccgcggcgtccgccaggcctctttcctgtggatccagtcgatggtccgcgacgataagcagcgtgcgatgctttacgacctggaccgcaccatccagtctctgaaggcccgctttggcgacggagaagaggtcctctccctgctcaacatgtatcacaacctgctgcgccagtggacggaagtgtgatccgctgttgatgacagaggcttgcggcagacaggtgtgacgagacaatgaactggccatccgttggccagtttacagaagaatttagaaccgatagcctgcggagaacataaacacccacggatccagacgggtgctgactttctggtccacgccgccggctttgaatttcacatcggtatcgatatccatgtaccacaccgacatattcagcagccagtcgcggttaatcagataatcgaggccgacctgccccgccgcgccccaggagtccttcaggctcagatcggaaagcccggccgccttgccggtatcgttaaagtcttcattaaagaaggtggtgtagttgataccggcccccacgtacgggcgcaccttgctttgcgcatcgccaaagtaccactgcgccatcagggtgggcggcagctgatggacggtggcgatagtcccggttggcccggtgccgaccttatggcggaacggcgtcgcggcaagcaactccacgccaatgttatcggtcgccatataggtaaaggttaaacccagctgggtattgttactgacgttgaaactgccaaggctgcctaacacattgtcagagccctccgtcggtcggacggtggcggtcccggcacgaatgaaaaactcccccgcctcatgcgcccagacgctgccggtagaaagcgtgccaagaatcaatgccgccgctgctaacttcttcatatccacttcctcattatggtttttcagcgcggccaaatatacctataacgagttacgtttgatctgttttagatcacactaagtcctcagatttaacatttattgatccagattaatttttgctaccgatcgcaatgccttgaattgttcgcacatcaattttcacttttcgcgcaaaaatttatttctgcccctcttgccgtcgctgaggcggctggataagttaactgccgacaatctgtgttgatgcgtttttttcaggtgtaattatgagtgaaatcaacccgtgcatgacgtgcggtgcctgttgtgcgtattttcgagtctctttctactgggcggaagccgacgatgcgggcggcctggtgccctccgcgctgaccgaaccgctgacccctttcctgcgctgcatgagcggcaccaac

SEQ ID NO: 5377 - DNA, 12233 bp, Unknown
  gut microbiota DNA sequence
aaacgggtttcaacccctttgaccaccgggatacgccgcgagcgcacgccacccaaattggctttggccagctgacacgcgcccagcagctgatggggataggttatctgtacgttgaggagcaattgcagacgctggtttagtcataaacgaacgtggcggagcgcaaatttgtgtattacgtttaaatcacacgtctctcataacgagctgattatgaacacactccgctattttgattttggcgcttcccgctctctgttgctgcttatcgcccgcatcgccgtggtgattctgtttattctttttggctaccccaaactgctgggctttgacggtacggtgcagtacatggccgcctccggcgcgccgatgccgaccctggcggcgattatcgccgtcattatggaagtgcctgccgcgattctgattgtgctcggctttttcacccgcccgctggcggtcatctttattttctacaccctgggcacggcggtgattggccatcactactgggatatgactggcgatgcggtattgccgaacatgattaacttctggaaaaacgtcagtatcgccggcgctttcctgctgctggcggtaaccggccccggggcgatctccctcgaccgccgctaatctccagacgcaaaaaaggccgcatacgcggcctttttgatgtcaacgctaacgcttacgcatataccgggaagcgggcgcagatatccagcactttacctttcacgcgctcaatgaccgcgtcgtcattgatattgtccagcacgtcacacatccagccagccagctctttgacttccgcttctttaaagccgcggcgagtcactgccggagaaccgatacggataccggaggttacgaacgggctcttcggatcgttcggcacgctgtttttgttgacggtgatgttggcgcggcccagagcggcgtcagcttctttaccggtcaggtttttatccaccagatccagcaggaacaggtggttctcagtaccgccagacaccactttgtagccgcggttcaggaacacttccaccatcgctttagcgtttttcgcaacctgctgctggtaaactttaaactctggctccatcgcttctttcagcgccaccgctttcgccgcgataacgtgcatcagcgggccgccctgcgcgcttgggaacacggcagagttcagttttttgtacagctcttcgctaccgcctttcgccagaatcaggccgccgcgcggacccgccagggttttgtgagtggtggtggtcacaacgtgagcatgcggaaccgggttcgggtacacgccagcggcaatcaggcctgccacgtgcgccatatcgacgaacaggtaagcgccgatgctgtcagcgatttcacgcattttcgcccagtcaacgataccggagtaagcggagaaaccaccgatgatcatcttcggtttgtgttcctgagcctgcttcgccatgtcgtcatagtcaattttaccggactcatcaataccgtaagggatgatgttgtacagtttgccggagaagttaaccggggagccgtgagtcaggtggccgccctgcgccaggttcataccgagcacggtgtcgcccggctgcagcagcgcggtgtagacggcaaagttagcctgggagccggagtgcggctggacgttagcatagtcagcgccgaacagttctttcgcgcggtcgattgccagctgttcaaccacgtcgacgtattcacagccgccgtagtaacgcttgcccggatacccttcagcatatttgttggtcagctgagagccctgcgcctgcataacgcgcggactggtgtagttttcggaggcgatcagttcgatgtgctcttcctgacgtactttttcctgctccatagcctgccacagttcggcatcataatcggcaatgttcatttcacgctttaacatccgcatctcctgactcagctaacaataaaatttcggcctaaaaaggcggtccgattggacaacggcccacagtataaccgaatcattctgtgataacaggtcttgacaaaggattttacgcaaacgattggctccgcatgacacaaggctttgagcaataacgcctctctcagtatcaacggatttcttttcaggtttgtgatgcaaattcttcatgttgtaactggatcgggggaatgtgttaaagaaccatttacaacgcagggttatttctttaagatgcatttaaaatgcatcattaagataacacataaggaagcacgctatgcttgacgctcaaaccatcgccacggtaaaagccaccattcccctgctggtagagaccggcccgaaattaaccgcccatttctacgatcgtatgttcgcgcataatccggagctcaaagagatcttcaacatgagcaaccagcgcaacggcgatcagcgtgaagcgttattcaacgctattgccgcctacgccagcaatatcgataacctgcctgccctgctgccggcggtggaaaagatcgcccagaaacacaccagcttccagatcaaaccggagcagtacaatattgttggcagccatctgctggcgaccctcgatgaaatgttcagtccgggccaggaagtgctcgatgcctggggtaaagcctacggcgtgctggcgaacgtctttatcggccgtgaagccgagatctatcagcaaaacgccagtaaaaccggcggctgggaagggacccgcgcgttccgcatcgtgaagaaaaccccgcgcagccagcttatcaccagctttgagctcgaaccggttgatggccagccggtcgccgattaccagcctggccagtacctggccatctggctgaaaccggaaggcttcgaatatcaggaaatccgccagtactccctgacccgcaaagcggacggcaaaggctaccgcattgcggttaaacgcgaggaaggcggtcaggtttccagctggctgcataaccatgccagcgaaggcgatgtggtctatctggccgccccggcgggagatttcttccttaacgttaagccgcagacgccggtcactctgctctctggcggcgtcgggcaaacgccgatgctggcgatgctggatgcgctggcgaagagcggtcatcagggtcaggtgaactggttccatgcggcggaaaatggcgacgttcacgcctttgccgatgaagtgaaggcgctcggcgcggcgctgccggcgtttacctctcacgtctggtatcgcaccccgactgaggccgaccgtcaggctggacgttttgatagcgaaggtttgatggatttagcagcagtggcggacaatattcgcgacccgcagatgcagtattatctctgcggcccggtagcgtttatgcagtttgcagcgaagcagctggtcgaattagggatcaacaaagacaacattcattacgaatgcttcggcccgcataaggtgctgtaagccccgacgcgcggggatttgtaggccgggtaagcgcagcgccacccggcaatactgcagcgagcggcgagcgttaaatcgccgcgtcgtcttcttcgccggtacgaatacgaatgacccgcgccacgtcgaagacaaagattttaccgtcgccgattttaccggtctgtgcggtacggatgatggtatccacacaggtatcgacgatatcgtcggtcactacaatttcaatttttactttcggcagaaaatcgaccatatactcggcaccacggtacagttcggtgtgccctttctggcggccaaagcctttcacttccgttaccgtcatcccggtgatgccgacttcggccagcgcttcacgcacgtcatccagtttgaaaggtttaataatcgcatcaatctttttcatggggttcctgtcttaatcgcgtaaccggttgcttaccgtatcataacttgcgctatagtgcggagctactctttaaagtcgttggcgtcgagctcatggcgcgacagcagcttatagaattcggtgcggttgcgccctgccatccgcgcggcgtgagtgacgttgcccttggtaatttgcagcagcttgcgcaggtagttcagctcaaactgattgcgcgcctccacgaaggtcggcagcgccgtgttctcgccctccagcgcttgctcaaccagcgcgtcgccgatcactggcgacgaagtcagggccacgcactgctcgatcacgttcaccagctggcgcacgttgcccggccacttggcggccatcagccgcttcatcgcatcgctggaaaacgcccgcacgaacggcttatggcgatcggcggactgacgcagcagatggttggccaacagcggaatatcttccgtgcgttcggagagcggcggtattttcaggttcactacgttgaggcggtagaacaggtcttcacgaaactcgccgcgggccatcgccttcggcaggtcgcggtgggtggcggagataatccgcacgttgatttcgatatcgcggttgctgcccagcgggcgcaccttgcgctcctgcaggacgcgcagcagcttcacctgcaacgcaaccggcatatcaccgatctcgtcgagaaacagcgtaccaccctcagcggcctggaataatccttcacggttactgaccgcgccggtaaaagcgccccgcgcatggccaaacagttcggattcgagcagctgttccggcagcgcgccgcagttgatcgccacgaacggcttatcatgacgcgggctggcgttgtggatcgcctgggcgacgatctccttcccggtcccgctctggccattaatcagtacgctgacatccgattgcgccaccattccggcctgctcaagcaggcgcagcatcagcgggctgcgggttacaatcgcctggcgccaggcttcgtcggtggccggcgagcgctgctccaacgcctcatcaatggctttatataaggcatctttatcgaccggcttggtcaggaagctgaacaccccctgctgggtagccgccacggcgtcgggaatcgaaccgtgagcggtgagaatgatcaccggcatgccggggtggcccttctggatctcgctaaacagctgcaggccgtccatttcatccatccgcagatcgctaatcaccagatccactttctcacgccccagcacgcgcagcgcttccggcccgctctcggcggtgaccacgctgtagccttcgctgaccaggcgcatgcccagtagcttcaacagtcccggatcgtcatccaccagcagtaaacgcgccggtttacggatcgtcatggatcacctccggcactttttcgctgccgaaattgccgcccggcttgcggctggagagctggcgttcgatatccgtcaggttctccagcttgcgggtggtcagctccagctgctcgcgcagcgccagctcctgctgacgcagtgtctccagttcgctatcgctggactgctgaagcttagcgtaacgggcacgctcttccaccagctgcagctgacgggtctggccgtcgcgccagagctgatacagcgggcggacctgaacggcgatttgcgggctgaaggtatcgagacgcgccaccaggtcgcggcgctcctcaggggtaattttagcatcagcaagcaggatgccgcgacggaacgcgtcctgccagctgtcgtcggtatggcgtttcgcctccgcccgcgcctgcgccggcgcgaggcgatcggcacagtcaatgccccgcagccagtagaggggatttttgtcgctggcatcgctgctgtgcgcccagatatccgcgcagtctaccgcgacaaaatcggccacctgatgctgcgcctgcccgggggcggcggtaccttccgcggtatgcggtgaaaagccggcggaacaccccgccagcgtcagacaagcaatgcctgaaagcagccatccgctgagggaacggcgccaggccaggaattgggacatagttccccgatatcgattcataagttggattattccggcgctgagggaagcgtaatgcgaaaacagacctgcccggcgggcgcatcaactaagctgagctccccttgcatctgccggacgcagtcgcgggcgatactcaaccccagtccactgcccttaacggcccctttacgctggtgactcccctggtaaaaaggctcgaatatcatgtttttttccgcggccgggatcggttcgccgctgttggcgacatcaatacgcacctgctctccgtgccggtagctatggatacggatgttaccggattcagcgccatagtgcaccgcattggagtagagattatccattacgcttatcaatagcgcaggctctgccaggcaacgccgcgcctgcagcgtcagttcggtatgcatcagtttagcccgcgcgggcaggctgtgcgccgccacgacgttttccaccaggtccaccaggtccaccgcttcgcgagccaccgggccgtcggcctgttttcggttatagtccagcagctgttcaatcagcttttgcaggttacggctactgctgtcgaggatctcgacgatctcctgctgctcaggggtcaggggccccgcgacgcggtcggccaacagctcggtaccttcacgcatactggccaacggggttttcagctcatgcgacagatggcgaagaaattgatgccgctgcgactccagccacgccaggcgctcgctgagccagatgatgcgcttgcccaccgatcgcagctcgcgcgggccggtaaacaatgcggcgtcgtccagcgacttccctgcccccagctgattgatcattctttcgatgcctttcaccgggccgataatcatgcgggtgaagagtagcaccagcgccaggctcagcagaaacagcaccagcgcctgccagccaaaaaactggccgcgttcggctatctcctgctgcagctgttggccacgagaatagacgaccgcccgggtcgcctgcaccatatcgctgttattactggcgaaaacttccagtctggcggctgcctgggcatcgggtccgctatttttacactgcagctgcgccagatcgctgacatcctgacgcagcgcctgccagagcttctcatccggcagcacgccggcgtgggcgtccagcatctggctgtagcgctgccgctggttttgatagacgcgcgccagcgtcggatcgtccagcacgcagtactggcgatagctgcgctccatctccagtgcggcattgatcatcgcctcgctgcgtcgggcgtcgaccagggtggtacggttaatatgcgccgcctgggcgctaagggcgttcaggctctgccaggcctgccaggccagcaccagcaatggcagcaggatcagcacaaaagagagcgtcaccagctgacgcagcgaacgggggaaaagagagagtcgcttcaaggatgtagtctcaatcattagctctggtcgatgctaactgaggagcgcgccggagaaaagcgctaccgctggttactgcgccgcagaaacaacaaagccaggcgcaaggcctggctttgttcaggaatgaggcggtgccttactcgacgtttcgcccgatgtctgataaagccaggctgttatcaggagttggacggcaggcacctgtttgtgcgtcattcgaagtttatgtagcgcgtcccgaaggggctgacataagaaggtgaatgagccactggttaatattatgcatgaactatgccagctctcaaaacattttattaacatactgatatatatgacattaaccgcaagaacagtcgaactacctctgtttatttttcacccgcgttgtcgctatttagcgacaccaaataggctaccgattactcatcatttaaatcaataacttaagtgtcgcctattgacgacactgcaatatcgcagttgtcggcaattcccgacaccctggcgtgccgaccatcacagataaaaaaaagccccctgtcaggcagggggctgatacgttcgcgtgaagcgcggcgggaagattaacccagctgtttacgcgcgttacggaagatacgcatccacgggctatcctcgccccagttctccgggtgccaggagttgcttacggtgcggaagacgcgttccgggtgcggcatcatgatggtcgcgcgcccgctttcgctggtcaccgcggtgataccgttcggggaaccgttcgggttcgccggataggtttcggtcactttgccgaagttatccacgaagcgcagcgccaccagacctttgctctcaagctgagccagatgcgcgctgtcgcgcacttccacctgaccttcgccgtgggagaccgcaatcggcatccgtgagccaaccatgccttccagcagcagggatgggctttgcgtcacttccaccaggctaaagcgcgcttcaaagcggtcagactggttgcgcacaaagcgcggccacaggtcgctgcccgggatcagctcgcgcaggttggacatcatctgacagccgttgcacacgccgagcgccagcgtctgcggacgatggaagaaggtcgcgaactcatcgcgcacgcgctcgttgaacagaatcgacttcgcccagccctcgcccgcgcccaacacgtcgccgtaggagaagccgccgcaggctaccagggcatggaaatcgcccagaccggtccggccggccagcaggtcgctcatatgcacgtcgatggcgtcaaagccggcacgatggaaggcggccgccatttcaacgtgggagttcaccccctgctcgcgcaggacggccactttcggccgcgcgccggtggcaatgtacggggcggcgacgtcgtcgttaatatcaaacgagagcttcacattgaggcccgggtcggcatcattggctttcgcctcatgctcctgatcggcgcaggccgggttgtcgcgcagacgctgcatctgccaggtggtttccgcccaccacatgcgcagcgtggtgcggctttcgctgaacaccgtctgaccgccggcggtcagcacgaagcgatcgccctcaaccgctttaccgaggtaatgcacgcagtccgccaggccgttaaccgccagaatggcttccaccgcctcacggtctgcggcgcggacctgaatcaccgcccccagctcttcgttgaacagcgcggccagatggtcgtcgcccagcgcggcgatatccgcttccacgccgcagtggccggtaaaggccatttccgccagcgtgaccagcagaccgccgtcggagcggtcgtggtaggccagcagtttacgctgcgccaccagggcctgcatcgcattccagaagcctttcagttgcgcgacatcgcgcacgtcagccggcttgtcgccgagctggcgatagacctgcgccagcgccgtcgcgcccagcgcgttgtgccctttaccgaggtcgatcagcagcagggcgttatcttccgtcgaaagctgcggcgtgacggtatgacggacatcttcgacacgggcgaaggcagagatgaccagcgacagcggggaggtcatctcgcgctgctcgctgccttcctgccagcgggttttcatcgacatcgagtctttaccgaccggaatggtcaggcccagcgccgggcacagctcttcgcccaccgctttcaccgcctcatacaggccagcgtcttcacccgggtggccggcggcggccatccagttagccgacagcttcacgcggttcagctcgccaatctgcgtggcggcgatgttggtcagcgcttcaccgaccgccagacggccagaggccgcgaagtccagcagggcgaccggggcgcgctcgcccatcgccatcgcttcgccatagtagctgtcgaggctggcggtggtcaccgcgcagttggccaccgggatctgccacgggccaaccatctggtcgcgggcgaccataccggtcacggtgcggtcgccgatggtgacgaggaaggttttctcggccaccgtcggcagatgcagaacgcggttaaccgcatcggcaagggtaatcggttggcgatccagcgcgctaccctgagctttcagagtctgcacgtcgcgggtcattttcggcgttttgccgagcaggacgtccagcggcaggtcgatcggctgatcgttaaagtggctgtcgctcaggctcagatgctgctcagcggtggcttcgccgataacggcataaggcgcgcgctcgcggcggcacagttcgtcgaacagcggcagctgctccggggcgaccgccagaacataacgctcctgcgattcgttacaccagatctccagcggactcatccctggctcatcgctgagaatatcgcgcagctggaatttaccgccgcggccgccgtcgctcaccagctccggcatggcgttggagagaccgccggcgccaacgtcgtggataaagaggatcgggttggcgtcgcccaactgccagcagcggtcgatcacttcctgacagcggcgctccatttccgggttgtcacgctgtacggaggcgaaatcgagatcggcatcggactggccggaggccatagaagacgccgcgccgccgccgaggccgatgttcatcgccgggccgcccagcacgatcagcttcgcgccgacggtaatctcgcccttctgcacgtgctcaccgcggatgttgccgataccgccggccagcatgatcggtttgtggtagccacgcagctcttcgccattgtggctggtgactttctcttcataggtgcggaagtagccgttcagcgccggacgaccaaattcgttgttaaacgccgcgccgcccagcgggccttcggtcatgatgtccagggcggtgacaatgcgatccggtttaccgaaatcttcttcccacggctgttcgaagcccgggatacgcaggttggaaaccgagaagcccaccaggcccgctttcggcttcgcgccgcggccggtggcgccttcatcgcggatttcgccgccggagccggttgccgcgcccggccatggagagatggccgtcgggtggttatgggtttccaccttcatcagaatgtgcgccggctcctgatggaagtcgtagcgcccggtctgatggtcggcgaaatagcgcccgacttcagacccttccatcaccgcggcattatctttataggccgacagcacgtagtccggcgttttttcaaaggtgtttttgatcattttgaacagcgacttcggctgctgttcgccgtcgatgatccagtcggcgttgaaaatcttgtggcgacagtgctctgagttcgcctgggcgaacatatacagctcgatatcgttcgggttgcgtcccaggcgggtaaacgcgtcctgcaggtagtcaatttcgtcgtcggccagcgccagacccagacggaggttggcgtcaatcagcgcctgacgcccttcgcccagcaggtcgacgctggtgaccggcgtcggctgatggtgagcgaacagcttctcgcccgcttccagctcgtcgaagacgctctccatcatgcggtcgtgcagctccgccgccaccgcggcccactgcgcttcggtcagggttgaggcttcaacgtaatacgccacgccgcgctcaagacgcacaacctgcgccagaccgcagttgtgagcgatatcggtagctttagaagaccagggagagatggtgccagggcgaggggtcacgagcagtaatttaccggtcggggtatggctgctcaagctcgggccatactgaagcagtcgcgccaggcgctcgcgatcgtcagcgctcagcggggcattcagatcggcaaaatgaatatattcggcatatatggcgcttaccggaaggttggccgcctgaaatcgtgccagcagtttattaatacggaatgccgacagtgcaggtgaaccacgcaaaatttccatcataagtctctcgtcttcgaagctttcagggtgagccagggggggaaacgggcgtcattatagtgaatcctgcgccccgacgaaaccgtttgcgtagaaataaaatcattgatgctgtttatcaataaatgtgacgaccatcgcgaataagttgccaactggcgcattattaagcagaatgccgcacattcgacgacaaccttgcgttttttccggacatcgcctgctgaggaacctgaagctgcagaagattaactctctgaaaaaattaaagattaattatctgctgatcggcattgtcacccttttgctggcggcggccctgtggccgtcgatcccctggtctggtaaaccc

SEQ ID NO: 5378 - DNA, 8322 bp, Unknown
  gut microbiota DNA sequence
aaatagcgcagcagacggaactgtcttttgatacggctcggctgcaaaagcaggcgatagaaccactccagccccagatcctgccagaacttcggcgcccgatggacgtgcccggtaaaaacatcgtaagtgccgccgacgcccatatacagcgcgtgcggatacaggcgccggcagtcgcgcataaagatctcctggcgcggcgaccccatcgcgacggtgacgattttcgccccgctgtcgcgaatgcgttcgaacaatgcctggcgttgctcaggggtgaaataaccgtcctggctgccgacgatgttcacctgccagcgctgacgcagcctggattctgtctgcgccaggacctcaggtttaccaccaaccaaaaacaccggtgtcccttcagcgccggcgcgctgcattaacgcttcccagagatcggccccggcgacgcgggatacctgggcctgcgggtattttttgcgcagcgaacgcaccacgctgatgccatcggcatatttaaactccgccgcctcaatcagcgcccgtacctccgggttatcctctacggccagcattttctcagcattaatggccaccagcgtcccctcgcggagaacgccatcggcaaacaaataatccagagcgtgcggcatatcgcgccagcctataagctgcagccctcttaacaggtacaacggcgcggaaatggtcccagtcatgtccatccttctcagacttgcggttgcgaaagcggttttacgcgcttatgaatcagtcccacgctatccaggaaccagtacagcagtttcgccgccagcaagcagataccaaagatcacgaggaaaaacaccacgcgggagccgaacgaatccagcccctcgcgcgccagcactatcatgttgaagatagcgccgaaacagaaactgtgcaggatagccgctttatagcgattgctctcccggttgcccagctcatacagccagtcgaaccatttaataatcaaccctaccgccacggcgcccagcggtacgaaccagacgccgcccatcaccaccagcgagccaatcagcgtcggcgagatcgccagccccgaatggttgtttaatacttcccaggtaaagtagttggcggtattgagcaccatcgtcgggcgaccgtgccacatccagctggggataaagacgtagaagtcgcggatcatcggcgccagaccctggaaatcgatcttgtcgtagttctgcagcagcagcgccaggttctcccacggtgagaaggtgtcgcgcgtgagatacagaaaggtataaaacgcttcgtcgccgctgacgttcatcccgtagcgcttcagcgccagccagaacatgccgacaatacccagcacacccgccgccgccagcatccacaggctgatccagccgcgaataataccgatgaacagaaagatggcgaaggcgatgatgatattggcgcgggtcccgccgacgatggcgtaggtcagcaaaccaaaggccaccgtgctgacgaggaagaagatccacgccttataatcctggcgcagaaaatagaccaccagcatcgccggaataaagaagtaaaagaagcgcttcaacgccacgccggacacttcagcagagaaaatctggctgtaagagttgagcttaaacagcaggaaaccgttgtgggcgaagaagatgccgacgcacagcagcgccagccccatcaaaatgccccacgccagatgggtttccacccggttcatggtaaacagcgggcgatgcgcaacctcacgcgatgccgaacgcagccgcgttttataggtcacgtagtagactgcgtagaagcacaccgcgatcagcagcgtctgcagcaaaatctccggcggcgccacgctgacgtcaaagcggaacaccagaatactggtcagcgggaagccgaagaaaaaggtcagcagaaacagcaacgagaaaaaaacgttgaagttaaagcgtacccgacggaactcaaaccaggtggcggtggcgatgaacagcgtcgacagcagccagaccaccagcagcccgctaaattgcattaacgtcatgcctgcccctccgccgctaaccgtagcgcccgccgccagcccgtcagatagttcggccggaagaaggcgatagcggatttatccacgctcgccagctgacgctgcgcttcgcgcaccacgctgacgtccagcgcgtcgctggtgaacagcaccggcacatgctgctcggccatatcctgccagaacgggttttcccgattgagcacgcaggggatgcccgcctgaatcagcagacacagggtgccgatcccctgctggcgggcaaacagaaaatagcccagatcgcagcggcgcagcagcgccagataatcatgaaactccagcttctcgctgaggatctgcagatgctcaccgctaaacagcgccgcccccgcctcgcgaacctcattgatataggcgtcgtttttcgctggatagcccatcggcacgatgacgtttaccgtatcgccaaactgctgatggattgccttcagcgcggcaatatgttcattgctgcgatccccggagttgcccaccagaatagtcagggtatcaccgcgcggagcgttatcggccagggtattcagcgccggatccatacgggtcgggaagtagagcagctcgcccgggacgcgcggatggcggttagcgaaccagctcagatcgccgcgggtggcgaaaacgcgccctacccgcccctgcgccatacggcgcagcggatagaacaggcgaaacttcaggctggcagaattttcatacagatccgccccccagatatgccagttaaactgcgacgggcggatgccgccgctcaacagcgccagccacagcccggtattgaactggccgtggaagaaaaagcgctgctggcggttggctttggcttgcgcaatcactgcctgcgccagcgcctttttccccggataacaggtgacatccagcgccggatacccatcacgcacgctggcctcatcaccgacgatcataaatctcctggcctgcgggtcggcggccagttcgtcgttaaagaaccgcagtacggtctggttatgatgcgggatatccgatcccagtacatgtatcagtgctgtcatgcccgtttacgccagagtaaaaacacgccactacaaagggcgaaataaacaatataagtggccatatatgcctgcgccgcgccaaccgcgccgtgcgccggtataagccagtgtgagaatgcggtcagcagtgcgaactggctgatttccgtcagaatataaaaacgcagcgacgctttggcgatcaccagatagccatagacgtaggcgcctacttttaaaacgtcgcccaccagctgccaggcgaacaggtcacgcatcgcggtaaagcgatcggaaaacagcagccagatggcaaaatcgcgcagcagccagaccgtcaggctcgccgccgctactgccggcaggacgaatttcagcgacttgactatctcgcgggtgatatccgttttggcgctcagccgcgacagcgtcggcaggagatagacgctgaacgaggcggtaataaactgcaggtaggcatcggagatgctgctcaccccctgccagatcccgaccgcctcccagccgtaatgcgccgccagcagattacgcatcatcacataggctaccggcagggtcaccgaggttatcagcgccatcagggtaaatttcgatagctgtcccgccagaccgttatcccagcgcggacgcagggcgctcagcgggatattaccccgccgccagagcataatacccgccgggaccaccaccagagctggaactaacgccagccccagcagcgcaccctgatagcctcccaacacgtagcaagcatagtaagccgccacgccgatcaggctcccggcaatcagcgagaaggcgttacccgccgcatcgcgaaagcctttcatcagcgccagcaggaaattcgcccaggcgatccccatctgcaccagcgccaccaggcgtaccagcccctgatagtgcgtatggccgaacagcccctggcttatcggcgccgccgccagtaaaaataccagcgccagcagggtggaaaagccaagcaccatcgccgacgaggtacccaccacctgcttcaggcgcgggggatcgtcgtgatgctgcgccaccagcttcgtgacgccattaaatatcccggccccggccagcacgccgaatacggtgaccagttgccggaagttaccggcctggccaacgcccgccggcccaaacgagacggccagcagcttgacgaccagcagaccggcgccgattttgaccagcgtcgatgccgccgtccacagtgaggcttttgctaacgacatatcaggagaagtagctcagcagcgagttaatcaccgtccgctgattcaccacagacagattgtaaaacagcggcaggcgtaccagacgctcgctctcctgagtggtgtagcggtcttcaccgcggaattcgccgaactgttcgcctgccgggcagctgtgcaggggaatgtaatggaataccgcgaggatctccgcctctttcagccaggcgatcagtctgctgcgatcctcgatatcacgcagcttaatgtagaacatgtgcgcgttttgcccgcagtcggccggaaccgtcggcagttcgatacgcccggcgcgcgccagcggcagcagcgcatcatagtagttctgccacagggccaggcgctgctggttgatgcgctccgccgcttccagctgcgcccacagataggcggcctgcaggtcggacatcagatagctggagccaatgtcccgccaggtatatttatccaccaggccgcgaaagaactggctgcggttggtacctttttcgcgaataatctccgcgcgttccaccagcgtgcgatcgttgatcagcgtcgccccgccctcaccgccggcggtgtagtttttggtttcatggaagctgaagcagccgatatggccgatggtgcccagcgcgcgccccttgtaggtggacatcaccccctgcgcggcgtcttccaccacaaacaggttgtatttgtcggcgatggccatgatggtgtccatctcgcaggctacgccggcataatgcaccgggacaatcgcccgggttttatcggtgatggcggcttcgatgagcgtttcgtcgatattcatcgtatcgcaacggatatcaacgaagacgattttcgccccgcgcagcacaaaggcgttggcggtggagacaaaggtatagctgggcataatcacttcgtcgcccggctggatatccagcagcagcgcggccatctccagcgaagccgtgcaggaaggggtcagtagcgcttttgccgtgccaaatcgctgctccatccactgctggcagcggcgcgtaaagccgccgtcgccgcacagcttgccgctgttcatcgcagactgcatgtaatcaagctcggttccaaccaccggcggcgcgttaaatgggatcatgggggtcacctgtatagccagtaggcggtgctttccacgttagcaccgctaagaatataacgtttaagcgcggcggtgttgcccatctgggtcgccacccgcagtgtagaaagtccgcgcgaggcggcccagtaccgcgccgcctgcatcaactgcgccccggcgccgcgtccggccagcaggccgatacgcgcttcggtcgcagtgatctgccgcagggagacaaaggcgcgaatatcgccctcaggatggcggtaaatcaggcactgatgatcgaaggtgccgcgcaccgcattttcaatccactgggcatagaagcggccgctagcgtcggcagcgtaccagggcgcgcgaaagcggctcatggcaaatgcctgcgccgcctgctcgcgcagcggcgcaatatccgcttccacggcgacgtctgcgccggcatctgcagggctgcccaccggcagcgccagatcgacctcaccttccaccagctgaaaacccagccgctgcagcgcgtccagccggacggtgtcgctggcggcgatcttcgcctgcactcgcgaccaccccgccagcgcctcaggcgtcagccgcggcgcgtgctcgtcaaagcgtacgatcgcgctgttcacggcaaagaagcggttctcccactccagggggtcaatactggcgcggacgggcacggagcagatccagcagatattggccgtagccggttttttccagccgcttcgccgcacgtttgacgccgtcgtcgtccagccagccgttacgccagccgatctcttccagacaggcgattttaaagccctggcgcttctcgacggtctgcacgaacatgctggcctcgatcaggctatcgtgggtgccggtgtccagccaggcaaagccgcgtccaagcagttcgacagtcaatgcgccatcctccagatacatctggttgatggaggtgatttccagctcgccgcgctcggatggtttgacccgtttggcatactccgtcaccttgccatcgtagaaatagagaccggtgaccgcccagttcgacttcggctgcttcggcttctcttccagcgatagcgcacggaagttatcatcaaactccaccacgccaaagcgctcaggatccatcacctgatagccaaaaatcgtcgccccttccgtgcgggcagcgacgctgcgcagcttcgggctaaagctttggccgaagaagatattgtcgcctaacaccagacacgccggttcgccgttaagaaaggcttcgccgatgataaacgcctgggctaaaccatccggcgtcggctgtacggcatagtgcagcgcaatgccaaactctgagccatcgccgagcaggcgctggaaatcacgtaggtcgtccggcgtggtgataatcaggatctcacggatcccggccagcattaataccgacagcgggtagtagatcatcggcttatcgtagatcggcaacagctgcttcgatacgccgcgggtgatgggatgtagccgcgttccggaaccgcccgccagaataatacctttcatcattccccccagagatgattagctttgcagcccaagacgctcgccctgatagcttccgtcctgaacctgacgccaccaggcctcgttcgccagataccacgccacggtcttacgcataccggaggtgaaagtctctgccggcgtccagcccagctcgcgggcaatcttcgaggcatcaatggcatagcgcagatcgtggcccggacgatcggcaacgaaggcgatcagatcgcgatagtgcgccacgccttgcggcttatccggcgccagctcttccagcagctgacaaatggtttccaccacctcgatatttttacgttcgttatgaccgccgatattgtaagtttcgcccggttcgccgcgagtcgccaccagatacagcgctctggcgtgatcttccacgtacagccagtcgcggatctgttgtccattgccatacaccggcagcggcttgcccgccagcgcgttaaggatcgtcagcgggatcagcttctcgggaaagtgatacgggccgtagttatttgagcagttggtgataagcgtcggcaggccataggttcgcagccaggcgcgcaccaggtggtcgctgctggctttcgaagccgaataggggctgcttggcgcatagggcgtggtctcggtaaagaaatcatcgctgccgtgcagatcgccatacacttcatcggtggagatgtgatggaagcgaaacgccgatttttgcgccgtagccagggtattccaccagctacgggccgcctccagcagcgtataggtgcccacgatattggtctcgataaacgccgccgggccgtcaatcgaacgatcgacatggctttccgccgccaggtgcatcaccgtatccggttgatgctgacgaaaaatgcgatccagctcggcgcggtcgcagatatccacctgttcaaaggcgaaacgcgcatcctgcgccaccggcgccagcgacattaaattgccggcgtaggtcagtttatccaccaccaccacgcgatcggcggtgtgctggataatctcccgcactaccgccgaaccaatgaagcccgcgccgccggtgaccagaatggttctcaccgccacactcctttggtgtcaacgataaacgcctgggtgacgctatcgccgctaacggctttaaattcattgtgatcgaccagcatcaccagcacatcggcgctggccagcgccgcctcaagggtcgccagcgtacacagtccatcgagtttcttcggcagcgcgtgaatgttg

SEQ ID NO: 5379 - DNA, 1711 bp, Unknown
  gut microbiota DNA sequence
ggatgcaggcggactcatcaagaataaacagcgcgcaggggcgaccgtccataaactcccaggcgtcttccagcgccgcctggccgatggtcagcagcgcggttttacgccgacagatggagtcgaaggtcaggccctgggcctggtgcggcgtttgccaggtttcgcgctgcataaacttgctgcagcggtgccatgactgggcaatgacggaagagaccgccttcccggtatcctgagtctgaacagtcatatccttttccgcgttgtaccatagagaacccctccggcagcgactgccggaggggagaaagaaaaaccgctgacctgggccagcggtttagccaccgcgaattaacgcgccagccactgctggcctaacagatcggcggtgaggatagcggcatggacgctctccggggtcaccgcaaacggcatattatggatggtttccccttccgcgcaggtagctttcgccaccgcggcgattttctcgtcgatcccctctttgacgcccatctgcgcgagcgtcaccggcaggccgacgcgctggcagaagcccagcaccgtttcaatctcgtccatcgggctgttctgcagcaccagctgcgccagggtaccgaaggccactttctcaccgtgatacaggtgatggcactcttcaagaatggtgaaaccgttgtggattgcatgggcagcggccaggccactgctttcaaagccaatgccgctgaggtaagtgttcgcctcgatgatgcgctccagcgcttcggtcactaccccggcctgcgccgccagacgggccttttcgccctccgccagcagcgtatcatagcacaggcgggcgaggctcagcgccgcctcggtggactgtcctccggccatgctggtggcgcgcgcatcgtagcaagctttggcctcgaaccaggtggagagcgcatcgcccatgccggagaccagcaggcgtaccggcgctttggcgataatcgccgtgtccatcaccaccatatccgggtttttcggatagatcagatactcttcaaactcgcccgcttcggtgtagatcaccgacagcgcgctggtcggcgcatcggtcgaggcgatggtcgggatcaccaccaccggcagcttctggtagtaaccgatcgccttcgcggtatcgagggttttaccaccgccgatcccgaccacgccgcggcagccctgtttttgcaaaatcgccatcagacggttgatttccgcatggctgcattcaccgttaaaccgttccgcatggcagcgaatatcgtggctctgcaggccattcaccactttctctcccgccagcttcattacgaaatcgtcggcgatgacgaagaagctctccgccaggtttttggcatattgaccgaacagaacagcagcatcaggaccctgaagatatttggctggagattgaataacttttagcattcctttcaccctcaaataagtgcgcatgtagacatgatgagccctggcgttatccgcgccggccagtgaagcgcggcctgaacggagcgtaccggagcagtgcgatcactgtagggccggcagggaacaaaaaaatctttcgcctttttgttctgatatgaaacacaggttaattttttacgttccatattggaacaaaaaaccctagtctctgtcaggattgcgatcccgatccgctcctttgccgcataatgccctt

SEQ ID NO: 5380 - DNA, 5579 bp, Unknown
  gut microbiota DNA sequence
tgaggccgaacggaatggccatatccggcgaggcggcggtggtttccgggttagtaatcacgtcgacctttttgttggccgcggcgtcgatttttgcctggcggtcggccagcgctttatcaacggctttggcgacgatggcgtcgatctgttcctgcgtaaattcttgcgccatgacagaaattgggcacagcgcggcgaccaccgccatggctaaaggcagtttttttacagtattcatggttatctcgctttaataattaatatatttcagataataaccatcccattctggctagaataaatagccaaaataagctgatttgttttttagggtacagcgacgccggagaataatattctcgctaacgttattccatattaattaacgctggtacagatggattaattcttctgagaactcgcgggcaagcagcgaattcatcaaatgatcctgggcatgtaccataatcagcgtcatgggctgacgcgcttcaccggcatcctgcccgatgagctgggtttgcatctgatgcgcccggcgggcgtagccgtcggcctcgtttaagagtaagcgcgcttcgtcgatatttccggttcgggccgcatgcagcgcttcaaaacataatgagcgtgactgtcccgcattaacgataatttccattaccgcatcttctaattcaatcatgtgtattcctgaggtatttattatttaataatgcagtgaaagtccattttctgcattattacgctgtcatcttattatctctccggaaggagagggattagctaacggtttctgctaccggaacgctatttttggctttctcaacttcggttttcattaaggaacgttcataagcgcgcaggaacggcaggtaaatgaccgccgacatcaccatgcagatgagacacatcaccaccgggctcagggtccagttagccgcccacgacgcgccaattggggccggcgtagtccacggcgtcagcgacacaacctggctcagccagccaagacgcgtcgcgccgtaagccagcaccgcgttgaccatcggtacgcagacgaaggggataaacatcatcgggttcatgatgatcggcgccccgaacagaatcggctcgttgatattaaagaagctcggcacgatgcccatcttgccgatggtgcgcagatgggtggcccggctacgcagcagcaggaaggccagcggcagggtagaaccgacgccgccaatcagcagatagtgatcccagaagccctgcaggtagacgtgcggcagtaccgtgccagccgccagcgccgcctggtttgccgacaggttggccatccagaacgggttcataatgccggtaacaatcagcgagccgtggataccggcgaaccagaaaatctggcacatcagaacagagagcaaaatcgccggcagcgagtcggaggcggaaaccagcggctccagcagatgcatgatcgcttgcggcaggatcatcccggtctgcgcttcgataaacagattcagcggatgcagagtcgcaataaccaccagcaccgggatcaggatttcaaacgaacgggcgacgccggtggggacctctttcggcagacgaatcgtaatgttgttttgcttcagccacgcgtaaacgcgggtggagtagatggcggtgatcagcgcggtgaaaatgccctgaccggacagatactgagtggaaattttgccatcggcatagggtgcggcgaccagcaggaaagccataaacgccagcagaccggacatcaccggatcgagctgaaactgacgaccgaggctggcgccaatgccgaccgagataaagaaggtcatcacgcccatgctgaggttaaacggcagcatcagctgttcgcggtagtgctgggagaaatcaagccagccgcgggcaaagccgttggtggtatcgggtgaaaacggcggaaagataaataccagcatgaaagagccgatgatcataaacggcaaggcggcagtgaagccatcgcggatagcgataacgtatttctgctgcccaaggcgtcctgccagcggagtaatagattgctcgatcacggcaatcatggactgatacagagaactcatttcaacacctctcagtgcgccgctgggatcagcgacagagcataattcaggacgttgtctccccgctgcataccgtagtccatcgtatcgatgggctgaacgggaatgttcagggaagccgctttgtcagacagggttttcaacatgtatttcacctgggggccaagcaacaccacctgatactgcggaaactgcatgtcaaattcggaaacgccataggcgtcaatctgcaccggcaggtcacgttcattcgccgcctcaaccatctttctgaccagcagactggtggacatcccggcagagcagcacagcataatcttgtacatcgacgaccatcctcaaaatgtaaaaagttattgcgtgggtgatttgatatcagacggaaaccggtttccatttataaaaagcagaactgtgatagtggtcaagatctcctgcttatagggcggatttattggatttcgctcacattattctgtcgatttggcgatgttttgcgctgaaatggaaaatcggtttccaaacaaatggcgaaatggatatactgcgctggtcataattgaagcgattcaggtttacaggattttggcgggacgcggcgcccgcgcaggggaaaatgatgtcgacaatcaatgatgtttcacgacttgccggggtttccaaagccacggtgtcgcgagtgttgagcggctcacgtggcgtgaaggaagccagtcgtcaggcggtgctgcaggcggcggaagcgctcaattaccggccaaacatgatagcccagtcgttactcagccagtccaccggctgcatcggcgtcatctgcgcccaggacaacatcaatcaaaccaccagctatctctacgccctggaaaaacagctcagccagcaccagaaacacctgctgctgcgcttcgccaacaccagcaacggcgtgatgaactctctggaggagttgacctgcgggctgtgcgataacgtgctgatcatcggcgcgcgttttcctctgaatattaaccgcccggacgtggtgctggtggactgcctcgatagcgaaggcgacaacagtattcagttcgatcatgctttcgccgccgaaaccgcctgtcactatctgattagccaggggagacggcagattgcgctgattcatccgcagagcagcggctttgccgaccaggtgctgctgggctacaagcacgcgctggaaaaaaactttttgccgtttaatcgcaacctggtgtttctggataacacctcgccgtcggtggcggtgcaggagctggtcaataacgccacgacgctgaactttaacgcgctgctggtgagcgatgaacagcaggcgcagcgcgtggtgccgcagctgcaggcgtttaaccgcgccgttccgcaaaatgtcatggtgtttagcctcgccggatcgttacagctgcccggtatcccgactatcccggcgattgaatattccatggacgcgatggcgtcgcggatcgtcaactggctgaccgagaaaacggacaacccgggcggcagcccgctgcgcggcgatttaattattccgaagcactaaacgctgctcttgccctgacccgccgccgttggctgcgggttttttgctggctggtttttgtcgtatccctcacattataaataaaactcatatctgacgccggattttcgaaccggacagcctgcgtgacctgccttaagttgagtacgaaagttccactcaaaaaacactaaccagaacattcgtaccgcctgcttgaggaagtcaccctatgaatcacacgaacgttgtcgatgtgaaagcgtggatagatacccgcccggtctcgcgctttcaatggaacgtgctgctgctctgtttcatcatcattatgctggatgggtatgacgccgcggtgatgggctttgtcgccccggcgctcatcgaagactggggcatcagccgggccgaaatggggccgattcttggggcggccatgttcggcgtcgccattggcgccctggtagcgggtccgctttctgaccgctacggccgaaagcgaattttactctggtcggtggcgctgtttgcgctgttcagcctggccggcgccgtggcgcaaagcccgacgcagctggcgctgatgcgttttctcaccggccttggccttggcgccgtaatgcccaactgcgtcacgctggtggcggaatatatgccggagcggcgtaaaggggtgatgatcaccctgatgtacagcggttttaacgtgggttccggcctcggcggctttatcgccgccggtttgttatcgcattacagctggcactcggcgctggtttttggcggcgtgctgccgctcgtggtgctcccctttatgatcgtgatgttgccggagtcggcgatgaacatggtggcgcgccgactaccgggcgagcagattgccagggcgcttaaccggcttgggggccagtttacggctgaaaccgttttccagctgaatgcgccgcccatcacgcggagcagcaaagtggcgcagctgttccggcatggctatgcccgcggcacgatagcgctgtggttaacctattttatggggctgttcgtgatttacctgctgaacggctggctgccaaccattctccgctccggcgggctgtcgctgcagcaggcggcgatgatgaccggcttgttccagctcggcggcccgctgggcgggatccttgtcggtatgctgatggatcgcgcttcggcgaaagccgtgattgcggcaacctatttcctcggctgtctgtgcctgttgtcccagggggggatggatttcggttcggcggcgctgtcggtgctgatttttatcagcgggatgtgcattaacggcgcgcagaacggtctgcaggcctattcgccagcctattatcaaaccgagatccgcgctaccggagtcagctggatgcatggtatcggccgtaccggggctatcctcagctccacgctgggcgggatgctgatgctggcagtgccaggacactcgtcgatctttttggtgcttgcgctgccggcctgcctggcggggatctgtattttgttgcaccgtatgaatcacgctaagcctcgactcacagaggcagaacttgacgctttgtcatcccccctcgaacaccgataagtggagttatctgatggctaacattctcggcggtatcgccgtctctcataccccgactatcggcttcgcggtcgatcatcataaacagcaggacccggcgtgggcgccgatcttccagagcttcgaaccgctgcagcgctggctggaggagaaaaaaccggatgcgctggtgtacatctttaatgaccatgtgaccgcctttttcttcgatcactattcgacttttacgctgggaatcgacagtcaatatgacgttgccgatgagggcggcggaccgcgctgcctgccgccggtccagggcaacgcagcgctctcaaggcacattggc

SEQ ID NO: 5381 - DNA, 2028 bp, Unknown
  gut microbiota DNA sequence
tgacgccagacgttattgccgaacgccaccaccgcaccgagtttggcgtcagggaatttagcctggaaggtggccacgttatcgacaaaaattttgctcgcttcgcgcagggcgttaacgtcccctttgagattggcttcaatccaaatcgccgcgcggcaatgttccggcaaaatgccgctctgaacctgagacatcgctcctcctgaaatgatgcaaccacaacgctgtcgcgttgctaacgcgccattgtaaccgtttttcagagctgtcgtgtctcttcagatcaatttagcgacgccagataatcttgctgaccttccagtttttcagcgtatcgtcggagggcatcagctcgtccggaccgctccagtggccagtgaaggcatagctgatatgctggctcccctcggcctgacactcgacgaccgccccgttgtcatggctgcctttctggcagttgccgaaggctttgctgtacaggtcgctaaacggtgtgccgattttcacgccgctggcggttttgatatccgcatcacgcacgtcaatccggctgatagcaccgttgtcgccattgatggtcagcgccacgctgttgtttttcagcgcttcaaagtagtggacgatattgcccttatcggtcttcattccgctgcgtaaacggtagtcgctgcccagcgcatcgctaatcgcctgttcattgagcggcgtggaagccgtcagtttacccactccctgctcggtcacctcggtggaagcgccaaaccagttccacggataggccgccgaccagttgactgcgctcatcgtggagcagccggtcagcgccagcggaagcgcacagagcattacacgtagcgatttcatatctcaatcctttctgagtcattcaacgcatgttggagttcacgatcggcaaaaagtgccattaaaaggtggtctggtgaaaacaggcgcccaggcgacggctggttaacagccaccacagggcatagccatccgcgaccagcagcgcaatggtcaacgaggagggagattcgccgctcagccatagcatcggctgccacagcaacagcagcacttgcgatagcaccagcagccagcgcatcgcccgccacaggcgcggcaggcgctgacgatagccgctaagcagaaaggccagcaccgccggcacgcctggcagtaaaccaagccagaagcgctcgtgatcgggatagaacagattaagaatcgcgtcgccctgctggcgcgatgcgccggccatcaaaaacagcacccacgtgcgggcctgcaacaacagcacgcaccagaaaagcaaaggcaggcgcagacggccatgggcatcaaaatcggcggggataaactcagtattcttcatcttcgatcaggcgcttgcccagggtcaggacatcggcgtactcatagcccaaccgctcgtacattccctgcaccacgtcgttgtcttcacggaccataatgttgattttcgggcagccgcgggcaatcagctttttctccagacggttgagcagcgcgttcgcgataccccggccgcgatattccggatggacgccgagataataggccgatccgcgatgaccgtcatatccgcccatcaccgtgccgaccacttcgccattcacttccgccaccagaaacaggctgacgtcgtgattcagcttgcgctcaatatccatctccggatcgttccacgggcgcagcagatcgcagcgctcccacagcgtcacaacctcttcgaaatcctgctggcgaaaaacgcgaatctccatggtattccccaccattgacggttaaaaacagtgattatggcgcgaatataactgatagccaatatcaggcgaaatcagcgacaaaaaatggcataatatgactttgtcatgtattgaaatgaaaagtaaaacaattcttattttgaatggtcgtaacggcaaacgcgatacgatataacattggacatcacttgtttacaattcaggccgaatgagcacttttaaacctttaaaaata

SEQ ID NO: 5382 - DNA, 4714 bp, Unknown
  gut microbiota DNA sequence
aataaaaagccggaacagcggttccggctcttctgttagggcgagattacttgttgacgaagtcttcgccgagcgcgatatctttcttcagggtgtccagcatgccctccagcgcctgctgttcaaaggcgctgagtttgccgatagactgtcgctcttccacgccgtttttccccagcagcagcggctgggagaagaaacgcgcatagtggccgtcgccttccacgtaggcgcactccaccacgcctttttccccctgcatggcgcgaaccagagagagaccaaaacgggcagccgcctggcccatcgacaaggtcgccgacccgccgcccgctttcgcttccacgacttcagtaccggcgttctgaatacgtttagtcaggtcggcaatttcctgatcgctaaagctgacgccggggatctgcgacagtaaaggcagaatggtgaccccggagtgaccaccaatgaccgggacttccacctcggttgccgatttacctttcagctccgccacaaaggtattggaacggatgatgtccagcgtggtaacgccgaacagtttgtttttatcgtacacgccggcttttttcagtacttcggcggcgatagccacggtggtattcaccgggttggtgataatgccgatgcaggcctgcgggcaggttttggcaatctgctgcacgaggttcttcacgatacccgcattcacattaaacaggtcggaacgatccatgccgggcttacgcgccacgcccgcggagatcagcactacatccgcgccttccagcgccggagtagcgtcttcaccggaaaatcctttaatttttacatctgtggggatatgacttagatctaccgccacgcccggcgtaaccggagcgatgtcgtacaacgagagctctgaacctgaaggcagttgggtcttaagtagtagggcaagcgcctggccgataccaccggcagcgccaaggactgcaactttcatcctaaactccttattatggttaatttagtctttcgttattccgtcgcctggaccttaattcacaagatgaacaattacaatgattatggctgaagaatgcattattgtgcgtagcaatagaacagcggcgcactttatgcttcctgactgaccatccagcaaagcgaagtaccggatcgactattggttacaatacacccagccagttgcgcaaaacaacaccaactcaataacatttcatttacttttacatggctttaagcgttgtgatgagaacatgttccttatacggtttttttgctaaaatatgcccccttcataacattattgacctatcctttcgcggattatttgcataaaaattcatggttatgcataatgatgttgattttaccaccataatctgggtgacttatgcgaagttcggcaaaacaagaagaactggttaaagcgtttaaagcgctgcttaaagaagagaaattcagctcgcagggagagatcgtccaggcgctgcaggaagagggcttcgagaatatcaaccaatcgaaggtttcccgcatgctcaccaaatttggcgcggtgcgtacccgtaacgccaaaatggaaatggtctattgcttgcctgccgagcttggggtaccgaccacctccagcccgctgaagaatttggtgctggatatcgactataacgatgccgtagtggtgattcataccagccccggcgccgcgcagctgatcgcccgtcttctcgactcgctgggcaaagcggaaggcattcttggcagtatcgccggggatgacaccatctttaccacgcctgcgcgcggttttacggtgaaagatctgcacgacgccattctggttctgtttgagcaggaactctgagtgattcccctctggctaccgtcagagggcgactcccttttcttttgcctctccccccttccggcacaacaactatttaacacttagtgtcatttacgccgtctatacgttcttttactaacgcgaaaatcgtaaaacgcacaaaagatcaaattcgtatacctttatgaatttattagaaataaatcttatcgctgtcgctaacgtgtcatttttaattcttatccgttataaaaagcgcaatctattgtaactattaacgcacaaaacaattagcatggtattaatatttttggtgattagtgtatacttggttttgtgatgagggtcacgaaacaaagacccccaacaaaaagattcgacgaggtgaacatcatgaaaatcaaaaccactgtagctgctctcagcatcctgtccgtcgtgtcgtttggcgctttcgccgctgatattatcaacagcgagcaggcccagggccgcgaggccatcggcacggtttccgtcggcgcggtagcatcttccccgatggatatgcatgaaatgctgaacaaaaaagcgcaggaagaaggggcttcttcttaccgcattattgaagcccgcactggcgaccactggcatgccactgctgagctgtataaataagttttagacgtcaacgattaacctgacaaaaattctctaccgcggcccggcgacatacatcgccccgccgcggcaaaacaaagactggagtaaagattatgaaacgcgcaatgatcatcgcatcccttggcctggcttcccttctctctttcggtgccagcgcggctgtccagcaagtgaacgcagagcaagcccaaaatctgcaatccatgggcaccatctccgtatcccaggtaggtagtgcgccaatggacatgcgtcaggaactggcggctaaagccgagaaagaaggcgccagcagctaccgtattattgaagcacgtaccggcgatagctggcacgccaccgctgagctgtacaaataaaccctcgtcgtcttatttcgacgacttgcccccgcctgccgggggcttttttatgcttgtcgggcattaaaacgcaactccccctccagctcttcctctgcttcatcaaacaataaaatcaatgcgccaaagcgccggcgctgcttgtcatttaaatggatgaactcaatatccagcggcagcggtagcaggccaccggtcactgcgtcccatagcgaatccaggttgttgaccttatcctgagccagctcgaaggttcgggaaaactcccggtagaaatcctgttgttcggcgatttcgtcaaaatcaaacgtataggtggtcatgacagcccctcccgcttctctttctgtcgccgttaagtatagcgataaaaaaaccgacgcctgggcgtcggtttatgggttagctgctggtcagcacatgctggtacttatgcagcatctcaaccagtcgccgtaccggctcggtaacctgcggcgaggcctcccagacccgcagcttctcctgatagacatcaagctccgccagcagctgggtaaaatagcgccgacgcttatcatcgctgccggcggagatcacatggtccgcggtacgtcgcagctgacgatggaaggcggagagatcgtcattcaccggcacgggcgcatcgcgcaagcgctgatgggcgatgattaacgtcaacgccagacggaaacgggcgacgtcacccgggaatttattgagtaataaaaacagctgctgatagagcgcgggcagatgattctctttgcgacgcgccgagttggtggtcagcgaagagaccgccgcggagacaaactggttcagcagcacccgaccggttctggcccgggagttatccctgacaataagaataaccatcagagcgaggaaacagccgacgatctgccccagcgcgctatcgaggaactggctgaactggaactgcatcgggttatccagcaccagaatgttgatggtgctcgccagcgcccccagcgatccgagacgccttttttgcacttcgatcccgataaagaacgccatcgccgccaggctgatgcaaagcaacagcatgctctgctgcgtcgccggcatgatcaccaggaagtacaaggtgcccaacggtaacgccgccagggtgccatagaggaagtctatcgccaccatacgcgggtttggcaggcgcatcgccagcgcggtaaccacggcgatcattaccatcgcgccgctgcctgaggtccagcccgtccacagccagaatagcgttccgagaatacaagagacggaggtgcgccagaagttcaccatcgcgtgatgacgttcggcggactccactttaaccaccgtttcgccgcgcaacacgccatcctcgatacggctgattttagtattccccaccacgccgcgcttaagcagcagataacgcgtggcggcgcccacccagctataaatcgtgaccggggtattatgctcgcctttccaggtcaggaagcggcgcatgcgcttcagctgctggtgaacatcctgcaccgtctcaaccggctcggcgaacagctcgcgatagtcgtccgtgaccatttccgggcgtgagttctgaatcagataggtttcgcaagcctgggtgataagggttagcgaaagggtgttgatcgccttcaggcgctgattcgcctttgcccagcgtgaggattccataatcaggttactacgcataccttccagcgccgtagtgcggcgtaccagcgctccccaggcttgatccacttcctctttttcaccgtgcgcgacgcataactgcatcagcttatactgggcaattagcagattatcgagctcg

SEQ ID NO: 5383 - DNA, 4437 bp, Unknown
  gut microbiota DNA sequence
acaaaaaaacaaaagtgaacgaaatgacaaaagatttttgcagaattgataataatggcgggatatggggaggaagcggcgctcctccctcagcgaaacattagtgcagtatggcggtcaggctgaaagcgacaatcacgccgagagcaataatcgtggtgatcagcgaaaactttaaattggtatccatcatttttccctcttgttatccccacaccaaaagtgagcttgctcatttttgcacaaaaaatcgcaaaaatcttccgggatttagggcgatgcacatttttgctcttccactttgccccaagatcggacaaaatcccacgctaatttaaaagcgtatcggccattgaccccttcctgtcgttctgtgtcgttttcccgacgtgatgcaatgttgaaaattgtattcagggtgtgtgtaggcaaacgtttacgtatcgatgatcaggcgatcaggtcaaggcatggagtgagatgtaatggcaactattaaagatgtagcgaaacgcgcaaacgtttccactacaactgtgtcacatgtaattaacaaaacccgtttcgttgccgaagagacgcgtaatgcggtatgggcggcgatcaaagagctgcactactcgccgagcgccgtggcgcgcagcctgaaagtcaatcacaccaaatcgattggcctgctggcgaccagtagcgaagccgcctatttcgctgaaattattgagtccgttgaaaagagctgcttccagaagggctatactctgatcctcggtaacgcgtggaacgatctggaaaaacagcgcgcctatctgtcgatgatggcgcaaaagcgcgtagacggtctgctggtgatgtgttccgagtatccggattcggtattgagcatgctggaagagtaccgccatatcccgatggtggtgatggactggggcgaggcgaaagccgacttcaccgatgcggtgatcgataacgccttccagggcggctatatcgccggacgctacctgattgaacgcggccatcgcgaaatcggcgtgatcccgggcccgctggagcgcaacaccggcgcggggcgactggccggcttcatgcaggcgatgaaagaggcgcatatcagcgtgccggaaaactggattgtgcagggcgacttcgagccggagtccggctaccgcgcaatgcagcagatcctaaaccagcagcaccgcccgacggcggtcttctgcggcggcgatatcatggcgatgggcgctatctgcgcggcggatgaaatgggactgcgggtgccgcaggacatttcgctgatcggttatgataatgtgcgcaacgcccgctatttcagcccggcgttaaccaccattcatcagccgaaagattccctgggcgaggccgcatttaacatgctgttggatcgtatcgtcaacaagcgtgaagagtcgcagtctatcgaagtgcaccctcgtctggttgagcgccgctcggtagcggatggcccgtttgtcgattatcgtcgttaaggcatctggcgggcgcggatctctccggcgcccgcagccactcccgattcagcgtgtcgctgtcccccagatagtcaagcatccagttcagcgccggtgaggcatcgttctgctgccacgtcaggcagcaggcggcatccgggaacggattttccagcgccagcgcagtccactcgccgcgatctatccatggacgggcgaaatggctcggcaccatgccgacgcagagtcctgccgacaaacaggttgctgatgattcccagtcagggacgactaccctcttctggttatccagcaaccatgttgtccgtttaggcaacgagcgcgaggtatcctcccgcaccagcgacggccagttacgcaggacgtcgtcgctcaggggtccctccatctttgccagcggatgatcgctcgccaccacgcagtcccagctcagcatccccatatcgcggaacgcatagcgaccgccgaccggaatagatcgcgttgcgccaatcgccagctcaacgcggccgtcggccagcgcatcccatacaccattgaatacttcctgaaagacgatcagttcgacgtcgggaaaatggcgatagaaatcgacgatcatctgacgcatccgcgccggtttcacaatatcatccactgcgatcgacaactgtccgcgccagccgttcgcaatttgctgacactgctggcgggtgatctgcatttttttgataacagagcgcccttcctgtaaaaaccagaccccggcgggggtcaactccacatcacgatggcgacgctcaaataagggaacggcgagccactcttcgagctgacgcacggtatagctgaccgcggaaggcacccggtgaagctcctgcgcggccgcgctgaagctgccgttacgggcgacggcatcaaccacttccagagagtattcagaccacattttctgcctgcaaaatttttgaatgcatgtgacaaatattagcgtttcacaagccacaatgcactccctacactctgcggcatcgtacctgtacaccaactatgagaacgttatgtcacaacccggtaaaggatttttagtctggctggccggcctgagcgtgctgggctttctggccaccgatatgtacctgccggcgtttgccgccatgcagcaggatctcaacacctccgccgcctccattagcgccagcctgagcctgttcctcgccggcttcgcgctgggccagctgttctggggaccgctgtcggaccgctatggacgtaaaccggtgctgctgagcggcctggcgattttcgcggccggctgtctggggatgctgtgggtgcacaacgccaccctgatgctggcgctgcgctttctgcaggcgattggcgtctgtgccgcggccgttacctggcaggcgatggtcgccgattactatcctgcccagcgcacgaaccgcatcttcgccaccattatgccgctggtaggactgtcgccggcgctggccccgctgctgggcagctggctgctggtgcacttcgagtggcaagccatcttcgccaccctgttcgccatcactctgctgctgatgctgcctgccctgcgcctgaaggcagccgcgaagtcagtagtagtgacgcagcaaaagatcacctttctcgcgctgctgcgctcccgagaatacagcggcaacgtcctgatctacgccgcctgttccgccagcttcttcgcctggcttaccggttcaccttttatcctgcacgaaatgggctatggcccaaccgctatcggcctgagctatattccgcagaccatcgcctttctggtgggaggctatggctgtcgcgcgctgctgcagaaatggtccggtcaacagatgctgccgtggctgctggtgatttttgccgtcagcgtagccgccacctggctggtgggcctgcaaacccatgcctcgctggtggcgttaatgatcccgttctgcatgatggcggtggtcaacggcgggatctaccccatcgtggttgctcaggcgctgaagccttttccgcaggcgaccggccgcgcggcggcgctgcaaaataccctgcagcttggcctgtgcttcctgaccagtctgctggtatccgcgctgatcgccacgccgctgctgaccaccaccagcgtaatgctggtttcgattggcttagccggaataggctatcgcctgcagcagacgccggagctgacaccccactcttcccacgcgtaatgcccgtcgccagggcccggaccagtcgttagcatgctaagaaatttttattgaaagccagtacttagcgtcctatactggatccgggttcacataaatagaaaatagttacagattaacggatgcaggatgcctccgtttcaccatggaaggcctttcggcaagggttatctcccttcctctgtttacgtcggatagcgacttcacggattatccgtgagatttctcacaaagccaaaaaagcgtctacgctgttttaaggttctgatcacttgggcgtgatggagaagctatgagttcatcgtgtatagaagaagtaagtgtaccaaatgatgactggtaccggattgcagctgaattattaggccgtgcgggaattgaaatcaatggctccgcgccgtccgacctgcgggttaaaaatcctctcttttttaaacgggttttgcaggaaggttcgctgggtttaggcgaaagctatatggacggctggtgggaatgcgagcgtctggatatattcttccacaaggtgttacgcgccgggttggaaaagcagctcccacaccatttcaaagacacactccgcatcgcaggcgctcgtctgtttaatctacaaagtaaaaaacgtgcctggattgtcggtaaagagcactacgacctcggcaacgatctattcagccggatgcttgatccctatatgcaat

SEQ ID NO: 5384 - DNA, 5828 bp, Unknown
  gut microbiota DNA sequence
caaataatctgaatgatattttattaccgcaatttcaacaggcctttaccctgactaacttccaggccggattaattcaatcggccttttactttggctattttattattcccatccccgccgggatgttgatgaaaaaattcagctacaaagccggcatccttacggggctgtttttatatgcctgcggcgccgcgctgttctggcctgccgccgaagtgatgaactacactttattcctgattggattatttattatcgctgccgggcttggctgtctggaaaccgcggccaacccgtttgtcaccgtcctcggtccggaaagcggcggtcacttccgccttaatctggcccagacctttaactcattcggcgccattattgccgtggtatttggccagagtcttattttgtctaacgtcccgcatcagccgcaggaggtgctggataaaatgacgccggaacagctcagcgcctggaagcacagtctggtcctgtcggtacaaaccccctatatgattatcgtggccattgtcctgctggtcgccctgctgatcgtctgcacccgcttcccctccctgcaaagcgatgaccacagcgacagcgcgcagagcacttttttcgcctcgctgacgcgcctgatgcgcatccgccactggcgctgggcggtactggcccagttctgctacgtcggcgcgcaaaccgcctgctggagctacctgattcgctacgctatcgaagagatcccgggcatgacggccggtttcgccgccaactacctgaccgccaccatggtctgcttctttatcggccgttttaccggcacctggcttatccgccgcttcgcgccgcacaacgtgctcgctatctatgcgtttatcgccatgctgctctgtttgctctccgccttcagcggcggccacgtcggtttgctggccctgaccctgtgcagcgcctttatgtccattcagtacccgaccatcttctcgctggggattaagcatctgggccaggacaccaaatatggctcgtcatttatcgtcatgaccattatcggcggcgggatcgttaccccggtgatgggctttgtcagcgacgccgccggcaatatcccgaccgccgaactggtcccggcgctgtgcttcgccatcatctttatttttgcccgtttccgttcacaagcggcgacgaactaaacctgttatccgcataacctgagggatctgtaatgaaaaaaatcagcttaccgaagatcggtattcgtccggtaatcgatggtcgtcgcatgggggtccgcgagtcactggaagcgcaaaccatgaacatggcgaaagccaccgccgcgcttatcagcgagaaactgcgccacgcctgcggcgcccgggtggagtgcgtgattgccgatacctgcatcgccggcatggccgagtcggccgcctgtgaagagaaattcagcagccagaacgtcggcgtcaccatcaccgtcaccccctgctggtgctacggcagcgaaaccatcgacatggatccgctgcgcccgaaggccatctggggctttaacggcaccgagcgtccgggggcggtctatctggccgcggcgctggcggcccatagccagaaagggatcccggcgttctccatctacggacatgacgtgcaggatgccgatgacacgtcgatcccagcggatgtcgaagaaaagctgttgcgcttcgctcgcgccggcctggctgtcgccagtatgaaagggaaaagctatctgtcgctgggcggcgtctcaatgggcatcgccggatctatcgtcgaccacaacttttttgagtcctggctcggcatgaaggtgcaggctgtcgacatgacggagctgcgccggcgaatcgatcaaaaaatctatgatgaaaccgagctggagatggcgctggcgtgggcggataaacacttccgctacggcgaagatcagaacgctgagcagtataagcgcaatgaaacgcagagccgcgcggtgctgaaagagagcctgctgatggcgatgtgcatccgcgacatgatgcagggcaacccgaagctcgcagaaaaagggctggtggaggagtcgctgggctacaacgccatcgccgccggtttccagggtcagcgccactggaccgatcaataccccaatggcgataccgccgaagcgctgctcaacagctcttttgactggaacggggtgcgcgaaccgtttgtcgtcgctaccgaaaacgacagcctcaacggcgtggccatgctgatgggccatcagctcaccggcaccgcccaggtgtttgccgacgtacgcacctactggtcgccggatgccgttgaacgggtcaccgggcagccgctcaccgggcgggcggagcacggcatcattcacctgattaactccggctctgcggcgctggacggctcctgccagcagcgcgacgcgcagggcaatccgacgatgaaaccccactgggagattgagcagagcgaggcggatgcctgcctcgcggcgaccgaatggtgcccggcgatccacgaatacttccgcggcggcggcttctcttcccgcttcctgaccgaaggcggcgtgccgttcaccatgacccgggtgaacatcataaaaggtctggggccggtgctgcaaattgccgaaggctggagcgtagcgctgcccaaagcgatgcacgaccagctcgacgcccgcaccaactccacctggcccaccacctggtttgccccacgcctgaccggcaagggcccgttcagcgatgtgtactcggtgatggccaactggggcgccaaccacggcgtgctgaccatcggccacgttggcgcagatttcattaccctcgccgccatgctgcgcattccggtctgcatgcacaacgtggaagaggcgaaaatctatcgcccttccgcctgggccgcgcacggcatggatatcgagggccaggactaccgcgcctgccagaactacgggccgctgtataagcgttaacaggttggtttcgcccggaggcgcaggcttacctggcctaaagacgcgcgcggtctgtaggccggataagcgctgcgccatccggcaatgttgtttcgggagtcactatgaagcaagacgttatcctggtcctcgactgcggcgccacgaacgtgcgggcgatggccgtggatcgacaagggaacattatcgcccgcgccgcaacggcgaacgccagcgacatcgcggcggaaaaaagcgactggcaccagtggtcgctggaggccattatgcagcgctttgccgactgctgtcggcagatccatgaccagctggcctcctgcacggtgcgcggcatcaccgtcacgacctttggcgtcgatggcgcgttggtggatgagcagggcgccctgctgtatccgatcatcagctggaaatgcccgcgcaccgcggcggtgatggagaaaatcagccagtatatgcccgcgcgccagctgcagcggatagccggcgtcggcgcgtttgcgttcaacaccctgtataagctggtgtggctgaaagagaaccacccgcagctgctggcgcaggcccatgcctggctgtttatttcatcgctgatcaaccatcggctgaccggggagttcaccaccgacctcaccatggcgggcaccagccagatgctcgatctccggcagcgcgatttcagcgcgccgatcctgcaggcgaccggcctgccgcgccgcctgttcccgcggctggttgaagcaggccagccgatcggcgccctgctgccggaggccgctgcgctgctgggcctccccgtcgggatcccggttatctcggccgggcatgacacccagttcgctctgtttggcgccggcgccgggcaggatgagccggtgctctcctccgggacctgggagatcctgatggtgcgcagcgcgcaggtcgacacctcgctgctctgtgactacagcggctccacctgcgagctggacagccagccgggccgctataacccggggatgcagtggctggcctccggcgtgctcgagtgggtgcgcaaactgctgtggagcgctgacaccccatggcagacgctgattgacgaagcgcaggcgatcccgcccggcgcccagggcgtcaggatgcagtgcgacctgctcgccagccagcacgccggctggcagggcgtcacgctcaacaccacccgcggccatttttaccgcgccgcgctggaggggttaagcgatcagctggcgcagcatctgcaaaccctggaaaaaatcggcggcttcagggcgaaagagctgctgctggtgggcggcggcagccgcaacgcgctatggaaccagatcaaggccaaccgactcgggataccgatcaaagtcctcgacgatgccgaaaccaccgtggccggcgcggcgatgtttggctggtatggcgtgggcgagttctcttcgccagaacaggccagagcgcaggtcgcgtaccgctaccgctatttctggccgcaaactgaacctgaactgatagaggaagcctgagatgctcaaaaccatttccccgctgatatcgccggaactgctgaaagtgctggccgaaatgggccatggggatgaaatcattttttccgatgcccatttcccggcgcacagcatggggccgcaggtgatccgcgccgatggcctgcgagtcagcgatctgctgcaggcgattatcccgctgttcgaattagacagctatgcgccgccggtggtgatgatggccgccgtcgaaggcgatgcgctcgacccgacggtggaacagcgctatcggcaggcgctatcggcgcaggccccctgcccggatatcgtgcggattgaccgctttgccttctacgaccgggcgcaaaaagcctttgcgatcgttatcacaggagagtgcgctaagtacggaaatatccttttaaaaaaaggagtcacgccgtaatctcatgccggagcgtctgcctgatgcagacgctcaatcaatgatgggatgagaataaatgaaagcagcccgccagcaggcgatcgtcgatctcctgatcacccacagcatcctgaccaccgaaacgttgtcaaaacagctcaacgtcagcagggaaactattcgccgcgatctgagcgagctgcaggcgcagggcaaagtgctgcgtaaccacggccgggccaaagtgatccaccagcgcagccaggacagcggcgatcctttccacatgcgcctgaaaagccattacgcgcataaagccgacatcgcccgcgaagcgctggcctggattgacgaagggatggtgatcgccctcgatgccagctccacctgctggtatctcgcccgccagctgccggaccgcccgctgcacgtctttaccaacagccagcccatctgccaggagctggccaaacgcgaccagatcacgctcacctgctccggcggcactctgcagcggaaatatggctgctacgtgaacccggcgctgatttcccagctgaaatcgctggagatcgatctgtttattttttcctgcgaaggcatcgacccgcagggcgcgctgtgggactccaatgcgttcaatgccgacttcaaatcgatcctgcttaagcgggcggcgcagtcgctgctgctgatcgacaaaagcaagttcaaccgctccggcgaggcgaggattggtcatctggatgacgtgacgcatattgtgtcggatgcgccgcagccttaaggggaaggccggaggacgcgcacgcgtctccggcctgagggggaaggattaacgctcgtcgcgacgtccgccgacggcggcccacaggcggcgcacgtgaacggt

SEQ ID NO: 5385 - DNA, 1184 bp, Unknown
  gut microbiota DNA sequence
attagcagattatcgagctcgaggtcgatctcttttttaatcgaacgcggcgaaaacaggagatcggcgacgatggcgctgacaataccgatgacaatttcgctgcagcgttcgacagcaaactgcggcgccagcatcggattggtatggatggtaataatgataatcagcgcggtgtacccggccagcccccaggcataggagttttcgaccttgaccagcgacgaaacccaggtacaaaaaccggcccacagacagcagaccagcatcatcagcagaggcgcgcggatcatcaggatgatgataaccagcgccgcaatacagccaataaaggtcccggcaatacgcaacataccgcgatagcggatcgcgccggagtacggttcgccgccagcagcaaaggccggcccggcggcgacgatcgctgccgtcagtaccgcccagcgcggcgtttcgagctgaaaatggaaaccgacaaacagcgccagcaccaccgcgcatgcaagcttaatggcaaagcggagatgccggggagcaatggtatatgtccccatagcgattaaccaaattcgcgcaggcgcatagccagtttctggaagaagttggcctggctggtatcacgatcttcttgaccggtgatcactaccgtcgccgtggtgcccgatggccacagattcccctgctggtgatcgaggcgaatacgcaccggcacacgctgcgccagacgcacccactcaaggttggagtcgaccgaggccatccctttcgagtcgctgctgctgctggcgttggtcacccccgcagcgatactgtccaccgtccctttaatggttttgctgctgcccagcggggtaatctccgcacgatagcctggacggacgccctccagtttggtctcttccagataggccatgacgtaaaacgtattctctttcaccagcgccaccgccgtggagccacgggtgataaattccccagtgtagacgttaaggttagtcacccagccatccgcaggggcgcgaatgaccgtccgctccagatctagcctggccaggtcgcgactagcgaccgctttcgccagctgatgttcaacggtttgcagtacgttgttcgcctgatcaatctcttcccgcgacatcgcctgtacgccaagcttattacgccgaccggcttcgacgcgtttt

SEQ ID NO: 5386 - DNA, 20051 bp, Unknown
  gut microbiota DNA sequence
tacgctttcctctttcagagtcaacccgtttttcaggatttttctctgcaaccgaaccggctgtttgtgtgaagtgattcacatccgccgtgtcagtgggagcgcattatagggagttcgccggaagtagcaagcgttaaaatagaaaaatcttatcgaccgctcattatttgaacttttcgctaattcatcttcttaccattaaaagcgcaatcccagtgttcatgcggcctgcagcgcaatttacgctaagatcggtttttggcaaaaatgtgatttttctctcttacccaacgccattatcgcgccgatggtgaattaagcaccactcttgacccacgacaatgcgcccgcccggccctcatttctataatcaggcccgtttcttcttactggtaataatcgatggcttatcaactcaacattaactggcccgagtttttagaaaaatactggcagaaacagccggtggtattaaaaaacgcgtttccggacttcgtcgacccgattactccggacgagctggccggattagccatggagccggaagtcgacagccggctggtcagcctgaaaaacggcaaatggcaggccagcaatggtccttttgaacatttcgacgggctgggcgaaaccggttggtccctgctggcccaggcggtaaaccactggcatatgccggccgccgagctggtgcgcccgttccgcgtactgccggactggcgcctggacgacctgatgatctccttctccgtccccggcggcggtgtcggtccgcatatcgatcagtatgacgtctttattattcagggcatgggcagccgccgctggcgcgtgggtgacaagctgccgatgcgtcagttctgtccgcatccggcactgctgcacgtcgatccgttcccaccgatcattgatgaagatctgcagccgggcgacatcctctatattccaccgggattcccgcacgacggcataacccacgaaaccgccctgaactactccgtcggcttccgcgggccaaacggccgcgacctgatcagcagcttcgccgactatgtgctggagaacgatctcggcggcgagcactacagcgatccggacctcacctgccgcgagcatccgggccgggttgaagagtatgaactcgaacgtctgcgcaccatgatgatcgatatgattcgccagccggaagacttcaagcagtggttcggcagtttcgtcaccaccccgcgtcacgagctggatattgcgccggcagaaccaccgtatgaagaagaggaagtggtcgatgcgctgctgggtggtgaaaagctttcccgcctgagcggcctgcgcgttctgcatatcggcgacagcttcttcgtgcatagcgaacaactcgacaccaccgatgccgaagcgctggatgcgctgtgtcgctatacctcattaggccaggaagagctcggcagcggcctgcagaatccggcgttcgtgagcgaactgacgcggctgattaatcagggctactggtacttcgaagagtaagagagtcgcgatactgcgggcagccgcctggcgctgcccggtttcttttatgactcatcgtcagtaaagagctgttcaatcgatttggtcggataaaacagtaagttactatttttatccacgagctgtataaaccccagacgaagatagaatgctttagccttctcattaagggcttcaacaaacaatccgtagatgccaacggctttagacgctccccacaccactcgcatcgcatgggcaaccaacatctctccccagccctgcccctgaacagatttatcaatggccagccgcccgagggttacgcttggcgcattttgatacgggattttcttttgctgagttttagacggcaacatgcctcgctcgaaacaactccccgataaggtgtaataacccagcaacctgggaacggtatccccggagaccagcgcataaccccttaagatttgtccatcgtgctgccgcttgaggtgctcttttaaaaacgtattcagcgcttcctcgccgcaatcaaatccagtgatatcgtagctgaacgcatcggcaatcatctcaatcgtcagttgctgctccattagctctaccttacctggtttgtagacgcttcgctgcacgtttcagtcgatcattcggggctggcggttgggtaatcgcctccatcaccaggctccatgattgctcattgaggaccattctgcggtgctgctcaatcacttccgcagcacgttctgaggcactggcaaccacaaactgggtaatcgtctgattcgaaattgccgcagcttcctcgatgatgctcttatcatcatcggttaatctcaaatctatacgctgctttttaagtgcgggcatacgttatctccggcctgttgcaaacttcatgtacggttattttccgtacatttaatatagcgacagaaagccacatactcaactatcactcgcggattgcgcctatttcggcaacaccacaataaaccgcgtcgagcgcagatcggactgcgccgccacgctgccgtggtgggctccgacaatcgatttcacaatcgccaggccgatgccgctgccctcccctttgcgctggcgcgaggggtcgacgcgatagaaacggtcaaacaggcgcggcagatgttcagcggcaatcggcgtaccggggttctccaccatcaggcgtaccgtctccgcgctttcgctcaactggatggtcaccgcctgcccggccggcgtatagcggatcgcattcgacagcaggttgctgattgcccgccgcagcatcagcggatcgcccgtcacccggcaggggctaccgacaaaacgcagcgccaccgccttctcttccgcccacgcctcgaaaaactcaaacaccttatgcacttcatcggccagatccagcgcctgttgctcagggatcagctggttattatccgcctgagcgaggaacagcatatcactgaccatccgcgacatccgcgagaactcttcgagattggagtaaagcacctcttccagctcctgctggctgcggctctggcttaaggcgatttcggtttgcgtcaccaggttggtaatcggcgtgcggatttcatgggcgatatcggcggagaagttggactggcgggtaaagacatcctctatgcgctccagcatatggttaaacgacagcgccagccgctccagctcgacaggcaccgcctgcgggtcaaggcgcacatcgagatcccgcgaggtaatattctggatctggcgactgatctggcggatcggcttatgcccctggtagaccacaaacagcacgatggcgatgatcagcaggctgattatcgacgccgcggagatcagcttcgctttcagctcattaatatagtgcaggtgaaaatcgatggataaggccatcagcaggtggtacgccggtttaccgtccgcctgcttgcccagcggcagcatgatcaaccgccaggcgcgggtctccagtggatgattatcgtgcgccattgcccgcggctgcgggtcggtccatgaaatcacattcccgtcgcggagctgcatcgccagccccggcgtactcagcatatggctgagatccggcccgttgggcgactggaagagaatattgccctggccatcgtccaggcagataaagacgttggcgtagcccgcaatgatattcttcacgatctccagccgccgcgcctgcgggtagtcagcgtggtcgaggaccgtctccagggtggtgctgagctgtctgagatcgtgaacgtcgcgctcttcaaagtgggccttcaccgaatggatcatgatccaggtgaaggcaaagaaagcaatgatggtggcgaggctaataaagaaggtcagccgggtggccagggaaaaggggcgcttagcggccatccggcacctcaagcatatagccgacgccgcgcacggtctggatcagcttcggctcgaagtcgttatcaattttggcgcgcagccgcttcaccgccacgtcaatggcgttagtgtcgctgtcgaagttcatatcccacacctgcgaagcaattaacgaccgcggcagcacctcgccctgatgacgcaggaagaactccagcagcgtgaattccttactggtcagggtgatgcgggtggcaccgcgcgtcaccttgcggctgaccaaatcgacgctgagatcggccgcctgaaactggctttcgacgatgaccgccgccccgcggcgcagcagagtacgcacccgcgccagcagctccgcaaaggcgaacggttttaccagatagtcgtcagcgcccaactccagccccttcacccgatgctcaatggtgcccaacgcggtaagcagcaggatcggcatgcctttcccggcggcgcgcagcatgcgcacgatatcccaaccgttcacatccggcagcatgatgtcgaggatcagcagatcgtaatcgctggtcatcgccaggtgatagccgttgaggccgttatcggccaggtcgacgacgaagccggcctcggtgagccctttggtcaggtactctccggttttcttctcatcttcgacaatcaaaatcttcacggcaggctccttcacgcgcgctttgtgcgggtattcaattttagaggagcgcctccggatagcaatgaaatatcaggaaaatgacagctttgtcattttcccgtcacgccctgaacagagcccgctacataaagtagccgccatggataaatcgtcgaaacttatgccgccatgcgctcaatacagctacttaccctcagcgtgatatttgccttaaccggctgtctctcgctcgctccggactaccagcgccctgtcgcgccggtgccgcagcagttctcactcagccagaacagactggttgccgcaacggcgggttaccaggagaccggctggcgcacctttttcgtcgacccgcaggtgaaaagcctgattagcaccgcgctgaccaacaaccgcgatctacggatggcgacgctgaaagtgcaggaagcccgcgcccagtaccgggtgaccgacgccgaccgctacccacagcttaacggcgacggcagcaccacctatggcggcaagctcaaaggcgacaccaccaccagcagcgattataccgccggcttaaacctcagctacgacctcgatttatttggccggctgaaaaaccttagcgaggccgaccgacagaacttcttcgccagcgaagaggcgcggcgcgcagtgcatatcctgttgattgctaacgtttcacaaagctacttcaaccagcggctggcggcagcgcagctgcaggtggccaacgataccttacagaactatcagcagtcttacgccttcgttgaaaaacagctgctgaccgggagcaccaccgtgctggcgctggagcaggcgcgcggcatgatcgaaagcacccgcgccgatatcgccaaacgtcagggccagctggcgcaggccaataacgccctgcagctgctgctcggcagctatcaacatctgccggacgatagcgccagcagcgccgtggacctgcaaggcgtaaccctgccgccatcgctctcctcagcgatcctcctgcagcggccagatattctggaagccgaacacagcctgcaagcggccaacgccaacatcggcgccgcgcgggcggccttcttcccgtcgatcaccctgaccagctcgctctccggcagcagcagcgaactctccagcctgtttaacgccggcggcgcgatgtggaacttcattcccaaaatcgaactgccgattttcaacgccgggcgcaaccaggccagcctcgatctggcggagatccgccagcagcagcaggtggtcaactatgaacaaaaaatccagtccgcctttaaagaggtggccgacgcgctggccctgcgccagagcctggccgatcaaattgccgcgcaggagcgctatctcgcctcgctgaatatcaccctgcagcgcgccactgcgctctatcgccacggcgcggtcagctatatcgaagtcctgagcgcccagcgcgatattttcaccacccgacaaaccctgctggaactcaactattcccgtcaggcaaatgaaatcaccctgttcaccgctctcggcggcggctggatggaataacccaaggagtcccgaacatgaattcactatctaaaatcgccctgttcaccctgctctctggcgcggtgttcgccgcccaggccgccgccccgcacgcaggtatggcgatgcacgagcagcacgccgccgcgcaggcgcaaagcatcagcggcaaaggcgtcattaaagctattgatatggataacaaaaaaatcactatcgcccacgaggccatcccggcggtgaactggccgccgatgaccatgcgcttcaccatcaccccgcagacgcagctcaacaatgtgaaggatggcgacagcgtggatttcaccttcgttcagcagggcaacctgtcgctgctgcaggatatccgcgcccaataacggcccggcgacggtaggcccctcaacaactgaatggacgacacatggcatccctgacacttaaaaatacggcgttgatcctcggcagcatgctgattggcggcgcgcttaccgcggcgctgtacgcccgatgggctccgacccactctgccgctccggcggccgagcagcagcgtaaagtgctgttctggtacgatccgatgtacccgaacacccgcttcgataaaccgggtaaatcgccgtttatggatatggatctggtgccgaaatacgccgatgaggagcatgccgccgccggtgcgccgggggtgcgtatcgacccgacgcagacccagaatctcggcgtaaaaaccgccgcggtcagccgcgggccgctgcgctacgcccagaccttcccggccaacatcagctataacgagtatcagtacgtgattatgcaggcgcgggcggcgggctttatcaataaagtctatccgctgaccgtcggcgacaaagtcaagcaaggcacgccgttactcgatctgaccatcccggactgggtggaagcgcagagcgaatatctgttgttgcaggagaccgggggcaccgccacgcaggtcgaggggatcctcgagcgtctacgtctcgccggaatgccggatgacgatatccgccgcctgaaaaccacacgtaaaatccagacccgctttaccctcaaagcaccgatcgatggcgttattaccgccttcgatctgcgtgccggaatgaacatcgccaaagataatgtggtggcgaaaattcagggcatggatccggtgtgggtcagcgtggcggttccggaatccatcgcctggctgattaaagacgcctcgcaattcgccattcaggttcccgcctggccgggaaaaaccttccgcatcaacaaatggacgatcctccccagcgtcgatagcgccacccgcaccctgcagctgcgcctgcaggtcaacaacccagatgaagcgctgaagccgggaatgaacgcctatctgcagctgaccagtgaaagcgccccaatgctgctgatcccctccaaagcgctgatcgacagcggcagcgagcagcgagtgattaccgtggataacgaggggcgcttcgtgccgaaacgcgtgcaggtattccatgaatccaatggcgttacggccattcgcagcgggctgcaggagggggagaaagtcgtcgccagcggcctgttcctgatcgactcggaggccaatatcgccggcgcgctggagcgcatgcgcgcgcaggcccctgatgccgcggcctctgccgcccacgcgcactaaggaacggaaccatgattgaatggattatccgccgctcggtggccaaccgcttcctggtgatgatggcggcgctgtttctcagcatctggggaacctggaccatcatccacaccccagtagacgccctgccggatctctctgatgtacaggtgatcgtcaaaacccgctatccggggcaggcgccgcagatcgtcgaaaaccaggtcacctggccgctgaccaccaccatgctgtcagtccccggcgccaaaacggtgcgcggcttctcgcagtttggcgactcctacgtatacgtgatttttgaagacggcaccgatccttactgggcgcgctcgcgggtgctggagtatctcaaccaggtacagggcaaacttcccgccggggtcagcgccgaaatgggcccggacgccaccggcgtcggctgggtcttcgagtacgcgctggtcgaccgcagcggcaagcacgatctcgccgaactgcgctccctgcaggactggttcttaaaatatgagctgaaaaccattcctaacgtctcggaagtggcgtcggtgggcggcgtggtcaaggagtaccagattgtcgtcgacccgatgaagctgccccagtacggcatcagtctcggcgaagtgaaatcggcgctggacgcctctaaccaggaggcgggcggctcttccgtcgaactggcggaagccgaatatatggtgcgcgccagcggctacctgcagacgctcgacgacttcaaaaataccgtgctgaaaaccggggataacggcgtgccggtctatctcggcgacgtcgcgcgggtgcagattggcccggagatgcgccgcggtatcgccgagcttaacggcgagggcgaagtcgccggcggcgtggtgatcctgcgctccggcaagaacgcccgcgaagtgatctccgcggtcaaagagaagctggcgtcgctgcaaagcagcctgccggaaggggtggaagtggtcactacctacgaccgcagccagcttatcgaccgcgccatcgacaacctcagctacaagctgctggaagagtttatcgtcgtcgccctggtctgcgccctgttcctgtggcacgtgcgctcggcgctggtggcgattatctcgctaccgctcggcctgtgcttcgcctttatcatgatgcatttccaggggctcaacgccaacatcatgtcgctgggtgggatcgccattgcggtgggggcgatggtcgatgccgccatcgtgatgattgagaacgcccataagcggctggaggagtgggagcatcagcacccgggagagaagctcagcaacgacacacgctggaaaatcattaccgaggcctcggtggaggtcggcccggcgctgtttatcagcctgctgatcatcaccctgtcgtttatcccgattttcaccctcgaaggccaggagggcaaactgttcggtccgctggccttcaccaaaacctggtcgatggccggggcggcgctgctggcgatcgtggcgatcccgatcctgatgggcttctggatccgcggcaggatcccggcggagagcagcaatccgctgaatcgctttttgatccgcatttatcacccgctgctgctgaaggtcctgcactggccgaagactaccctgctgattgcgctcctgtcgatcctgacggttgcctggccgcttaaccgggtcggcggcgagtttctgccgcagatcaacgagggcgatctgctgtatatgccgtccacgctgccggggatctccgctgcgcaggcggcggatatgctgcagaaaaccgataagctgatcatgacggtgccggaagtggcaagggtgttcggcaaaaccggcaaggccgaaaccgccaccgactcggcgccgctggagatggtggagaccaccattcagctcaagccgcaggatcaatggcgtccggggatgaccatggagaagatcgtcgaggagctggataaaaccgtgcgcctgccgggactggcgaacctgtgggtgccgccgatccgcaaccgcatcgacatgctctccaccggcatcaagagcccgatcggcattaaagtttccggcaccaacctggccgatatcgacgccatcgccgaacaaattgaagtggtggcgcgcagcgtgccgggagtcacttcggcattagccgagcggctggtcggcgggcgctacctcaacattgatattcatcgtgagaaggcggcccgctacgggatgaccgtcggcgacgtgcagttgttcgtctcgtccgccatcggcggggcgatggttggcgaaacagtggagggcgtcgagcgctatccgatcaacatccgctacccgcagagctatcgcgacagcccggagaccctgcgccagctgccgatcctcacgccgctgaagcaacagattgtcctcgccgacgtggctgaggtgaaagtggtcaccggaccatccatgctgaagaccgagaacgcccgcccgaccagttggatctacatcgatgcccgcgaccgcgacatggtgtcggtagtgcacgatctgcagcaggccatcggcaaggaggtgaagctgaagccgggcatcagtgtgtcctactccgggcagtttgagctgttggagcgcgccattcagaagctgaagctgatggtgccgatgacgctgatgattatcttcgtgctgctgtatctggcgttccgccgcgtcggcgaagcgctgctgattatcaccagcgtgccgttcgcccttgtgggcgggatctggttcctctactggatggggtttcatctgtcggtggccaccggtaccggctttatcgccctcgccggggtggcggcggagtttggcgtggtgatgctgatgtacctgcgccacgccatcgaggcggagccatcgctggagaatccgcagactttcagcgtcgataagctcgacgaggcgctgtaccagggggcggtgctgcgcgtgcggccgaaggcgatgaccgtggcggtgattatcgccggcctgttgccgattttgtggggcaccggcgccgggtcggaggtgatgagccgtatcgccgcgccgatgattggcgggatgatcaccgccccgctgctgtcgctgtttatcattccggcggcgtataagctgatgtggctgtcccggcatcggggcaagcgtagccaatagcccgccgcgtttacgccggtccgggaaattggctatagtggcgccattcttctggccggcgtgaacgtccctatgaatctgaacctggtatgttattccctgctgctgctcaccgccgtgggcagcgccctgctgccctacccgctggcgatgtggtttttactgagcagccttctgacatggcttatctatggcgccgacaagctggcggcgcgcaaagcctggcgccgggtgccggaaaccacgctgctggtgctgggcctggcgggaggctggccgggggccatcctcggccagcagtgctttcgccataaaacgcaaaagcagcccttccggacgtggtttttcatcagcgtggcgctcaacgtggcggcgctggccgggctgtacgtggtttatacccatctgctcagccgctaagcggcgaggctagcgcggcgtctggcggatccacaccaggcgatcgacgtcaaagcccagctcgcgcgcggtattcaggtaatcctgcttcaccgccgccggaatggtgggggttcgcgacaggatccacagatagtcgcggttggggccgctgaccagcgcgtactggtagtcgtcgtccaggcggatcacgttatagccgccgtagaacggcccgaagaacgacaccttcagcgccgcggtggtgggggcgccggtgaagtaggcttttccgtcgctctcattccagcgttttttgaccgggtcataaccgcggttgacgacgctgatccctccgtcgctgcgggcgccgtaggtggcggtcacctgctccaggcctcgctcgaagcgattctccaggcgggcgacctcataccattttccaaggtaccggctggcgtcaaacccgctaatcggctgaacgcccttcggcggcgtgggcgatttgcaggccaccagggttaacgcgatagcgacgccggtgacaacaggccatagcttcatgagaactcctttcatttacgcggttggggaaagtgtagtgcaaagccactacacttcacgccagccgtcgtgattcgtagtatattgagaatattctttgttaacaggtggcctccatgccttactccatcggcgaatttgcccgactatgcgggataaatgcgaccacgcttcgcgcctggcagcgccgctacggcctgcttaagccgctgcgcaccgatggtggacaccgtctgtacagcgatgacgacgtccagcaggcgctgaagatcctcgactgggtgaaaaaaggggtgccagtcagccaggtgaaacccctgctgtcgcgccccggcgcgcggcgcaccaataactggttgacgctgcaggagaccatgctgcagcggctgaaagagggaaaaatcgagtccttgcgccagctgatctacgacgccgggcgcgaatatccgcgccaggagctggtaaccgaagtgctgcgtccactgcgcagccaggtctccgccaacgtgccggccatcatgacgctgcgcgaaattctcgacggcatcatcatcgcctatacctcgttttgcctcgaaggcgacaagaaggcgcccggggacaactttctgatcaccggctggcacctgaccgacgcctgcgaaatctggcttgaggcgctcaaacgtaccggccagggccatcgcatcgacgtcctgccggtgcctcccgccgccctggcgccggagattttcccccagcgcaactggctgctggttaccagcggcaaactttctgccgcccgccagaggcaggtcgaactctggcagcagcaggtcgtctccctcgagataattccgctctaacccccctgttttaacctacatcccctctctgagacgccagcgcccggtggcgcggcgggctcacgcttgccctttgcgccacccgcgattttcactcctttaaacaccaatcataacaacatgatttttaacataaataaaatatatttttctacaaacttggacaaataattttatttgtgtaagttttaagtatgccattacgctaccgtatctagccaggatgtgatccatgagcacctcgccgtccgtgattcgtcgtttcgttgagtactacgccgggctggacgcgcagccgcccgcggcgctggccgcgctgtaccatccggacgccacgctgagcgatccttttggtcagcatcaggggctgttcgccattcagcgctactttacccatctgctggccaacgtggagcagtgccggttcaccatcgacacgccgctttgcgacggccagcggttcgccgtgacctggaccatgcactggtcgcatccgcgcattgccggcggagaaaccctggccctgccgggctgctcggtggtggacatcgccggggagcaggttctccatcagcgcgactactacgacgccggggagatgatctacgagcatcttcccctgctgggctgggcggtgcgcggcgtgaagcggagggtgcgctcatgatgacggtgctcatcaccggcgccagctccgggatcggcgccggcctggcgaaatccttcgcggcggatggccatctggtcatcgcctgcgggcgcgatgcgtcgcgcctggcagcgctccagcagctcagccccaacatcagcgtacgcctgttcgatatgacagacagggacgcctgtcgccaggcgctgacgggctgttttgccgacctgatcattctctgcgccgggacctgcgaatacctcgaccacggacaggtggatgccgccctcgtggagcgggtgatggccaccaacttcctcgggccggtgaactgcctggcggcgctgcagacgcagctggaggctggcgatcgggtggtgctggtcagctccatggcgcactggctgcccttcccgcgcgcggaagcctatggcgcctccaaggcggcgctgacctggtttgccaatagcctgcgtctggactgggagccgaaaggggtggccgtcacggtggtctctccgggcttcgtcgacaccccgctgacgcgcaaaaacgacttcgccatgcccggccgggtgagcgtggatcgggcggtggcggcgatccgccatggcctggcgaagggcaaaaaccacatcgccttccccaccggtttcagcctggccctgcggctgctggccagtctgccatcgggtatccagcgcctactgttgcgcaggatggtgcgctcatgaacatcgccatcatcggcagcggcatcgccgggctgacctgcgcctggcgactggccggacaccatcaggtaacgctgttcgaagcgggcgccacgccgggcggccacaccgccaccgtggatgtcgccacgccgcagggcacctgggccatcgataccggatttatcgtctacaacgatcgcacctatccgcgctttatgggcctgctcagcgagctggggatcggcaggcaaaaaacgcagatgagcttctcggtccacaacccggccagcggcctggaatacaacggccacagcctgacctcgctcttcgcccagcggcgcaatctgctgaagccggccttctggggactgctgagcgagatcgtccgcttcaaccgcctggcgaaactggcgctgaccgaggcgctggatccaggcgcgacgctggagagcttcctcacccgccaccgtttcagccccttcttcgcccgccactatattctgccgatgggggcggccatctggtcgtcgtcgctgcaggagatgcgtcgcttcccgctgccgctgtttttgcgcttctttgaaaaccacggtctgctggatattcgcgatcgtccgcaatggtacgtggtgcccggcggttcccgggaatacgttcgctccctgctcgccaggctcggcgatcgcctggacctgcggctcaacgcgccggtgcagcaggtggaccgccacccggcgggggtcaccctgcggctggcgtccggggaggcgcattttgaccaggtgatcttcgcctgccactccgcgcaggccctggcgatgctggcggcgcccaccgattccgaacgagaagtcctcggggacatcggctggcagcgtaacgaggtggtgctgcacagcgatccgcgctggctgccggagcgccagcgcgcctgggccagctggaactatcgcctgagcgacggggatcgggcccgggcctgcgtcacctacaacatgaatattctccaggggctgcccgcgggcgcgccgctgttctgcgttaccctgaacccggacgcgccggtggacgatcgctacgtctggcagcgcttcgtctatgagcatccgctgtttaacccgcaaagctggtcggcccagctgcggcgcgaagagattaacggccagcagcggagctggtactgcggggcctactggtacaacggctttcatgaggatggggtgcgcagcgcgctcgacgtggtgcagggcatcgccgcggcggagggccactgaaatgaacagctgcctctatcagggcgtcctgcgccaccgtcgcctgcagccgaaagcgcaccacttcgtctaccgcctgtttatggcctggctcgacctcgacgaactggacaggctgcctgaggcgggcatccgccgcaaccgcctggccgccgccgcctggtacgatgccgattatccgctgggcgcgccgctgaaggcccaggcgctgaaccggctggagagcctgaccggctgccgcccggcgggccgcgtgatgctcctgacccagctgcgctacttcggcttccattttaatccggtcaacttttactactgctatgacgaggccgacaccctgcgctgggtgctggccgaagtgcgcaacacgccgtggaatgagcgtcattactacgcggtggacggccagcaggcacgcccgctggagaaagcctttcacgtttcgccgtttaacccgatggacatggtctatcactggcgcttcaacgcgcccggcaaaacgctgcacatgcatattgaaaaccatcaggccagcaaggtgttcgacgccaccctggccctgagccgcgtgccgttgacccacgccaacctgcgcgggctgctgctgcgtctgccgctgatgaccctgaaaaccgtcctcgccatctactggcaggcgctgcggctgtggctgaagcgcgtgccgctgtacaaccatcctgtcagcaggagtgaacgctcatgaccgatcccgtctttgcgcttgaacccgatgtgccgcgcaacgtgcggctcgcgcgctggctgctttttcgtctgttgagtggcctccgcgaaggctcgctcaccgtgcgcgaaggggcgcagacgtttcattttggcgaccccgccgccgcgctgcgcgccgaggcgcgggtctgcacgccggaggtgtactggcgtctgctgaccggcggcagcctggcggcggccgaggcctggatggacggcgactgggagagccaccagctgacggcgctgctgcagatcctcgcgcgcaacggcgaggtgctggggcgtctggagcgcggctttcgtctgctgggcaagcccgtcgcccgcctgcgccactggacccgccgcaacacccgcgcccaggcgcgggagaacatcgccgcccattacgacctcggcaacgaattttatgcccattttctggatgacgacctgctctactccagcgcgctgtttaccgacgaccagcaggatctgacccaggcccagcgtgccaagatggcgcgcctgtgcgaccagctggcgctcactcccggcgatcatctgctggagattggcaccggctggggggcgctggccgagtacgccgcccgccattacggctgccgggtcaccaccaccaccctttcccgggagcagcaccgctgggctaccgagcgcatggcccgcgccgggctgcaggatcgcgtcgaagtgctgctctgcgactaccgcgatctgcgcggcgagtacgacaaactggtgtcggtggagatgattgaggcggtgggccagcgctacctcccggccttcttccgcacctgtcaggcgcgcctgcgcccgggcggcagaatggccctgcaggcgatcaccatccaggatcagcgctatcgcgactacagcaaaagcgtcgattttatccagcgctacatcttccccggcggctttttgcccagcatcacggcaatgagcgagctgatgacccgccacaccgattttgtggtacgcaacctgttcgacatgggcccggactatgcccgcaccctggcgcactggcggcagcgctttacccacgcctggcaggatattgaaaagctcggctttgatgagcgcttccgccggatgtggctctactacttcggctactgcgaagccggatttaacgcccgcaccatcagcgtggtgcagctcaccgcggagcgggtatgacacgcccggcgcagcatctgctgatggccctcgcgttcgatgtttactggacgctggtggtgatgttgcgcgagcgcggtctgctgatctggctgacgctggccattttcgcctggctgcggttgccggcggccagtcgtccgcccgccctgctgttggccgcggcgggctgcggtctggacgcctgctgggcgctggcgggactgatcgattttcgcggcgacagcctgctgcccctgtggatggtggccctgtggctgatgttcgccgtcgtctggacccgactgacccgcaccgcgacgcttcccggctgggtgctggccacggccgccaccgtcggcggcccggtggcctacctgatcggcgctcgcctcggagccatgaccctgctggtgccgacggcgcttggcgtggccgccatggcctgcggctggctggtgctcatgctgttattccatctggggatggggaggcaaaaatgagattcgccctgttactgctatggctgaccatcctcgccccggcggcccacgccgccgactggctgacgtggcgccgcgtcggcgaggcgaccctcacctgggggccgttcaccgtctatcactcgcagctgcgtacgcccaatggccggtatgacggcccgcagcaggatcgggcgctgatcatcacctaccggcgcgacatcgatcgcgaggcgctggtggaggccacccgcgaccagtggcaggcgcagggcattctgcagcaggaaccgcgcagcgaagcctggctacgcatgctgcaggggatctggccggacgtcgcgccgggcagccagctggcgttcgtggttcgcggcggcgaggggcagttctggtatcgcgccagcgccgcacagaccgcctttaccccgctcggcccgcgccagtcggcggcgttcagcacccgctttctcgccatctggctcgatccccgcaccacttatcccgaactgcgtcagcagttgatcggaggtacaccatgaaacgcattctgacccttggcctggcgctgctgatgctgatcctcgccggctgcagcaccgaggtcacggagtaccggcagcagcagcccgccctcgacatctttcactattttcaggggcgaaccgaggcgtgggggatggtgcaggatcgcagcggcaagcagctgcgccgcttccatgttgagatcgatggcgacgtcgtcggcgacaccctgaccctccatgagcgctttgtctatgacgacggcgagaagcagcagcgggtgtggcgcattcgccgcaccggcgataaccgttatcagggcaccgccggggatatcgaaggggtggccagcggccaggcggcaggcaatgcctttcactggcgctacagcatgagcgtcgaggccagcggcagccggtggctactgcactttgacgactggatgttcctgcaggacggcattcatttatttaacaaaaccgagatgaagaaattcggcattacggtcgccaccgtgacccttttctttacccgaaccacagcagaagagaggacagcgccatgaacacgcaacctgtcattgggatcagcggatgtttaaccggctcagccgtgcgattcgacggcgggcataagcgtatgggctttgtgatggatgagctcgcgcagtgggtggcgtttaaacccgtctgcccggagatggcgatcggcctgcccgttccccgcccggcgctccgcctggtgcagaccccggtcggggagatccgcatgcgcttcagccacgccccgcatgaggatgtgacggagaagatggctgatttcgccagcgcccacctggcaaccctgggtgagctgtcgggctttatcgtctgcgccaaatcgccgagctgcgggatggagcgcgtgcggctgtatgatgaaaaaggcaatcgcgggcgtaaggaaggcgtggggctgtttaccggcgccctgatggcgcgctacccgtggctgccggtggaagaggatggccggctgcacgatccgctgctgcgggagaattttgtcgagcgcgttttcgccctgcatgaactcaacgccctgcgcgcccgcggcctgacccgtcacggtctgctggcctttcacagccgctacaagctgcaactgctggctcatcaccaggcgggctaccgggagatcggcccgttcgtcgcctcgctgcatgaatgggaggatctggaggcgttcttcgaggtttaccgcgagaagctgatggcgatcctcaagcagcccgcctcgcggaaaaaccacaccaacgtgctgatgcatattcagggttatttccgcgaccagctgaacagccgccagcgcggcgagctgcgggaggtgatcctcaactatcgcgccgggctgctgccgatcctcgccccgctgacgctgcttaagcactatctggccgagtatccggatcgctacctgcaggcgcagaactattttgacccctacccgcaggatctggccctgcgcctgacggtgaactgagggagttggcctgaaacagctgcccggcggcgctgcgcttgccgggcctacggggggggggtgagcctgcgggaaggaacgtaggccggataaggcattgatgccgccatccggcactaccgcaggtatggagcctgaccgcccggcggcgctgcgcttgccggtcctggggggg

SEQ ID NO: 5387 - DNA, 1766 bp, Unknown
  gut microbiota DNA sequence
cttttgcccgctgctcttcaggtgtgagcgcacctagctgacgtgcctgggtaacggtgacagttccagcctccaccgcttcccggacggcctgagtggcatcgagaagggagagcgttgcacgaacggtctgaacgctgcagccaaacaacaccgcaatgtcgtcctcatcgagcccgcggtcgagcgcgtctgacatttttttagcccggccaagcggtgtatcaggtcggcgaatttcgttttcactgaccatgtatttagccatctgatttgctgatccgcgcttaacgactccaggtacaagcagtgggtctttgccttctttcagacggagtttatttgcctccagggtatgtttaacgcgctgacggccaacaactacgcaggtgagccccgtttcagggtctttccagacgatgatcggctcaagtacacccagctccgcaatgttcagtaccatcccttcctcaataggcaggtgtacccgctcatcataaagtgggtgggtcttatcggtgaccaggtgcaggttttcaggctcgaaattgagcacgtttgttttgccgctggcaccgtatacatcgattgaattcttagccatgaatagcctcctgaacatctaaaactcgctgaaaaacaggactgccaagcaggctgtaattcatcccaacagcaactttcggcaccaggccaaaacgcttcatgtcaaagtcgatgacggcccgctgatcgcggaaaagccccaaacgaccatgccggacaacctcgccagtcgcttctgcttcggaaaaataccgctggacagtagcgcggctcagccccagttttttcattgcctcggtggtcgtaaggcgcccctgatgcctggtgatccgaatcactgcgcggacgtactctctgcgctcaactgctgataatgctctagccatgattccgccctctgcctaaaccgaatttcgcgcggatttcagcgattttgtttaagccctgctcgttactcagcggacgtccgccaagctttgggatctgtttaaccggctcgggaatcacttccccggcattcaagcgacgaaccatacgcagaagctcatcctgcgccttacgtcgcagctcagtgtcgctgaggccgtttgcgcgcatgtctgcgtacaagccagtaaccatccagtagcaagctttgtgtttcagcgttaacggttcgattttgtgctcaggccatgggtacgactcagcgtctggatactggccgcgagaccggcaatactggtaaaccatttcaaccagctcactcgcatctggcaggcctacagttaccgcctcctcagaacgacaccaggcgacgaactgtcccggtgatggcataaatggtttttcctgtttgcgcgcaacccgcatccctgcgttaatctgctcaactgtggtgatcccgttttctttgaacgccaacaaccactggcgacgcatctcgttgaggtcttccacagatttgttggccaacaccgggaatacggcaagcagctggcggaacagctcgttgaagatctccgcagtcttggccgcctggcgctttactgcctgctcgtcctgcatttccggaagcccgacagccactcgctggaagttttcacggtcgaagttgtgcatgctttctgcgatagatttcattcgagtaccccgtcgatccaatcggtattgtccagcgcgctggcgcctgatttgttttttgatgggctatggctacgaagtctttttgtcgtgagttg

SEQ ID NO: 5388 - DNA, 1525 bp, Unknown
  gut microbiota DNA sequence
agtgagtgcgcttgtcctgcagacgcatcaggcggatggtgttcgcccattcaacccagttgggctctgagagggaggcgttcacggtgagggctttatcgaaaatccatcgcgcggctttgaggtcgtcagctgttccccaggatttacccgcaggggtataaatcccatcggccgcttctggatgacgagagagaaacttcaaagtttcctcgtttcgggattctttagaattccgagacgaagaagatcttttactattgttcttgttcttgtattgggtgtctcccgtttccgggaaaggttttcccgttttcggtaacacttttcccgattccgggaagagttttcccgttttcggtttgtctaaaatccactcagatagctcagtatttataccgacaattttcatcactccctgcttatgagcgaagataattttccgctccgcgagagatttgattgtgtcggaaatatgcgactctccgaggtctgtcagctcagcaatcaccgtgtttgttactcggtcctgcttcttgttccatccataggtaagccagataacagcctcaagacactgccactcacgacctgacatccgcagacgcggcttgagcttctgtatctcgtttgcgatcttggtatacccgttagccaggtcggccatttgacctcccgaacgctcggttttaatcggaaaattgataacttcagcggtatttgacatacttcatcccgtgaattgacccaattaattcacccgaagactggctgtgttggcgcacaacagtcttcaccctttcagaacaacccagcctggtcgccgccctttcgcactttgcgctttgcttcccggcgttcagctgcgctggtctgcttctctgcccataactttgcgtgtcgcataacatcgtcaaaaatttcccctttgcggcttgcctgtgacatccgcttgtacatatcgaccgcctggtatgccccccccctgagccactgcttgcgtgaagtcctggcgaagaagttcctcgcggacgtttttctcaataaatttgatgtgattcatggataccccgcttacatcacgccgagcattgagctcacgatcgtcatcagcgctcctgtctgctcaggcattaacctgaaaagcgacgctattccctcgctcacctccttcagtttctggtgctctggcgcgttcagcatcaccgcctgctttgcttcagcgcattccttcatggccgaagacaggcgcgacaaaatatcgtcctgagggttcaggcgatggcggaactccaacggaagaacggtcatgattgccggggtaagaaggcgaacgtactcgcgatagcgctcagactcggccgggttgtccaggtagcgaaaaagcttctggcgggcacggctgatgtcatcaggaaacgcgatctcctcgccgccctgttgtcgccactcatcgatgatgtatgccgagacaacatcctgtccttcagctgctgcccaggcgcgaacggcagaacgaatgccg

SEQ ID NO: 5389 - DNA, 4198 bp, Unknown
  gut microbiota DNA sequence
cgtttctgtcgtccggccagcgtgccggtatgtctccccggtggcgctgcgcctaccggggctacgggcctgtcgcgttctgtcgcccgcaccggtacaccacatcaccaccggtaacgccccgcaatatcattgcccctgtaatcagacaagccttcccccgccagatacgataaactaacgccgattttgcatcaggaagctactatgaaccactccctcaaaccctggaatacctttggcattgaacgcttcgccaagacgatagtacgcgccgaaactgagcaacagttgctaagcgcctggcaaaccgctgccgcggcaggcgaacccacgctgatccttggggaaggcagtaatgtcctgtttctgaacgactatgccggtacggtgatcctcaaccggattatggggatcgaggtgagcgaaacgccggacgcctggcgcttgcacgtcggcgccggcgaaaactggcatcagttggtgcagttcacgctacagcatgcgatgccaggtctggaaaatctggcgttaatccctggctgcgcaggatcttcgccgatccagaatattggcgcctacggcgttgagctacagcgggtttgcgaatatgttgactgcattgagctggaaaccgggcgtaagcaacgtctttcagccgcggaatgccgttttggctatcgcgacagtatcttcaaacatgaatatcaggaccgctatgccatcgtcgcgattggcttatcgttagcgaaaacatggcagcctgtactgagttacggtgatttaacgcgtctcgatccgcagaccgtcacgccgcagcaggtatttgatgcggtctgtcatatgcgaatgactaaattgccggatccaaagattaacggtaatgccggcagcttttttaagaacccgatcgtcagcgctcaggttgcgaaagcgctgctggcgcagttccctcatgcaccgcactatccgcaggcaaatggcagcgtcaagctggccgctggctggctaatcgatcaatgtgagctcaaaggacaacgcatcggcggcgcggccgtccatcgacagcaggcgctggtactgattaatgaagatcgagcgaccagcgaggatgtggtaaaacttgctcattatgttcgccagcgggtgggtgcgaaattcgatgtatggcttcagcccgaggtgcgcttcattggcacgcatggtgaagtcaacgcagaggagagcattgcgtgaaagaccatactatccctttaacgctaatttctatccttgctgatggcgagtttcactctggcgaacagcttggtgagcagttaggcatgagccgggcggcgattaataagcacatccagaccttacgtgactggggcgtcgatgtgtttactgtgccgggcaagggttacagcctgccggagcctattcatctattagatgagaaaaagatttctcaagagatagaccatggccgagtgacggtccttcccgtcatcgactctactaaccagtatttgctggacaggcttgatgagctgacgtccggagatgcctgtgtggctgaatatcagcaagcagggcgaggccggcgaggcagaaaatggttttcgccctttggcgcgaatctctatctctcgatgtactggcgtctggagcagggcccggcagcggctattggcctaagcctggtgatcggtattgtgatcgctgaagttctgcagcagctcggggccgaacaggttcgcgtgaaatggccaaacgatatttacctgcaggatcgtaagctgtcagggatcctcgtggaactgacggggaaaacgggcgatgccgcacaaatcgtcagcggcgcgggtatcaaccttgtgatgcgtcgcgtggagtctgatgtcgtcaatcaggggtggatcagccttcaggaagcgggggtggtcatcgaccgtaacctcctcgccgcgcgcctgattaaagagctgcgcctgggactggagctgttcgagcaggaaggattggctccctatctaccgcgctgggaaaaactggataactttattcatcgcccggtgaaactgattatcggtgataaagaaatttacggcatttcgcgtggcattgacgcccagggcgcactattgctggagcaggatggtgtaataaaagcctgggtgggtggtgaaatatcattgcgcagtgcagaataaaaaagggagcttcggctccctttttttatttacgtaagcgtacctgattcactgagtgattggcgctcttagtcatgatcaggctggcgcgctcgcgagttggaaggatattttctttaagattcattaggttgatttcattccatagcgaagtggcaatatctaccgcttcttccttcgagagcttagcgtaattatggaaataggaatccggatcggtaaacgccccttcccggaatttaagaaagcggttgatataccagcttttcaataattcttccggggcatcgacataaatagaaaagtcgacaaaatcggaaacgaatacatgatggggatcgtgcggataatccattccactttgcagaacattcagcccttcaagaattaaaatatccggttgcgcgacggttttgtcaccgttgggaataacatcataaatcagatgggaataaaccggcgcggttgcctgcggtacccctgatttgagatcggagacaaacttcaccaggcgatgcatatcataggactgcggaaagccttttttcttcattaacccacgttcttttaaaaccgagttagggtgcaaaaaaccgtcggtggtaatgagttcgacatggcgatgctccggccaacgactaagcaaagcttgcagaacgcgggcggtggtgctttttcctaccgcaacgctgccagcgatactgataatatagggaattcgctgaccattggtgccaagaaattgttcgagaacagcctggcgacgcaggttagaactgatatagaagttgagcaaacgcgacagcggcaaatagatctcggccacctcttccagagagagatcttcgttgatgccttttaaccgcgtgatttcttcctcggttaacgtcatcgggacagaatcacgaagtgcagcccattggtggcggttaaattgtaggtacggtgtcattaacgtctgctctttttggctcataagcatgttcttactatcaccgaataccttgaaacggtgatgcttcacacgagttaatcaggacaatgggcaggagggtaacaccagattgccgggaataataagaaaaaaactcattgaatgctgctttctcgcgccagcatcacaagagaagaataagtttcttattctttgcaaagcatggcctttgctaacaggctaggctagcggcctgaatcctttccgtcagcggtcagcatgcgatagaggtaaccggagatgatcggacagcgtctgaagcgccgaattattggcgaatatttgcactccgctgcttgaaattacaccgttttttcgcgtaagagcacaaaatgtgagcaagagaacgttttatgcaaatttttagttgcatgaactcgctcctctccctagaatgcgcgctacttgatgccgacttagctcagtaggtagagcaactgacttgtaatcagtaggtcaccagttcgattccggtagtcggcaccataacaatttgggtggggttcccgagcggccaaagggagcagactgtaaatctgccgtcatcgacttcgaaggttcgaatccttcccccaccaccactttctggcgacgctttgcggagccggagttggttgggtaaactaatcagctcaatactaaagagagcagtctctttagtattacagaaagaactgggtagccgagtttcaggatgcgggcatcgtataatggctattacctcagccttccaagctgatgatgcgggttcgattcccgctgcccgctccagacgtgctgatatggctcagttggtagagcgcacccttggtaagggtgaggtccccagttcgactctgggtatcagcaccacttcttttctctccttccctgtttctcttctgttatgttcattcaacaagtcgggcatgttgcctggttgatgtggtgatatcaccgatttatccgtgtcttagagggacaatcgatgtctaaagaaaagtttgaacgtacaaaaccgcacgttaac

SEQ ID NO: 5390 - DNA, 3436 bp, Unknown
  gut microbiota DNA sequence
cgtcaggattgacaatcgtatgcccaatctgcccgctgccgtacagactgccgcgataaatatgatcgttaatcacaaatgacgagccgataccgtagtcgacgttgatcacgcaaaaatcctgctgtgtaccctgatgctgccacttctccgccagcgccagcatcacgcagtcgttatccacccgaacctgcacgccaagccgctcctcaagcagatactttatttcgatcggtgttttccagcgtgcctggggcatggtttgtgaaacgccggtaatcggatcaacctgtccatgcacgccaagggcgagattgatgctgtgctgcgggtagcggcggtggatatgccgccagcattcaacgatggcctcaagcagggcctgaggagtgggcgcgttgaccggcaaatgctgatgaccatccactgccagcaggcgggcgtcggcaagctgatattcaatgctggtcggggtgatattcatgcacagtgtccaggcgccgtgctcggggatctggtagctgccgctgttcacgccccgtttgctcaagtgttccgttgagtgaccgatcaatccctcgctaagcagctcggccagaatattgctcaccgccggaatggagagaccggtgagttgagagagctgtgatttactgagctgcttttcccgccacagatgggaaagaaaaatcgacttattggcctgccggacccgggcgttatcaaagccagtacgctgcatacacttaactcccttaactatattgcgtgagcattgcgcattttaacagcgaattggcgatatagactcctgttattgcaacttttacttcgttttgtttagtggaggcatcatgtacggttcggttaaggtctggcaggaaatcatttcattaccaacgtggacgacgggagcggaagatccgaaccctatgtttctggaaaaacgtgtttatcaaggatcttccggcagcgtctatccctacggcgtgattgataccctgaccggcgaacgcgaaatgcgcgattatcaggcagtgtggatggagaatgatttccttcgggtcatgctgctaccggagcttggcggccgtattcaccgggcatatgataaagtcaaacaacgtgatttcgtctattacaatgaggtggttaagccagccctggtagggctgctcgggccctggatctccggcggaatcgaatttaactggccgcaacatcaccggccgacgacctttaagccggtcgatttttctattcagcagggagaaaacggcgcgcagaccgtatggatgggggaagcggagcccatgcgcggtttgcaggttatggccgggtttacgctctatcctgaccgcgcgctgattgaaatcactggcaagatcttcaatggtaacgccacgccgcgccatttcctgtggtgggccaaccctgcagtaaaaggcggcgatgcccaccagagtgtattcccacccgatgtcaccgctgtattcgaccatggtaagcgtgatgtttccgctttcccgattgccaccggtatctactacaaagtggactattctgcgggggttgatatctcccgttataaaaacgtcccggtacccacttcgtatatggcggagaagtcggattacgattttgtcggcgcttatcatcatgacgagcgaggcgggttactgcatgttgccgatcaccatgtctctcctggcaagaaacagtggagctgggggtacggggattttggccaggcctgggatcgaaatctgactgatgaaaatggcccttatattgagctgatgaccggcgtcttcaccgataaccagcctgactttacgtggcttgcgccttatgaagagaaggtgtttgtgcaaaatttccttccctacagcgagttagggatggtgcaaaatgccaatacacagctggcactgaagctggttcgcgagtctgggcaactgcagcttggcgtatatgccattgctccgctaaatcatatcgtggttgaactcagcgctgaccatcagccattgtacgaaactcagctgacgctgaagcccggtgagagctggcagcagacgctgccggaaaatggcgtcgggcgcttaaccctcaaagtgaaaaccgccgagaaccagccgctgctggattatcaggaacatattacccaacagacgccgctgcccgaaccagctatagcgcccgcgttaccggaagcgatccacaatggcgacgagctctattttatcggccagcaccttgaacaatacaaccacgcaagccgctacgccggggattactatcgtcgggcggttgagctcgatccgcaggattatcgcaataatgttgccctcggtaccctggcgttcaacagtgccgactgggcgctggcggaacagtgtgcccgtgctgcgctacagcgcgcgcatcgtttgaataagaacccgcgagatggcgaagccagtatgctgcttgccagcgtgctggaaaggatgggggatgatgcaggcgcctgggatcactattacaaagcctcctggagcggtaattgccgtgacgccgcctggtggtcgctggcgcggctggcgatgaagcgcggtgatgttgccgatgcgctggaaaaagtaaacaccagtctgcggttcaacgccagcaatcctctggcgatggggttgaaaacgctggcattagccaacagtgggcagaagaaagcagcgctggagtttattttcgcctctcttgaacaatacccattgagctatccgctgcactgcgcgcgctggatgattgagcggagcgacgacgcgcgagaaaccctgctgcgcatcacggggcgcagaggggtcaacgccagcctgctggcgggttggctgctctctatcggacagacgtcggcggtgaaagaggttcttgcggttctggacagtcaggaagcgctgccgatgctctggcgtgcgtcgctaagtgatgatgccaatgaacgccaacagtttattgccgccgccgagcactgccatgcgcacaatgttcgtttccctaactcgctcgatgaagttcagatgctgcagtcgctgggcgacagcgcttttgcccgctatctactcggttgcttctggtacagcaaacgtcgctatgacgaggcggtgagctgctggcgcgagacgctcgaaaaatctcccgattatgcgcccgctcatcgtctgctgggcgtttactcgtggaataaacagcaggatgcaacgcaggcgctggcttatctgcagcgcgccgtagcgctggagccggaaaatgcgcgcttcctgtttgaactcgattttttgcaaaaattactggccaggtcggtacatgagcgactgacgacgctggtggaacgtaaagccgtggtgctgaagcgggacgacctgaccgctgagctgctaagcctgtggaacgcgtc

SEQ ID NO: 5391 - DNA, 4966 bp, Unknown
  gut microbiota DNA sequence
tggtaatgccgggcgacaacatcaaaatggttgttaccctgatccacccgatcgcgatggacgacggtctgcgtttcgcaatccgtgaaggcggccgtaccgttggcgcgggcgttgtagctaaagttctgggctaattcgttagctttgaattaaaaagggcgcttcggcgccctttttgctgtctgtcattcagcgaaaaacggatttttgctggctattcatatcgtgcgttgcggcggataatgagcaaatggtctattgtaatcataaccattctcatttaatatttgtgcataaattgaacgggagtttctatgtacgtttgtttgtgcaatggcgtcagcgataaaaaaattcgtcaggttgtgcgccagtttcaaccgcaatcttttcagcaattacgtaagtttgttcccgtgggaaatcaatgcggtaagtgtgttcgtgccgcgcgtgaagtgatggaagatgaattaaccaccatgccggaattcaaagaaatcgcctgaagtccacgcttctcttttgacatccctataggccggactacgcttcaatgagtggaagcggagggactatataatgaaaggtgatgtcaaaatcataagttatctcaataaattattgggaaatgagctagtcgcaattaatcagtactttcttcatgcgagaatgtttaaaaattggggcctgatgcgcctcaacgatattgagtaccacgaatccatcgacgaaatgaagcacgccgataagtatatcgagcgtattctttttctcgaaggtatccctaatctgcaggatctcggcaaacttggcatcggtgaagatgtggaagagatgctgcggtccgatttgaggctggagctggaaggggcgcaaaatttgcgtgaggctattgcctatgccgacagcgtccatgactacgtcagccgcgatatgatgattgagatcctggcggatgaagaaggccatatcgactggctggaaaccgaactcgatttgattggcaaaatcggtctgcaaaattacctgcagtcgcagatcaaagtgtcagattagccagcgtctgccacccgcaccaaaaacccgcggccgccaggaatggcccaaacggcagcgggttgcttcttctccatttgctcctcccgccgcaactggcgtataaacctgctcctgcccacgctatgccggcgagtagcgaggcaaccaggaccaactgcggcagcaatcgccagccatgccaggcgccgagggcggcaagatattttatatctccataacccaacccttcatagccgcggataccgcggtatagccagtaaatcgcagccaaagagagatagcctgctatcgccccccagacggcatcatgcagctggtgcggcgccagacagagataaaaaagtaaaccactccacagcaggggacaggtgtaacggtcgggcaacagaccgtggcgcagatcctggtggcataatgccacggtcaaaccgctatagcacagcaagaaggggagggcggcgagcatagttgaccccgcaatgatcgatgaacattgcgtcactatgctcatcctctcccgttcagcacaaaaggcattttccgggaatggatcccacaatccgcgctcttactccgcattgcagccccgtacagcgcgctaacgcgaaggcgcgcaaatcctggtgatgattttctaaacagcacttgcgtcgcgccagaatttgcgtataatgcgcgggcctgtcaaagttgacggccggttcaatatgaaccctggtaatcgcatttgggttatcaaacaatgtccccaatcgggggactatgtaagaacggttacactctcccatcaatcgtaatgggtatgaggagtaatcatttcgtctataaaataattggagctctggtctcatgcagaaccaaagaatccgtatccgcctgaaagcgtttgatcatcgtctgatcgatcaatcaaccgcggaaatcgtcgagactgctaagcgcactggtgcgcaagtccgtggtccgatcccgctgccgacccgcaaagagcgctttaccgttctgatctccccgcacgtcaacaaagacgcgcgtgaccagtacgaaattcgcactcacaagcgtctggttgacatcgttgagccaactgaaaaaaccgttgatgctctgatgcgtctggatctggctgccggtgtagacgtgcagatcagcctgggttaatcaggtcatcgagcgattgagaggttgaaacaatgattggtttagtcggtaaaaaagtgggcatgacccgcatcttcactgaagatggcgtttctatcccagtaaccgtaatcgaagttgaagcaaaccgtgttactcaggttaaagacctggctaacgatggctaccgcgcaatccaggttaccaccggtgctaaaaaagctaaccgtgtaaccaagccggaagcgggtcacttcgctaaagctggcgttgaagctggccgtggtctgtgggaattccgtctggctgacggcgaagaattcaccgtaggtcagaacattagcgttgaactgtttgctgacgttaaaaaagttgacgtaaccggtacctctaaaggtaaaggttttgctggtaccgttaagcgctggaacttccgtacccaggacgctactcacggtaactccttgtcccaccgcgttccgggttctatcggtcagaaccagactccgggcaaagtgttcaaaggcaagaaaatggcaggtcagctgggtaatgagcgtgtaaccgttcagagcctggacgtagtacgtgttgacgctgagcgcaacctgctgctggttaaaggtgctgtcccgggtgcgaccggtagcgacctgatcgttaaaccagctgtgaaggcgtgaggagatagcaatggaattagtattgaaagacgcgcagagcgcgctgactgtttccgaaactaccttcggtcgtgatttcaacgaagcgctggttcaccaggttgttgttgcttatgcagccggtgcgcgtcagggcactcgtgctcagaagactcgtgctgaaatcactggctccggtaaaaaaccgtggcgccagaaaggtaccggccgtgcgcgttctggttctatcaagagcccgatctggcgttccggtggcgtgaccttcgctgctcgtccgcaggaccacagtcaaaaagttaacaagaagatgtaccgcggcgcgctgaaaagcattctgtccgaactggtacgtcaggatcgtctgatcgttgtcgagaagttctctgttgaagcgccgaaaactaagctgctggcacagaaactgaaagacatggctctggaagatgtgctgatcatcaccggtgagctggacgagaacctgttcctggccgcacgtaacctgcataaggttgacgtacgtgatgcgaacggtatcgacccggttagcctgatcgccttcgacaaagtcgtaatgactgctgatgctgttaagcaagttgaggagatgctggcatgattcgtgaagaacgtctgctgaaggtgctgcgcgcaccgcacgtttctgaaaaagcgtctactgcgatggaaaaaacaaacaccatcgttctcaaagttgctaaagacgcgaccaaagcagaaatcaaagctgctgtgcagaaactgtttgaagtcgaagtcgaagtcgttaacaccctggttgttaaagggaaagttaaacgtcacggacagcgtatcggtcgtcgtagcgactggaaaaaagcttacgtcaccctgaaagaaggccagaatctggacttcgttggcggcgctgagtaagtcggaggagtaatacaatggcagttgttaaatgtaaaccgacatctccgggtcgtcgccacgtcgttaaagtggttaacccagagctgcacaagggcaaaccttttgctccgttgctggaaaaaaacagcaaatccggtggtcgtaacaacaatggccgtatcaccacccgtcatatcggtggtggccacaagcaggcttaccgtattgttgacttcaaacgcaacaaagatggtatcccggcagttgttgaacgtcttgagtacgatccgaaccgctccgcgaacatcgcgctggttctgtacaaagacggcgagcgccgttacatcctggccccgaaaggcctgaaagctggcgaccagattcagtctggcgttgatgctgcaatcaaagcaggcaacaccctgccgatgcgcaatatcccggttggttctaccgttcataacgtagaaatgaaaccaggtaaaggcggtcagctggctcgttccgctggtacttacgttcagatcgttgctcgtgacggtgcttatgtcaccctgcgtctgcgttctggtgaaatgcgtaaagtcgaagcagactgccgcgcgactctgggcgaagttggcaatgctgagcatatgctgcgcgttctgggtaaagcaggtgctgcacgctggcgtggtgttcgtcctaccgttcgcggtactgcgatgaacccagtagaccacccacatggtggtggtgaaggtcgtaactttggtaagcacccggtatccccgtggggcctgcagaccaaaggtaagaagacccgcagcaacaagcgtactgataaattcatcgtacgtcgccgtagcaaataattttagaggataagccatgccacgttctctcaagaaaggtccttttattgacctgcacttgctgaagaaggtagagaaagcggtggaaagcggagacaagaagcccctgcgcacttggtcccgtcgttcaacgatctttcctaacatgatcggtttgaccatcgctgtccataatggtcgtcagcacgttccagtatttgtttccgacgaaatggtcggtcacaaactgggtgaattcgcaccgactcgtacttatcgcggccacgctgctgataaaaaagcgaagaagaaataaggtaggaggaagagatggaaactttagct

SEQ ID NO: 5392 - DNA, 6724 bp, Unknown
  gut microbiota DNA sequence
cttctgtcacatttatgcaaccattctgatttacacgctaccatttcttctctttctggtgttttgtcctgcgatttccctctggatgacatttcttcaggacggcgacgcaaacgttcatattgccgcgatagttttttttgatatgttgctgagacgaactttcgttcagcacgacatcagttaagacaaaacaggacggggaaatggctaaggtatcactggaaaaagacaagattaaatttctgctggttgaaggtgtgcatcaaaaggcaatcgatagccttcgcgcagcgggttacaccaacattgaatttcataaaggcgcgctggattcagaacagctgaaagcgtcgatccgtgatgcccatttcatcggcctgcgttcccgtacccatctgactgaagagattttcgccgcagcggaaaaactggttgccgtcggttgcttctgcatcgggaccaaccaggtcgatctgaacgccgctgcgaagcgcggtattccggtgtttaacgcgccgttctctaacacccgctcggtggccgagttggtgatcggcgaactgctgctgatgctgcgcggcgtgccggaagccaacgccaaagcgcaccgcggggtgtggaacaagcaggcggtcggcagcttcgaagcgcgtggtaaaaagctgggcatcatcggttacggccacatcggtacccagcttggcattctggcggaatcgctgggaatgcacgtcttcttctatgatattgaaaacaaactgccgctcggcaacgccactcaggtacagcatctctccgacctgctgaacatgagcgatgtggtcagcctgcacgtgccggaaaacgcctctaccaaaaatatgatgggcgcggaagaactggcgctgatgaagccgggcgcgctgctgatcaacgcctcccgcggtaccgtggtggacattccggcgctatgcgatgcgctggccagtaagcatctggccggggcggctatcgacgtcttcccgactgaacctgcgaccaacagcgaccccttcacttcgccgctgtgcgagtttgataacgtgatcctcacaccgcatatcggtggctccactcaggaagcgcaggagaacatcggtctggaagtagctggcaagctggcgaaatactctgacaacgggtcaaccctgtcggcagttaacttcccggaagtttctctaccgctgcacggcggccgccgtctgctgcatatccatgagaaccggccgggcgtcctgaccgcaatcaaccaaatcttcgccgcgcagagcatcaacattgccgcccagtatctgcaaacgtcgccgcagatgggctacgtggtgattgatattgaagcggaagaagatgttgcccagcaggcgctgcaggcaatgaaagcgatcccggggactatccgcgcccgtctgctgttctaatcatttttgcctctcgggcaggtcgcgtacctgcccgtttttttgttaatactttccaggctgaatttctcgtccccgcgtacctaccaacaccaggtttttcccggggtgatgaccgccggcagcgggatatcccactcttcgctcggcaggctatccacctgctggcagtcgtgcgcgtagcccaccggctgcaggcgatactgctgccagttttgcagcgtccggtcgtaaaaaccgccgcccattcccagccgttggccactgacatcgaaggccaccagcggggtcaccagcacatcgagttcagccagcggcagcacatcccgcacatcgagcttcggttcgcggatcttcaggcgattcacgatcagttggctctgcggatggtagtgtaaaaacagcagattgccggggctaaagggatgcagcaccgggagatatacccgcttgccggcgcgccagagctggtcgatcagcggctgggtgtccagctcgccgtcaaaggagagaaacagcgccacgttgtgggcgagaactaccggcggccaggccatcatccgctcggcggcctgttgggcaaacaggcgctgttgctccgggctgagtgcgcgtcgacgatcgcggatctgctggcgaatatgctgacgggagagcagggtatcgggctgtatagtcatgcaggtctcgttacgagctggcgaaacaataggagcaagtgtaatacagggcggcttcagccgaaaacacgtatgggggatgatgcgaagtaaagaagggaatctccgagatgccgccgcaggctgtaacccttgaacccttggttcaaggtgaatgtgtcgtcacggttttaaggcttctcggacgaaccgagcatgctcaccaaccgtggagcgccacattcttgtggtatgaaatatcggctcaggggactggcccgcttgcaaacatctcagagaaattttgttcttgcgattactctaacacagttaactgcaaagtgttattcaaacttcgaccctggcttttcgcttatgcgaccttgctcaagcaatgcttgttcgatggtctgctgaagcatgcgaatgcgctgctccatgctggaagcgtagtcgcgggtcttcgctttttcctgagtcaactcatagctgatgttcaacgccgcgatgaagaccagctgctcagtatttgtgactctagtgcgttcttttaaatcttgcaaccgctgattaaggtcttcagctgcctgattcagggcatccctttgttcaggcgggcaattcactcgcagtgaacggccgaaaatttggagatctacgggttgtgcagacatgccaccttcctgctgattgactgcgctgccttcacaccctggcccgggtctgcgaaggggcgacactatagctaccctggtgcgaagatacaagccctattctggttcaccagggtccaaagtggtagcataccatgaatattcctcccaacgatgacgaatgcgcatgtctatacagaacgaaatgcctggttacaacgatgtagaccagttactgaaccaacaaggggtaggtctcaccccggccgaaatgcacggtttgatcagcggattgctgtgcggcggcaacacggacagcagctggcagccgctggtgcacgacctgaccaacgaaggtctcgcctttggccatgaactggctcaggcgctgcgtaacatgcattccgccatcagcgattcactggatgacgacggtttcctctttcaactgtatctgccggaaggcgatgcggtgagcgtctttgaccgtgccgacgccctcgccggttgggtcaaccacttcctgcttggtcttggcgttagccagccgaagctggataaagtgaaggatgaaaccggggaagcgattgacgatctgcgtaatattgcccagctgggctacgatgaagacgaagatcaggaagagctggagatgtctctggaggagattatcgagtatgtccgcgttgccgcactgctgtgccacgacacctttgcccgtcagcagccaaccgcaccggaagtccgcaaaccgacattacactaactaaaattcgttcagggggcgtcatgactcagcaggaatttctatcgcgtcgccagacgctgttggcgcagatgcagccaggcagcgcggcgctgattttcgccgcaccggaagcggtgcgcagtgcagattcggaatatccctaccggcagaacagcgatttctggtacttcaccggctttaacgaaccggaagcgctgctggtgttgattaaaagcgatgaaacccacaaccatagcgtgctgttcaaccgggttcgcgatctgaccgctgagatctggtttggacgccgtctgggccaggaggccgcgccggcgaagcttggcgtcgaccgggcgctggcgttcagcgaaatcaaccagcagctgtatcagctgctcaacggtctggacgcgatctacttcgcccagggtgaatatgcctatgccgatgagattgtgttcaacgccctcgaaaaactgcgcaaaggctcgcgccagaatctgcaggcgccgaactcggttatcgactggcggcccattgtgcatgagatgcgcctgtttaaatccgcggaagagcttgccgtgatgcgccgcgccggggagatcaccgcgctggcccatacccgggcgatggaaaaatgccgccctggcatgttcgaatatcagctggaaggtgaaattctccatgaattcaaccgccacggggcacgtttcccctcctataacaccatcgttggcggcggcgaaaacggctgtattctgcactacaccgaaaacgaatctgaactgcgcgacggcgatttagtcctgattgacgccggctgcgagtatcgcggctatgccggggacattacccgcaccttcccggtaaacggtaaatttacccagccgcagcgcgagatctacgacattgtgctcgaatcgctggagaccgcgctgaaactctatcggccgggcacctcgatctgtcaggtcaaccaggaagtggtgcgcattatgattaccggcctggtgcggctggggatcctgaaaggcgagattgacgagcttatcgccaacaacgcccaccgcccgtactttatgcatggcctgagccactggctgggtctggatgtgcacgatgtcggtaattacgacaccgaccgttcgcgcgtcctggagccgggaatggtgctgaccgtcgagccgggactgtatatcgccaccgatgccgacgtgccggcgcagtatcgcggcatcggcatccgtattgaagatgacatcgtgattaccgaagacggtaacgaaaatctcactgccggcgtggtgaagaaggcggatgagatcgaggcgctgatggcggcggcgcgccagtcatgagcgtgctgatcgtcggcggcgggatgaccggggcgacgctcgcgctggccatctcccgtttgaccggcggcgcgctgccggtccacctcattgaagcgcaggatccgcattcttcacgccaccctggctttgacgaccgggcgatcgccctggctgcgggcacctgccagcagctggcgcgtatcggtatctggcaacgcctcgccgaacgcgcgacgcccatccagcgagtacacgtcagcgaccgcggtcatgccgggtttgtgaatctggcggccgcggattatggcctgtcggcgctgggccaggtggttgaactccacgatgtcggccagcggctgtttggtctgctgcgcgaggcgccgggcgtcacgctgcactgtccggcgaaagtggaagcggtcagtcgcagccaggagagcgtcagccttacgcttgagggcggcaaaatcattaacggtaagctgctggtggcggcggacggttcccgttcggcactgggcgcccgctgcggcatcagctggcagcagcagccgtatgagcagatagcgatcattgctaacgtcagcaccgcgttgccccacgaaggtcgcgccttcgagcgctttaccgagcatggcccgctggcgatgctgccgatgtcgcaagggcgctgctcgctggtgtggtgtcatccgcagtcgcgccgcgatgaggtgcagagctggtctgacgaacgcttttgtcaggagctgcagcaggcattcggctggcggctggggcgtattacccacgccgggaagcgcagcgtctatccgctggccctcaccaccgccagccgcgcggtgtcgcaccgcctggcgctggtcggcaacgcggcgcagacgctgcacccgatcgccgggcagggctttaatctcggcctgcgcgatgtgatgagcctggcggaattactcgctgacgcccatctcagcggcgaagatgtcggtcattatccgctgctgtgccgctatcaggcgcgcagggcaggggataaagccgccaccatcggcgtgaccgatgggctggtgcatctgtttgccaaccgttgggcgccgctggtggcggggcgcaacgtcggtctgatggcgatggaattatttaccccggcgcgcgatgcgctggcgcagcgtaccctcggttgggttccccgttaaggagtagaacgtgcaaagtgttgatgttgccattgttggcggtggaatggtggggctggcggtagcctgcggtctacagggtagcggcctgcgcgtcgcagtgctggagaaagcagagccgcgaccgctggccgccgatgcgccgccggcgctgcgcgtttcggcaattaatgccgccagcgaaaagctgctgacaaagctggacgtctggcgcgagatcgtcgcccagagggccagctgctatcacggtatggaagtgtgggataaagacagctttggccacattagcttcgatgaccagagcatgggctttagccaccttggctatattatcgaaaatgctgtagtgcatcatgcattgtggcagaaggcgcagcgttgcgctgacgttaccctgctggctccggcggaacttcagcaggtggcgtggggcgagaatgaagcctttctcagcctgcaggacggcagcatgctgaccgcgcggctggtgatcggcgccgatggtgccaattcatggctgcgcaataaagccgatattccgctgaccttctgggattaccatcatcatgcgctggtggcgaccatccgtaccgctgagccgcatcaggcggtggcccgccaggcgttccatggcgacgggatcctcgccttcctgccgctcagcgatccgcacctgtgctcgatcgtctggt

SEQ ID NO: 5393 - DNA, 1774 bp, Unknown
  gut microbiota DNA sequence
aacaggcgaacagccacagggcaatggtcaccgccggattaaggtgcgcgccggagacaccggccgtcaggtagatggccatggcgacgccaaggccccagataatactgatctcccactgaccaaagctggccccggcgacccgcagcgcagcgacgcagcccgcgccgaagaaaatgagcaatccggtgccaagaaactcggccacgcactgcccggttaaggtagaagtctggttcattatcggcatcctgaaatagcacgttaaagagagaggctggcgcgagcgcccgtttaattcgcctgaccggccagtagcagcccggtggcgaccgcattgcgcggcccttctgttccccgaatattgccctgcccggcgaccacgccatagtgcgacaaggcttccgtgataagctgcgggatctcaaagtccagcgatgagccgcccaccagcaccacaaaggcgatatcgcgaatggaaccgccgggtgagacctggcgcagcgcgcgcaggcagttggtgacaaacactttctctttcgcctgccggcgcacgagacgaattttttccagcgggctggcgttatcgatcggcaccagttcgccctccttgatgtacaccactttggcgaacaccgccgggctgagggcttcccgaaagaactccaccgcgccattctcgtgacgaatactgaacaggctttccactttggccagcgggtacttttttatcgcttccgccagcgaaagatcctcgagacccagctcggttttaatcaacaggctgaccatattccccgccccggcgagatggaccgccgttatctgcccctccgcgttgacgatcgccgcatccgtcgagccggcgccgagatcgaggatcgccagcggcgccgcacagccgggagtggttaacgccccggcgatggccatgttggcctccacgccgcccaccaccacctcggtctgcagtcgggcgctcagttcgcgggcgataacctgcatttgcagacggtccgctttcaccatcgccgccatcccgacggcattctccatggcgcactcgccggccatcccgccctgcaccttgcgcggaataaacgtatccaccgccagcagatcctggatgtatatcgcgctcatctcatggccggtcagggacgccattaccttgcgcacccgctcaagcatgccgccggcgtgagtgcccggttcgccgcggatgtcgcgtaccggagcgcaggcgctcatcgcctgcatgatggcttccgcgccctcggcgacatcggcctctccgcggcgcttttcgccgctaatgtagaggttgcccgccgggatcacccgcgactgcacgtccccctgcggggtcttgagcaccaccgctgaacggttgccaatcagggcgcgggcgatggggacgatggcctgggtctcttccgggcttagcccgaagaaggtggcgatcccgtagggattcgacaggatccgcaccacctggcccggcgcggccacttccaccgccgccatcaccccctcggggacctgctccagcagcgtcacttcatctaccaccggcagggttttacgcaggcggttgttcaccagcacgccgtcgtcctttttgaggatcgccgccaccacgttgatcccccggtcgagcgcctcattgagccaccacacggcgtcaaggaaatcgacggcgtcgtcaatcagtacgatccacccctcggcatattgcgccgccggcagcgtcgccagccgcccgagggcgata

SEQ ID NO: 5394 - DNA, 7258 bp, Unknown
  gut microbiota DNA sequence
cccggcgtctgcgggttatgaccgatcatggtcgattcggtgataatggtctcggtgatggtctccatcgccacatcgccaatcaccggcgcggcttcgttaagatagatgcgagagacatcgctcatcgaccacggtgttttcgccagggcctgctccagcgcggcgagggtcccggcgatattgtcccgcgtccctttcatgcccgtcgtcgcgacgatcccgctggcaacaaacgccctcgcctgcgggtcgtcggacgccagcgccacctcggtggtggcgttgccgatatcaatcccggctattaacggcatgctgacctccgcttagcttcctttacgcagcttatgccgctgctgatacacttccgccgactcccggacaaaggcggcattcactgtcgcatgccaggtgtgctccagctcgtcggcgatcgccagcagctccgcctgcgaggagcggaacgggcgcagcgcgttatagatagccagaatgcgctcgtcaggaatggcgataagctccgccgcgcggcggaaattgcgcgccaccgcatggcgctgcatctgctcggcaatctgcgcctggtactcaagggtctgacgggagatccgcacatcctgcgggcccacctcgccagagagcaccttctcgagggtaatatcggtcaatggtttgccggtaggcgtcaggatatgctccgggcagcgggtggctaacggataatcctgcacgcgcatggttttctcgctcatggtcactcccttactaagtcgacgtgcagggtgacgggctcggcgtcctgcaccacatgtttggtctctttgatatgaaatagcgcggctttggccataaatttcggccgcaccatctgatcgttcaccaccggcaccggcgaaggtgactctttgcgcgcatagcgcgcggcgtttttgccaatctgccggtaggtctccagcgtcagcagcggcgcctgggagaacagctccaggttgctgagcggcagcagatcgcgctgatggatgaccgtggtccccttcgactggataccgatgccgatccccgagccgctcaggttggccgcatcccaggccataaaggagacgtcggacgtgcgcagaatgcgcaccacccgggcgtgaagcccctcttcttccaccccggcaatcagctctttgaggatcgcgccatggggcatatcgatcagagtgtgatgctggtgtttatcgaaggcagggccgacgccgatcaccacttcatcggcgcgttcatcggcagaagctaccccgccctcgcgggttttcagggtaaaagagggctgaatttgggttgtctgttgcacaggaataccgccttattcaatggtgtcgggctgaaccacgcccggaatatttttgatctccgcccagcgttcggcagagatgcgatagccggtgcccggcccctgatagtcattgatgtcgttgaccgcactcaccacctcgaactgccgatcgagaatggccgaggtctgcaggtaatcgccggtgacccgctggcgcagcatattgagaatattgctggcgatatcctcaaagccgctgcggctcagcgcgccgacaatatcgaggccggtgatgttgcgcttcatcatctcttccaccgcactcagatcctccaccacgttacgcggcggcatctcgttgctgccgtgcgcgtaggtggcggcctccacctcctcgtcggcgattggcggcagccccagctcgcggaaaaccgcctggatcgcccgcgccgctttctggcgaatggcaatggtttccgcctcggtcaccggacgcaggccgccgtcaaccatcaggtcacgctgcaggatgttgtaatcatcaaaatcttccgcatcgaagttcgagccggcgaacatgttgtcgtagttcggcaccgcgctgtagccggagaaaataaagtcggtgcccggcagcatctgcatcagggtgcgcgcggtgcggcgaatatccgagtgggagaaagtctggtcgttggcggacgccacttcgaggtcgagcatagaggcgatcaggttttccgccagcaccgcccgaatgcccgacggcacagcgccggtcatgccgatacagctcaccgcgccgttttgcagcccctgaaccccggcgcctttggtaatgaagatgcagcgcgattcgaggtagagcatcgacttgctctccgaatagcccatcagcgcttcggatccggtgccggaggtgtagcgcattttcaacccgcgggaggcgtaggccgaagcgaggaacgcctttgaccacggagtatcatcgccgtcggtaaataccgcttccgtgccgtagaccgacaccgtctcggcgtagctggttaagccacgcatgcccagctccagctcggtggcctcttccaccgagcactgcgtcaacacgccgggacggccgcactgcgaaccgaccaacagcgccagggcgttaaacggcgcatagcgcgcgataccgaccgtggtctcctgttctgagaagccgcggatcccggcctcggcggcgtcagcggcaatctgcaccggattatctttgagattggtgacgtggcactggttggagggggtccggcgggcacgcatcttctgcagcgccatcatcatctccaccacgttcatctgcgccatcacctcgaccgctttggccggcgtgatggcggtagtgatggcaatgatctcctcccggctgacgtgaatatccaccagcatgcgggctatttccaccgcctccaggcgcattgcctgctctgtgcgctcaacgttgatcgcgtaatcggcgataaaccggtcgatcatgtcaaactggtcccggcgtttgccgtccagttcgacgatcagaccgttgtccacttttactgaagagaccgggtcaaaggggctgtccatggcgatcagcccctcttcaggccactcgccaatcagcccgtcctgattgacggggcgctgggccagtactgcaaatcgttttgatcttttcattgttcatcggctcaaaaggtgaaatccgcagacggtagcgaatacgccgggccagcgtcgttgccgcccggccattaccggcaatagcggaactttaaatgagccagtggtgaaaaaaataaatttaatttcgtttcaatttggcacacgaaatctaccgacagtttcactatgaaactttactccgccggcaaaaataaaaaatgtgatcgcccgcaatgatataaatcaattaataaaaaacgcccttaattacgttttgccgacgctattttaaccctattgactaaatcatggcgggcgacaaaataacgctgacaaaaataaagcaagccaaccgaatggtaatagttttttactatcgccccctactgactattcgcgccagcgttatcctggtgcgggagagaatgatgaacaagagccaacaagttcagacaatcaccctggctgccgcccagcaaatggcggcggcggtggaaaaaaaagccgctgagatcaacgtggcggtggtgttttccgtggttgaccacggaggcaacacgctgcttattcagcggatggacgaggccttcgtctccagctgcgatatttccctgaataaagcctggagcgcctgcagcctgaagcaaggtacccatgaaattacttcagcggtccagccaggacaatctctgtacggtctgcagctaaccaaccaacagcgaattattatttttggcggcggcctgccagttatttttaatgagcaggtaattggcgccgtcggcgttagcggcggtacggtcgagcaggatcaattattagcccagtgcgccctggattgtttttccgcattataacctgaagcgagaaggtatattatgagctatcgtatgtttgattatctggtgccaaacgttaacttttttggccccaacgccatttccgtagtcggcgaacgctgccagctgctgggggggaaaaaagccctgctggtcaccgacaaaggcctgcgggcaattaaagatggcgcggtggacaaaaccctgcattatctgcgggaggccgggatcgaggtggcgatctttgacggcgtcgagccgaacccgaaagacaccaacgtgcgcgacggcctcgccgtgtttcgccgcgaacagtgcgacatcatcgtcaccgtgggcggcggcagcccgcacgattgcggcaaaggcatcggcatcgccgccacccatgagggcgatctgtaccagtatgccggaatcgagaccctgaccaacccgctgccgcctatcgtcgcggtcaacaccaccgccggcaccgccagcgaggtcacccgccactgcgtcctgaccaacaccgaaaccaaagtgaagtttgtgatcgtcagctggcgcaacctgccgtcggtctctatcaacgatccgctgctgatgatcggtaaaccggccgccctgaccgcggcgaccgggatggatgccctgacccacgccgtagaggcctatatctccaaagacgctaacccggtgacggacgccgccgccatgcaggcgatccgcctcatcgcccgcaacctgcgccaggccgtggccctcggcagcaatctgcaggcgcgggaaaacatggcctatgcttctctgctggccgggatggctttcaataacgccaacctcggctacgtgcacgccatggcgcaccagctgggcggcctgtacgacatgccgcacggcgtggccaacgctgtcctgctgccgcatgtggcccgctacaacctgatcgccaacccggagaaattcgccgatattgctgaactgatgggcgaaaatatcaccggactgtccactctcgacgcggcggaaaaagccatcgccgctatcacgcgtctgtcgatggatatcggtattccgcagcatctgcgcgatctgggggtaaaagaggccgacttcccctacatggcggagatggctctgaaagacggcaatgcgttctcgaacccgcgtaaaggcaacgagcaggagattgccgcgattttccgccaggcattctgagtgttaacgagggggccgtcatgtcgctttcaccgccaggcgtacgcctgttttacgatccgcgcgggcaccatgccggcgccatcaatgagctgtgctgggggctggaggagcagggggtcccctgccagaccataacctatgacggaggcggtgacgccgctgcgctgggcgccctggcggccagaagctcgcccctgcgggtgggtatcgggctcagcgcgtccggcgagatagccctcactcatgcccagctgccggcggacgcgccgctggctaccggacacgtcaccgatagcgacgatcatctgcgtacgctcggcgccaacgccgggcagctggttaaagtcctgccgttaagtgagagaaactgaatgtatcgtatctatacccgcaccggggataaaggcaccaccgccctgtacggcggcagccgcatcgagaaagaccatattcgcgtcgaggcctacggcaccgtcgatgaactgatatcccagctgggcgtctgctacgccacgacccgcgacgccgggctgcgggaaagcctgcaccatattcagcagacgctgttcgtgctgggggctgaactggccagcgatgcgcggggcctgacccgcctgagccagacgatcggcgaagaggagatcaccgccctggagcggcttatcgaccgcaatatggccgagagcggcccgttaaaacagttcgtgatcccggggaggaatctcgcctctgcccagctgcacgtggcgcgcacccagtcccgtcggctcgaacgcctgctgacggccatggaccgcgcgcatccgctgcgcgacgcgctcaaacgctacagcaatcgcctgtcggatgccctgttctccatggcgcgaatcgaagagactaggcctgatgcttgcgcttgaactggctggcgtcaatatcgtactgcttcattttgcgccacagggtggtgcggccgatattgagcagctgcgacatctcctgcacccgcccgctggtcacccgggcggcgtgaataatagcttccttttcgatggcgctaaaggtcaggctggccggcagcagcgatgacgcgctatccccgcccggccgctcggaaaagagatattccggcagattactcaggcgaatgtggccgttgtcgctgctgatggcgatattctcaatgacgctattgagctcaaaatcattccccggccacgagtaggccaccagctgcgccagcgcgtcatcgtccactttcagtcgcgaagagaaacgcttctccaggctcttcaaccggttatgcaccagcgacggaatactgttgcgtcgggcgcgcagcggcgggatgacgatctcaaaggagtgcagcgcatagtacagctggcggctaaagcggttctgttccaccagattggccagatcgacggtggtggtggcaatcaccttcacatccaccgggatcaggcgccgggcgtcgaggcgggtgagcacgccctgcttaattacctgcagcagggccgactgcagctccggcgccagatactcgatcttttccagaaacagggtgccgccgttggccagctcaaggcggctcaggcgaccattttcatcgtcggtaggggcgctgcccataaagtcctggccaagcacgctgtcggcatatagctggcagttgacggcgatgtaggggccgcccgcccgttcgctttcattgtgaatagcctggctcagcagctctttcccgaccccctcttcgccgcacagtagcaccgggaagccgccgcgcgccgcctggcggccaaagtggatcaggcgtcgggtttccggatcgtcggcagacatctgctcaaaggtgtggctaactttaccgagctggctggtcatcagctgccgcatctgctccaccgggtgcagcagcagaataaaactgttgccttgcgcctcgacaatcggttttaaggtgatcaccgcgtcgacaaactgatgctgactttcaaaggtgacttcgacgtgattcaggccgcgggcgtgtttgatggcgcggcgcagcagcgccgggagggtcaccagatcggcgatatttttcccctggctggcctgagcatcaagatgcagcagtctcgccgcctgaacattgagaaactgcagcacgccctgttcgttccacgccatcaccccatcgtccatgctctccagcaggccgtacatctgattgaggtgg

SEQ ID NO: 5395 - DNA, 4043 bp, Unknown
  gut microbiota DNA sequence
acggtatataaaactgttactcctttcgtacccgttataaatatgatgatcatcagaaaatgttcaacgttgataagggtgcgcaatggccgttaaatcactgaaaaaaggatatctggcgctggcggcttccatgctgctggtggcgcaggcgcaggcgacggagctgctgaacagctcctatgatgtctcccgcgagctgtttgccgcccttaacccgccttttgagcagcagtgggcgaaagacaatggcggggacaagctgaccatcaagcagtcgcatgccggttcatccaagcaggcgctggctattttgcagggcctgaaggcggacgtggtcacctacaaccaggtgacggacgtgcagatcctgcatgacaaaggcaacctgatcccggccgactggcaaagccgtctgccgaacaacagctcaccgttctattcgacgatgggtttcctggtgcgtaaaggcaatccgaaaaacattcatgactggaacgacctggttcgctctgacgttaagctgatcttcccgaatccgaaaacctcgggtaacgcccgatacacctacctggcggcatggggcgcggcggataaagctgatggcggcgataaagctaaaaccgaacagtttatgactcagtttctcaagaacgtcgaagtctttgacaccggcgggcgcggagcgaccaccaccttcgccgagcgcggcctcggcgatgtgctgattagcttcgaatcggaagtgaacaatattcgcaagcagtatgaggcgcagggatttgaagtggttatcccgaaaaccaacattctggcggagttcccggtagcctgggtcgataaaaacgtcaaagccaatggcacggaaaaggcggcgaaagcctacctgaactggctctatacgccacaggcgcaaactatcattaccgactactactatcgggtaaacaacccgaaagtgatggatgctctgaaggataaattcccacagaccgagctgttccgcgtggaagataagtttggctcctggcctgaggtgatgaaaacccacttcgccagcggcggcgaactggacaaactgctggcggcggggcgtaagtaatgtttgctgtgtcgtccaagcgcgtgctgccgggttttaccctgagccttggcaccagcctgctgtttgtctgtctgattttgttattaccgctcagcgcgttggtgatgcagctggcgcagatgagttgggcgcagtactgggatgtgatcaccaacccgcaggtggtggctgcctataaggtgacgctgctgtcggcgtttgtggcctcgatttttaacggcgtctttggtctgctgatggcctggatcctgacccgctatcgttttccgggccgcacgctgctggatgccttaatggacctgccgtttgcgctgccgacggcggtagccggtctgaccctggcctcgctgttttcggtgaacggtatttacggggaatggctggcgaagttcgatattaaagtcacctatacctggctcggcatcgccgtggcgatggccttcaccagcatcccgtttgtggtacgcaccgtgcagccggtgctggaagagttggggcccgagtatgaggaagcggcggaaacgctgggcgctacgcgctggcagagtttccgcaaggtggtgctgccggagctgtcgccggcgctgctggcgggcattgctctgtcgtttacccgcagcctcggcgaattcggcgcggtgatttttatcgccggcaacatcgcgtggaagacggaagtgacgtcgctgatgatctttattcgtctgcaggagtttgactatccggcggcgagcgccatcgcctcggtgatcctggccgcctcactgctgctgctgttttccatcaataccctgcagagtcgctttggtcgacgcgtggtaggtcactaatggcggaagttactcaattgaaacgctacgacgcgccccgtatcaactggggaaaatggtttctgattggcgtcgggatgctggtctccgccttcatccttgtggtgccgatgctctacatctttatccaggccttcagcaaaggattgatgccggtgctggaaaacctggcgaacccggacatgctgcatgccatctggctgacggtgatgattgcattgattaccgtaccggtgaacctggtgttcggtaccttgctggcctggctggtgacacgttttacctttccggggcgccagctgctgctgacgttgctggatatcccgttcgccgtctcgccggtggtggccggtctggtgtatctgctgttttacggctctaacggtccgctgggcggctggcttgacgcgcataatctgcaaatcatgttcgcctggccaggcatggtgctggcgaccatctttgttacctgtccgtttgtggtgcgtgagctggtgccggtgatgatgagtcagggcagtcatgaagatgaggccgcggtgctgctgggcgcgtccggttggcagatgttccgccgggtgacgttgcccaatattcgctgggcgctgctgtacggcgtggtgctgaccaacgcccgcgccatcggcgaatttggcgcggtgtcggtggtttccggctcgatccgcggcgaaacgctgtcgctgccgctgcaaattgaactactggagcaggattacaacaccgtcggctcgtttaccgccgccgccctgctgacgttaatggctattctgaccctgtttttaaagagtatgttgcaatggcgtctggccaatcagaaagaacgcgcgcaacaggagggaaatcatgagcattgagattgccaatattaagaaatcgtttggtcgcacccaggtgctgaatgatatctcgttggatatcccttccggacaaatggttgcgctgctggggccctcgggctccggaaaaaccaccctgctgcgaattatcgccggtctggagcatcagaccagcggtcatatccgcttccacggtaccgacgtcagtcggatgcacgctcgcgaccgtaaagtgggcttcgttttccagcactatgcgctgttccgccatatgacggtgttcgataacatcgcctttggcctgaccgtgctgccgcgccgcgaacgccccaatgcggcggcgattaaagccaaggtgaccaaactgctggagatggtgcagctggcccatctggcggatcgctatccggcgcagctgtccggaggccagaagcagcgcgtggcgctggcgcgcgccctggcggtggagccgcaaattttgctgctggatgaacctttcggtgcgctggatgcgcaggtgcgtaaagagctgcgccgctggctgcgtcagctgcatgaagagctgaaattcaccagcgtgttcgtcacccacgatcaggaagaggcgatggaagttgccgaccgggtggtggtcatgagccagggcaacatcgaacaggccgatgccccggagcgcgtatggcgtgagccgtctacccgtttcgtgctggagtttatgggggaagtgaaccgcctgcagggggtcatccgcggtggacagttccacgtcggcgcccaccgctggccgttaggctataccccggcataccaggggccagtggacctgttcctgcgcccgtgggaagtggacatcagccggcggaccagcctggattcgccgctgccggtgcaggtcctggaggccagtccgaaagggcactacacccaattagtcgtccagcctctggggtggtatgacgaaccgctgagcgtggtgttaacgggcgacgaggcgccgtcccgcggcgaacggctgttcgtcgggctgcaaaacgcgcgtttgtacaacggtaccgagcgtatcgagccgcgcggcgagcttgctctggcggagtcggcctgatagcttaaatccatgtgcttttgccgggtgaggctctgcttacccggtctggaattatgacgcgtctgccaggccgggtaagcgaagcgccgcccggcttttttattgagtaaaaatcgtgaatacactcgaacaaaccatcggcaata

SEQ ID NO: 5396 - DNA, 3874 bp, Unknown
  gut microbiota DNA sequence
ggtcaaacttcagcgtctgggaccggacaacggcagcgaagtctgggtcaaactcgaaggcaataatccggccggctcggtgaaagatcgcgccgcgctgtcaatgatcgttgaagcggaaaagcgcggcgaaattcagcccggagacgtgctgatcgaagcgaccagcggcaacaccggtattgcgctggcgatgatcgccgcgctgaaaggctaccggatgaagctgctgatgcccgacaacatgagccaggagcgtcgggccgcgatgcgcgcttacggcgccgagcttatcctggtcagcaaagagcaagggatggagggtgcccgcgacctggctctggagatggcccagcgcggcgaaggcaaactgctcgatcagtttaacaacccggataacccctacgcccactacaccaccaccggcccggaaatctggcagcagaccgcggggcgtatcacccactttgtctccagtatggggaccactggcaccattaccggcgtgtcacgttttctgcgtgaacagagtaaaccggtgaccattgttggcctgcagccggaggaggggagcagtattcccgggatccgccgctggccggcagagtatatgccggggatctttaacgcttcgctggtggatacggtgctggatattcatcagcaggatgctgagaacaccatgcgtcagctggcggtgcgggaaggcattttctgcggcgtcagttcgggcggcgcggtagcgggcgcgttacgcatagcccgcgaaaatcctggcgcggtggtggtggcgattgtctgcgatcgcggcgatcgttacctttccaccggcgtcttcggcgaagaacactttagccagggggcgggcatttaatcatcaagcaggtcggtgccgtaggagttatcgacggtgcacagccagcgttcgccctgcttctgaaagacataggtggcgcgtcgcgtaacctgggatatcccgtccgccgtcgggatatccagccgggtctccataatcaccagcgcattgccgccgccttcaataacctccattttcccctgagtcaccaccagtcggtgctggaaatagtcggcaatggcgataaaggctttgcggatattctctttccctctgaccaccatgcccggtttgacgaccagcgcggcgtcttctgcgtaataactcatcagggtatcgtaatcttcctgcgagatagcgcgatcgcaggcttcaatgactgctttcagtgccaggtcagggtgacgcatctctggtgctccttgttgtgagcgatttgtccgcctcggcgatcagggcatgcaggtaagactagcctgctgtcgtttatttttcattaatttgtcggcagctgccatcactccccgatacgttcggtggactgcctgcgtcagggggcgtctaaggcctgcgcaatatcggccgccaggcgggaaatctcagcgtcactcagacggcccagcgacaggcgtagcccgtgggagggcgtacggatgccaaacacctctccctcccggaccagccagccggcgcgggccaggcgtaaggcgtagggctggctcgccgctggcagcggcagccagaaattgaggccatcccctggcgtagcatggctgaagccgtgccgggccagcgccgccgccagtttctcattctgctggcgatagtgacgacgagtctccgtcatcgaggcgataaacgcctcgtcggtcaggcaggccagcgtcaggtcctgcagcagatggctgacccactggctgccggcgttaagccgcaggcgcagcgccgctgaagtagcggcatcgctggcgataaaggccagccgcaggtctggtccgagggtttttgacatcgagcgcaccagcgcccagcgttgggtgcttgcaggaagaggggagtgccatggcgtggccgacagcagggcaaaatggtcatcaacaatcgccagtacctgcggatagcgggctagcacctcccgcagggcatgcgcccgggtttccgtcaggctacagccggtaggattatgcgcgcgcggggttaagatcaccgcccgtgcgccgttgcgtaacgcctcctccaggccgtcaggatccatcccttcggcatccaccgccaccgggcagggggtaaaaccggcgtaacgcaccatattgatgctgctgagaaaacagggatcttccaccacaacgccgtcgccggggagcagcagagcgcacagcaggcgctccagggcgtctatcgccccgctggcgagattcaccgcaaagggaacggctatctctctggcaaaccacgcctcggcccattggccaagccgcggctcgatgggcgcatcgccatacaggcggggcgtgcgggcaatctggcccagatagcggggtaaatcaggcagtctggccggatccggattgccgctggagatatcgttcagcggggtcgttgggtcacctccctccagcgccggcagtgtgtcccgcgctttaatggctgtaccgttgcgtccctgactgacggccagcccggaggtcaccagccgtttataggcggcggcgacagtgttgcgattcactgcaagctggctggcgagttcacgtaccggcggcagaacctctccgggctgcaacccgccgctctgcaccagatggcggatgttatcgaagatttcgctggcggtttttccggctaacattattgacctatgacaaaatggaatttagcataggacgaatcataatcagtgcgtgacccgctgtccagcggggggagaaaagatgggccagcaggatgatatacaatcagtgctctttcacgacaaaagccgggcgtcggaagtggatatcgtcgccgtgcagtcgcaggtagtctatggcagcgtcggcaacggcatcgcggttccggcgattaaacagcatggtctgcgcgtgctggcggtgccgacggtgctgttcagtaatacgccccattatgagacgttctatggcggcattattccggaagagtggtttgtcgggtatctgcaggcgctggaggagcgcgacgcgctgcgcgaactgcgtgcggtcaccaccggctatatgggcagcgcagtgcaaatcgaacgcctggcgcagtggctgacgcgcgtacgggcccgccatcccgggttgtgcattctggtggatccggtcatcggcgatgtcgacagcggcatctatgtcaaggctgagatcccggacgcctatcgtcagcacctgctgccgctggcgcaagggatcacccccaatctgttcgaactggagacgctgagcggccagcgctgtcgcgatcggcaggaggcggtcgccgcggcgcgaagcctgctgtcggacaccctcaaatgggtggtgatcaccagcgcgccgggagaggccgattcgacgatcaatgtgctggtggtgacggccgatgcagtggaagtggtggttcacccgcgggtggagacagacttaaaaggaaccggcgatctgttctgcgcggagctggtgagcgggttgctttccggactggcgctgggggcagcgacgcaggctgctgcccagcgcgtgctggaggtgatgaactggactgccgcccaggggtgtgacgaattgatcctaccgccgctggagcaaagcagatgaaaagctatcggttagtgatccgccagcagggacgcattgttggtcattttgatacgacaggtgaggcggcgctggaggatgcctgcgtggcgcggtcgctgttcggcctggccggtggatatcagtgcgaactgctggtcgctgacagcgagcggcgaattctggagagcaccccggagggattgcgcgtcttgtcccgcgagaagtgctatcgaccggt

SEQ ID NO: 5397 - DNA, 197 bp, Unknown
  gut microbiota DNA sequence
gtacagaaagccaaatccggccacccgggggccccgatgggtatggctgacattgccgaagtgctgtggcgtgatttcctgaaccataacccgaacaatccggcctgggctgaccgtgaccgttttgtgttgtcaaatggccatggttcgatgctgatttacagcctgctgcacctcactggctacgatctgccgat

SEQ ID NO: 5398 - DNA, 2634 bp, Unknown
  gut microbiota DNA sequence
aaaaacagcctgacgctgggctcgcatatcctgaaaaagatcaagccggtacataagctacacagccgcaataccgagcaggcggcgttcgtggtgctgaagtcaccatccataccgtctgtgctggtggaaacctcgtttatcaccaacccgaacgaggagaaactgctcggcaccaccgccttccggcagaaaatcgccaccgcgattgccaacggcattatcagctatttccactggttcgataaccagaaagcccattcgaagagacgttaatgaaacccgatgccgcgcaggtaaaaacttttctgctccagctccaggacaacctctgtcagcagctgagcgccgtggatggcgcgccgtttattgaagatgcctggcagcgggaaggcggtggcggcggacgcagccgggtgctgcgcgaaggccgggtgttcgagcaggcgggggtcaacttttcccacgtccatggcgacgccatgcctgcctccgccaccgcgcaccgcccggagctggccggacgcagttttgaagccatgggcgtctcgctggtggttcatccgctgaacccctacgtgcccaccagccatgccaacgtgcggttctttattgccgaaaagcctggcgccgacccggtgtggtggttcggcggcggctttgatttaaccccttactacggctttgaagaggatgccgtccactggcatcgtaccgcccgcgatctgtgtctgccgttcggcgaggaagtctatccgcgctataaaaaatggtgcgatgattacttctatctcaagcaccgccaggagcagcgcggcatcggcggtctgttctttgacgacctgaacaccccggattttgaccactgcttcgcctttatgcaggcggtcgggaacggctatgctgacgcctatttacctatcgtcgaacgccggaaagccacgccgtacggcgaacgcgagcgccactttcaactctaccgtcgcggccgctatgtcgagttcaatctggtctgggaccgcggcaccctgttcggcctgcagaccggcgggcgtacggagtcgattctgatgtcgatgccgccgctggtgcgctgggaatatgattatcagcccgagcccggcagccccgaggcggcgctgagcgagtttattcaggtgcgcgactggctgtaacggccggatggcggctggccacccggtagcggagtctcttccctcacacccactggcgcaggcgatggtgcagcgtcatcgacggtttctcagcaaacagctgctgatagtcggtggcgaactgccccaaatgccagaatccccactgcatggccgcctccttgaccgtctcgcgctctgaccaggggcttatcagctcccgacgcacagcgttcaggcggatccgtttgagccaggcgttaggaccaatccccagtatcgcatggaaggcgttctgcaaggtgcgacggctgacgtacagctgctggcacagatcgagaacggttaacggctccgcgctgttttccagcacatattcgcgcgcctgcgccagcaggcggcggtagctctggtggctgacgctctctgcacttaccatcggctgcgcttcttccagcatcgtgcccatcgccagcaacagattatcccgcaggaccttacgcacggccggctgatgaagggtatccggatgctcgctaaaggtggccagcgcctgctggacaaacccccacagcgcggccttatgcggctcgcggaccgccagcgctgactggttgcgtagcatatgtagcactcgctccgggtggtgcaggaaactggcgtgacgcgcaatcacctcctgcgaaatcactaccccgagaatggtgtaatcatccggcgtgctgagctcgaactccgtaccgccgggacgggtggcgatttctgcccggcccagacactgcgagccgataaacccctgttcaccccgggtcgccggaatgccaaaccagaaggagttcggccagaccaggcaggactggcgcagcgccagcccggtatattcgcggaagacctggatctcatcgagcaggatttcggtaaactcgccgcgaaactgccccggatgcagctgatcgtagatctgttgccaggcggtaatggtcagggcgtgctcatacacatcggttgtgtgtcgttgatgaatattgtcaatttcaacctgaggcgtcagcctggtgtcttccggcaacgcctcgcaacagagatggtgcaaatttgcagaacgacgctttttcataatcgttaaagccgggggcaagccgctcccggcacctccgacaggttatggatttttgagacgatagcggctactgcgttttcgtagcgtccctgcggaaaagagctgctccagcgcctggcgggccttatccagcggccaggcaaaatgcgcggcgacctcgccggccgtcatgccctgacgaactgaagccagcagcgtcagtaaggcttccgatgaagccgggtcagctggcggcatgggcgctggcggcggtggctgaaaaccgccgatcagccgctgggtatcctcttccgggcggccaatttcccgacggctgatcacgcagccggtccgccgggcagcggcggccccagcatccag

SEQ ID NO: 5399 - DNA, 845 bp, Unknown
  gut microbiota DNA sequence
ccttaatattcaggaacgcgcacggtttctcatggatccccagctgcgcccaggtccattgttcgaaaatctcctcgagcgtccccgccccgcccggcagggcaataaagccatccgccagcgccgccattttggttttccgctcgtgcatatcctcgaccacatgcagctccgtcaagccgcggtgggcaatttcccgctccaccaggccgcgcggcatcacgccgatcaccacgccaccggcctccagcgccgcatcggcgaccgcccccatcagaccaactttgccgccgccatagacaagcgccaacccctgctgcgccagcgtacgtccaaccagacgggcggtttcgaggtacagcggatgttcgccagctgaagaaccgcagaaaataccaatcgatttcatcttcgttatgactccttctcttctggtggccgataatttaacacatcggcaacccttccgcgcaggtttggactggctgaaaaataagacccgtgatgctcgctggcgaagaaatatccttgtggttcagtaaaatatatccggaatgagtaaaagttccgcaatcgcatgcaatgtgcaagaaaagtgacgtttacctcttgccacatcccctccctgccgctaatatgcgtccccgttgtcaccacaacattgcgttcgtagctcagttggttagagcaccaccttgacatggtgggggtcgttggttcgagtccaatcgaacgcaccataatgcgtttatagctcagttggttagagcaccaccttgacatggtgggggtcgttggttcgagtccaattaaacgcaccataatgcgtctgtagctcagttggt

SEQ ID NO: 5400 - DNA, 4969 bp, Unknown
  gut microbiota DNA sequence
taaactcacccagtacgcccgcttcgagccaggagcgcacattttgaaagccatcaagtccttagtttgatgcccatcggaattgtttactttacaataccagctacgaacagcctaactaaagccaggtgatcacgtgcattcaaacatgattgaataccttaatattttcgtacaggttgttgagcagggcagctttacaagggccgctgacattctgcagattcatcgtcccaccgtgagcaaagcgatacagcagatagaggacgacctcggcgtaaaactcatccatcgcactacccgtaagttgagcgttacggctgaaggggaggcgttttatcatcgtgccaggcttgtattgtctgaagttaatgacatgatggcgagcttttcacctacccttccacctcgggggcggctcaggattgatgtcccgctggcgctggctcacgccatactgatccctaatctcaaacatttccagtcactgtatcctgacattgatgtcatattggtttcatcggacaaaaaaaccgatctcattagtgaaggtgtggactgtcttgtccgcctgggtgagcttcaggattcgagttttatttccagacgtcttggtgacatcaggatggtcacctgtgcagccccgtcttacttgcaacaatatggacgaccggaaacacttgcggatctggatcagcatcgggcaataaactttttcagcgaccacagtcgtgatgtgatggaatggaaatttactaaggacgggaagattgtttcgttgcgtcccgtaggcagcatgctggttgataattcagatattctgctctcctgtggactggcgggcctcggcataatccaggccacctttaacgcccttgctccacatattgcttccggcgctcttgaagagattctgacgcaatacccttctgtgtctaagcctgtgtcggtgctgtatccggacaggcactacctttcgcccaaagtacgggtctttatcgactggttcagtgaagttctgaccatgcagaaccgctgaaaccaatggattgttaacagataattaatactgaagttccctgtcagctatttttggtacgtttatagcagcgtagatcgtcagtaaataaaccgggcatgtcttcaacaatattcgaaagatgtgctgataactgacgagagctgaatatgtctaaagttgttacctttaaccgcaccggtggtccggaagttttggaaattgtcgatatggaggtgcccgcaccagcagcgggtgaagttcagattcgcgtgcaggctatcggtcttaatcgtgcagaaatcatgtaccgcaacggccaatatgttattgagccggaatttccggcacgtcttggttatgaagcggctggcgttgtgcaggccgtaggtgagaatgttgaggcgtttaccactggcgatctggtcagcgtaatcccttcgtttatgtttaatgaatacggcatgtacggcgaactggtcaatgcacctgtgcacgctgttgtgaagcatcctgaaaatctttcctttgaggaagccgctgcaagttggatgatgtatgtcactgcatatggcgcgctggttgaatatggcaaccttcaggctgggcagaatgttgtgatccgcgcagcatcaagcagcgtaggactggctgccatacagattgctaacatgctgggtgctaaacccattgcgcttacccgaactgccgaaaaaagagacatgcttcttaaagcgggtgccgccactgttatcgctagcgctgagcaggatatggttgcggaaatcaatcatgcgacagatggcatgggcgcccatattgtttttgatcctgtcggtgggccggacgtggcaaaactgacccaggtgatggcaccgcaagggatgttcttccagtacggcgcgctagacagccgcgaccttcttgtgcctgtctttgatattctcggtaagcatctcacgctgcgtggatatgagctgtttgaaattacgacggaccctgaaaaaatggcacgcgcaaaatccttcgtcaccgaagggttacgttccggcaaactgaaacctgtcattgataaaacatttccgcttgaggatattgcggatgcacagcgctatatggaagcaaatggacaggttggcaaagtcgttgtagtggttgagtaaacctcaaacccactaaccgttcacccagatgagctggtatgaaaggtgaagcggagggccatacgctgcagatcaggattcagcggtgcagacttttctgacctaaagggaagggggcggcacactctgcttcagtgggggtagctaatcacctcaaattgttagatacaaggggtgggggtgccgatgcgggtgacaagggtatctctgccgcagccataaaatcgataaaacagcgtattcttggtgacaggtagcggctggcgggccacaggaccgagaaatgcccatccttgacgcaacagccgggcaacacctcctgcagttgtccctcatccattgcctcgcgcacgacaaaatcaggcacataagcgatgcccatccccgccgcgcttaagcgaatggcggcctcaatgttattgaccgtcatcacggcagcggccctgaaatctcccgtcagtcgcataccgcgcagttcccagggctggatcagccccgtcgcggggaagcggaaaaaaatgcacttgtgtgccgccaattccgctggtgagccgggggcgccgtattccgccagataggccgggctggcgcagagcacaaaacgaaaaccccccagcgttctggcgatcaagcgggagtccgctaattcaccgctgcggatagcgacatcaactccctcatcgatcatattgaccagccggtcgctaaagtcgagatccagttcaacctgcggataaagacggctaaaggcggtgagggcggggagcaacaggcggtagccaatgacgggcagtgaaatcctcagtttgccggtgggctgtgagagactgctggtcagctctgactcggcctcctggatctgctccaggatactctgacagcgggtcagaaatgcggccccctccgccgtcaggctgacgtttctggtgctgcggttgaacagccggacccccagtttatgctcaagccgggcgacattcttacccaccgccgaggcagatatgcccagcagcctggcggcctgaacaaagcttagcgtttcggcggtgcggacaaaggacgtcagcgaggtgaggctgtccatcgattataaaccttatgtctcttaagaagatattttcagtctatttatcggcaataacatccgcaatagcatggcgacagtttattctttcttgccgactgatgagggccgcccgatgttactccccgccagaacaccttcccgatacgccagcgccctggccgcgctttctgtctttatggcggccttgctgctgccgttaagttttaccggcggcgtcatgaccacccccgcgatacagcagtcgctgggcggctctcccgctgcgctgtcgtggctgaccaatggctttatgctgactttcggcagctttttgctggccgcaggggtgacggcggatgccatcgacagaaaacgtatttttatcgccggcgccgcgctgttttgcctgagcagcctgctgttttgtctgacgcacaatctcttcctgtcaggcgtgttgagggcgctgcagggcctggccgcggcgatgattttagccagcggcagtgcggcgctggcccagctgtatgatggcgcccagcggacgcgggcattcagcatcctcggcacggtgttcggcattggcctggcgttcggtccgctgctgatcggcttcatgatcgacgcggtgggttggcgcggcgtatacgccctgtttgcgctgctctcggcaggggttctgcttataggcctggtatctctgcctgcgacagaaaaaagcgagccgcggacacccgacaacctgggcttaaccttgtttacgctggccctgatgctgtttactgcatcgcttatggtcattccggcccgcggttttttatccctgaccacgctggccttgctcatcgcgtctggggggctgttcgtggcctttgtcgtacgctgccggagggtgaacaacccggtgctggaactctccctgctgcgtcatccgcgttttgtcggcgtactgttgttgcctgtcgccacctgctgttgctacgtggtcctgctgattattgttccactgcattttatgggcggagaggggatgagtgagtcgcagagcgcactgtatctgatggcgctaaccacgccgatgctggttttcccatccgttgcggccctgctcacccgctggttttcaccggggcaggtgtccacggcgggactgatgatggcctccgtcgggttgttgttgctgggcgatgcttttcacagtaaccacctcccgcaactggtgctggcgctgatcctctgtggggcgggggcggcgcttccctggggactgatggatggcctggcgatatccgctgtgccggtcgccaaagccggtatggcggcaggcctgttcaacaccgtacgcgttgccggcgaggggatcgccctggcggtcgtctccgcggtattaacggcaagcaataccctgaccctgcagagtcgcgttcacgggtatgcccccgaggtgattcaccgcgccgcaggctggctgggggccggcaatatgccgcaggcggctgcgcttttgcctgatttttccctccgggtgctgcgcgagagctatgactctgcttatacgctactgtttagcgggctggcggtcgtcaccctgctgtgcgccctgatgatctggctgacgttatgccggaaggggggcgctatccaaacccgcaacagtggatcctgaacccccttgatagccttacatctgggcgtatctatcgccacgatcggaacccacct

SEQ ID NO: 5401 - DNA, 25895 bp, Unknown
  gut microbiota DNA sequence
gttaacagcagcgaagcaatcactattatcgtacgcatagcgcttccagaaaaaagccccgtcgaggcggggctgatagtcagagaatacggctgatcagccggtcaatgcggatccgccgcagacggcggatcagttttcgcactttcaccggatagtcggcgatactttgcagatcccgataatgtttcactaccgtggtgtgggtgcggatgagcttcagctctttctcccgcatggcccccagctgccgctttggatcgtggatcagaatggcgttttccagatcgagccgccaggcgcgcgggttcaggttgttgccagtgagcagcatccactcatcgtcaacccacatgcctttcaggtggtagctgttatcgtcatccttccacaggcggacgatcagctgatcggtattgacataatactgcagccggctgaggaaacgccgcaggttgatctcatacagatagggaagggcgccgatgattttaaacggctgatcttcaggaatgtagaaatcgttagccgttttatcgccgacaataatctccacctgttttccatcgcgcagcagctggatgatatttcttaccagtacggcagggaggttgaagtagggggtgcagatcgtcagcttgtgttcggcacagggcatcaggtgaaagatggttttattcagcaggctcgatttacccaggcctaccagcggggtgacggagagttcttcgtcaccagcggtgccgacaaaatggtagctgcggtcgcggagctcctgacggtactggcgaatgtcgtttttgatttccgggcttcttggccgatccggtctgtcgagacggttaacgccgcgcccctgaaccagattgttgtcgacccagtcgaacatgatgtccgccattttgccgttacggatgcactgatagcgatcatagcgatacttatcatgctgatgcagataaacatcattcaggctggcgccgctgtagaggacgcagtcatcaataataaagcctttgaaatggagaacgccgagcgcctcccgggtgttaatcggcacgccgtaaacggggatatctacccctggattttcattggccatccgacaataccagtcggcattggtattagaggcggcggcgccgatacggccacgctgagcgcggtgccagtccaccagaacgcggacatccagttccggacgctggcgtttggcgtcataaagggcctgcaaaattccttttccgccatcatcttgctccagatagagcgcaataatgcatatacgctgagtggcgtgggcaatccgggtcagtaacgcttccctgaattccgcaggggcgtaaaagaactctacatcatcaactgactgagaaagcttagggagttgggcaaggtgttgttgatgtttattacgcttaaattttgacaacatcacagtgcgtttcttctctgtttattgaagggtcttctgtaccatgcagacgacgtaagcgggcaataataccattactacccgctaatgtggtcaacaattgcggtcagcgtcgcgcgattatccctgattcaggggcagcgacaggctgacaatcccatcttccagctgaatatcgacggtgaatcccagctttctggcgaggcctatcatgcctcggttatttggcatcgtaataccattaaggcgctgcaggccatggctttgcgtataggcgatcagcttttccagcaaccttcgccccaggcctaacccttttaaatctgaacggaccagaacggcaaactcggcgtcaatattatcgggatcggagatcgcccgcgtcacgccgaggatctcgctcttctctgcgctggtcctgacggcaacgaacgccatttctcgatcgtagtcgatctgggtcatattggctaagtcgtcatgggtaaattcgttgatctcactaaaatagcgataatagagatcttctttggtgacctgggcgataaatgcgagcaactgtggctcatcttccgggaggatcggccggaacagacagcgatcgccatttttcatcaccacccactcctccagttggtgcggatagggacgaatagcgagacggctttcactgtcgccgctgaagggagcaagccccagggtaacgtccagcgccgtaaactcgttgccggaggcgagcaggggatgaatatccaggcgctggatctccgggcagtcgacgatcaggttcgagacctgaaccagcagctggcttaagccagcgatatccagcgggcgcaaggcgctgcggccgcggatcttcttatttttgatcgcctggatcaccagataacgcgccaggttcatattcagcggcggcagcgccacggcggcctggtcctcggcccgccactccacgccgccctcgcccagcataatcaacgggccgaagacgggatcgtgctcaaccactactcttagctcctgggcgccagcgcgattggccatgctttgcaccagcaatccatgaatgcgcgcctggggccaggccagtttgacgcgatcgatcatcgcatctgcagcctgctgcacctcggcggcggtacgcaaatagagcatgaccccctgtacttctgatttgtgcgggatatccggagaacgcagcttcagcgcaaccggatagcctatctgctcagcgatatgcaccgcttccgcgctgtcagcggcaatccaggttggcagcgtgtggatgccataggcccgaagcaccgggctgacctcgtgagtatccagcgtggtggcgccgtcatctatcgcttgctgcagcagagcatgcgcctcgctggtattggcggttaaggagtctggtagcaccggcgtctcgcgcagttgtttctggttgcgacggtattccaccatatgcataaaagcggtgatcgtgccctccggcgtacggtaggtagggaggccggcatcgctgaataaacgtcgcgcttcctgcgaggaaaattcgccgcaccagttggtcagcacggtgacatatttaccgcgcgggtgatgcttcagagcgtcaatcagggccagggcactctcggtgcccggcgcggcggcgctgggagagtggatcaccagcagcgcgtcataatcctgactgttgagcaaaacattcaccgcccgctgatagtgttcgctactggcgtcatcgcgtagatccagcgggttggcgatctccacgccaaccggcaacgcctgacgcagggcgtcgcgcgtctcctcgctgagagtcgccagcttaccgtttcgcaaccaaagctcatccagcgccagcgccgccggcgccgcaccgttgctgacgatcatcagtttttcaccgcgcagcgggcgcatgtggctgagcgtttccaccgcagagaacagctcatgggtatcctgcacccgcagcagaccagcgcgctgaatggccgcatcccatgccgggtccatcccggaattggcgtgcaatagcttctgcgccgccggactacggccgcttttaatcaccaggataggtttgtttcgcgaagcgctgcgcgcggcggagacaaagcggcgcgcgtcgctgagatgctcgaggtacagcaaaatggcgctggtcttgctgtcgcgggccagaaagtccagcaggtcatcgacatcaatatccaggctatcgcccagggcgatgaagtaggaaaaacccatctcgcgctgttgcgcccagtcaaggatagtattggagacggcggccgactgcgagataaaggccagtttaccgcgatggatcggcaccggtgaaaagctggcgttcagcccttgccatggggccagcagtccgagactgttggggccgagcagacgcatctgatagcgcgcggcgcattcgagcagcgccgggtactgttccggctgcgaagagaggatgatgcaggtcttgcagcctttttgccctaaggcttcgagcaattcgagattacgcctggcgttagtacagagcaccgccagatccggggtaaacggcaggctctcgatggtaggccatgccagtaccccaagaaccgccttccaggcgggggtgaccggcatcaccgggccattgaagccgccggctaacaggttgcgcatcatgagatagccagcgcgctgcggcttcattgatgcgccaataacggcgatggactttggtcgcagcagcgcttccaggcctcgttggctcataccggtctcctttcatcccagtgaccgaatgattttaaacgttttccacctggcccgctgtgatactgcccttatgctgggtttttcccgccagatagcgggtccggaagcgggtgaagtgctcgccaagcgcagcggcggccggggcatcgcccgccagatccagcagggcgatggccacttccgcggtacaatattgtccgtcggcgtgcgcctcgcgcagatggtaggcagagatgcgcgacagatcgacggagataatcggcagcgcgtcgagataaggactcttacggaacattttgcgcgcttcggtccaggtgccgtcgagcatgataaacagcggcggtttaccggacggcggcgcgctcaggacctggcgatccggcccggcataggaggccggaaatacgaccatgggctgataatcaggatgggcgaccagatcgagcagcgcctgcggcggttcggtacgcgaccactgaaacgcttcggtatctggcagaatatcggcgatgagccggccagtgttgctgggcttcatcggttccgtatcaaacatcaccaggcagaagcggctggcggcctgcgctgaggttaacgtggcgcacaggcactgcttgagcggcagcagacagcgctggcagcggcggatgcgattgccgcgcgcaaggaaagggcgggtagctcgcgcgagacgttcggcgcgcaggcgaaggacagcgttatcagtcatgggagtcgctagtgaaaaacgctattgtcgcagaggtgaaaacggggcacaagcggtgccccggaagggttattgttggccggcttcgttaagccagctatcgaatggcgcttttggcactgcgccattgagcatgtcgatcacttcgccatttttgaacatcataatggtcgggatgctgcggatacgaaaccgggcgctaagctcacgttccgcttcggtgttgactttcacaaaacgcatcttcccgctacgctcttccgcgacgtcttcaaagatcggcgcgaagctacggcagggtccgcaccatggcgcccagaaatcgacaacgaccggcagatcgtccttcaagagtttatccagcgttgccccggtcgcgttgatgacgtcgccgtcaaaaagatcgtgaccgcagcgtccgcactttgcgccatccgcgctacgatcgtccgggaggcggttcagagcctgacaactggcacaaacggtattcataactaacctctggttatgggttgcaacgtggcacgtggccgatatgtttctgtgatgttacatattatcgatgaagtgttatttgaggacaatgcgttttgttcgatgagtgcaatagaggccggcttttaaacgaaatcatggcgaagcgatggcacatcgggtaatctgcgcgcttcgcgcagcgcaggtggagaaaattgatgagcgacgaactgaaaaataaaagcggcaaggtcaaagtgatgtatgtccgcagtgatgatgattctgacaaacgcacccataacccacgtaccgggaaagggggaggtcgtccaggaaaatctcgtgttgacggccgcagccgccctgcgcgtgacgaacgaaacagccgcggcgacgatcgcaaacgtgacgaccgtaagcgtgacgatcgcaaacgcgatgattttcatcgcgacgatgcgtctccgtggcgtaccgtttcccgcgctcctggcgatgagacgccggtaaaagaagatcacggcgggatcagcgggaagagctttatcgatccggaagtgctgcgtcgtcagcgtgcggaagagacccgcgtatatggcgaaaacgcctgccaggcgctgttccagagccgtccggaagctatcgttcgcgcctggtttattcagagcgtgacgccgcgctttaaagaggcgctgcgctggatggcggccaaccgtaaggcctatcacgtggtggacgaagccgagctggcgaaagcctccggcaccgagcaccacggcggcgtctgcttcctgatcaaaaaacgccacggcacttctgttgctcaatgggtcgcgaaggccggggaagaagattgcgttctggcgctggaagatgtgggtaacccacataatctcggggcgatcatgcgcagctgcgcgcactttggcgtgaagggcgtggtggttcaggatgccggcgtgctggagtccggggcggcgatccgtacggcggagggcggtgcggagcatgttgaaccgatcaccggcgacagctttatcgataccctcgatcagttccgcaaagcgggctacgcgattgtctcaacgtccagccataatggtaccccgctgtttaaagccgagctgccgaagaaaatggtgctggcgttaggccaggaacgtgatggtctgtccgatgcggcgatttccagcgccgatctcagcgttgccatcgacggtaccggcaacgttgaaagcctgaacgtctctgtggcgaccggcgtcctgctggcggaatggtggcgtcagaacaaggcgtgattcgcctgcctgaatgcaaaaaagccagctgatgctggctttttttatggctgtcaatcactcgctttcagcgggaaggaccggcatccagtcgatcggcgtttcgccgcggtcaaccagccactggttggtctgtacgaaatggttgcagccaaagaagccgcgatgcgcagagagcggtgatggatgcggcgccttcagcacgcagtggcgctgacgatcgataatcgcgcctttcttctgcgcatgggagccccacagcagaaaaactactccctcgcaatgctcattgattaaagcgataaccttatcggtaaaggtctcccagcccagactggcgtgcgagtgcgcctgtccggcgcggacggtcaggaccgtattcagcagcagcacgccctgtcgtgcccagctttcgagataaccgtgggtggggcgggtaaagccggggatcgtggcctccagctctttatacatattcagcaacgaaggcgggatcgcgacgcccggacgaactgagaacgccagaccatgggcctgacccgggccgtgataggggtcctggccgagaatgacgactttgacatcgcccagttcagtaaagcgaaacgcattgaagacgtctttttgcggtggatagatggtgatccccgactggcgctcttcggcgacggtcttcagagtattgagaaaatagggttgttgcttttcatccgccagcacgtcatgccaggttaaaggggtggtcatcttgctctcctgcaaaagggtcatcgctatagcttaacggcttctttctatagaacaaaatcggcacggcctgatgccggcttttatgcaaaaaaaaattgaaaatttacaaaattatttatagctcacaatggcgtaacttgatgtaaaacaataaaaacctcctatacccacgttgggtgagtggtttttattgatttatatcaaggaatgccgagggtgcggctgatatatatacactcatacaacaatggttttaccaattggccgcgaagaggccaaaatcgaataaacactgcctgggaggcatcaaatgattactggtatccaaattactaaagcggcaaacgacgacctgctcaactctttctggctgctggatagcgaaaaaggcgaagcgcgctgcctgtgcgccaaaggtggttttgcggaagatgatgtggttgcggtaagcaaactgggtgaaatcgaatatcgtgaaatcccggtggacgtgaaaccggaagtgcgcgtcgaaggcggtcagcacctgaacgttaacgtgctgcgtcgcgaaaccctgctggacgcggttgagcatccggaaaaatatccgcagctgaccattcgtgtttccggctacgcggtacgcttcaactctctgacgccggaacagcagcgcgacgttatcgcccgtacctttaccgaaagcctgtaaggctaacgccagatgtgaaaacgccgggatatcccggcgttttttttactcatcgctggacgctgatggcgtcccggccgcgcttggcttccggcgcttaccgatatttttcgtatcgcggtggcgcttcttcacccgcggtttctctttttcatcttttttcttctgcgcacgcttcgccagcactttcttcgatggcttacccgtcagcttctcgctcggcgcacgggtcgtcgggcgcagttcatcgataactctggctttcaacggctcttcaatatagcgaccaatcttacccagcagcaggtggtcatgagcctcgaccagagaaatggcggtcccttttttaccggcgcggccggtacgaccgatacggtgcaggtaggtatccgcggtacgcggcatatcgaagttaaagacgtggctgacgtccggaatatcgataccgcgggcagcgacgtcggtggcgatcagcacgttgacgcggccgtcggtcaggcgcttgatagcttcgtttcgcttggcctgcaccatctcgccttccagccagcaggtgttaatcccggcctcacgcagccagttagccagctcatgcacgcgctcgcgcttacgcacaaacacgatagcgcgggtggcttccggctgttgcaacagattcaccagcagtttggttttatgttcgatatcgtcggcgcggtagtaccactgatggattttcttacgctcgcgggttgacggattggcggaaacttcaaccggctcctccagcagacgctcagcgaagtctttgatcgcatcgccttccagcgtcgcggagaacagcatagtctgcttgcgccagcgagtttcaccggcgatggtttcgatatcctgggcaaaacccatatccagcatgcggtcggcttcatcgaggattagggtctcgacggcgcggcagtcgaaattctcttctttaatatattgcagcaggcgaccggtggtggcgactacgatgtcctggttttcgctgaacacttccgcgtggttcatgtacgccacgccgccggtaatggtggcgatgtccagatgggtatgcttcgccagctcgcgggcgtggtcggccacctgcatcgccagctcacgggtcggcgtcaggataagaatgcgcggcgggccggatttcttacgcgggaaatcgagcaggtgctgcaacgctggcagcagatacgccgccgttttaccggtgccggtcggcgctgaaccgagaatgtcacggccatcgagcgcaggcggaatagcggcggcctgaatggctgtcgggcgagtgaaacctttatcctggagggcttccagcaggttttcgtcgagttcaagttcggaaaaagtcgttacagtcatgttctacctctgagtgggccgccgattatagacgttactgacgtaatgttcatctgtttgtaaggctatctgttctccggtattgtgcatagccttaggttcaggagtttttgtcggcaaggttattgaggatgtctcagtcgaagtttgcgctgccgcgcaatggttttaccttcaaacggttctttgtcgctcacgatcgctgcgccatgaaggtgggtaccgacggcattttgctgggcgcctgggcgccgattgccggagtgaagcatgtgctggatattggcgcgggcagcggcttgctggcgctgatgctcgcgcagcgtaccggagatgatgtgcatgtcgaggcggtagaactggacgaagaggccgccgctcaggcgcgggaaaacgccctcgcgtcgccgtgggcttcgcggattgaggtctggcaggccgatattcatcagtggcagccgtcgcaaactcgacgctatgaactgataatcagtaatccgcccttttttgccgaaggcgtgccatgcgcgacctcgcagcgagagcaggcgcggtacaccactacgctcgatcacgcctccctgctgacctgtgccgcagagcatattaccgaagaaggttttttttgcgtggtgttgccggtggatattggtaatgcgttcatcgaacgggcaagggcgatgggctggcatctgcgactgcgtactgacgtggcggagaccgagctgcgaccgccgcatcgggtgctgctggctttctccccgacggcaggggagtgtttcagcgacaggctggcgatccgcgggccagagcagcaatattcggaaggctttaccgctctgaccgaggacttttatctctttatgtgagccaggggcgagagtatcgacgggccgctgtcaggcagcggctgcggatagtcgagggtataatgcagaccgcggctctccttacgcaacatcgcgcagcgtacgataagctccgccacctgcaccagattgcgcagttccagcaaattattcgagacgcggaagcgggcgtaatactcatccagctcctgctggagcatggtaatgcgccgcagggcgcgctccagcctgcgggtggtgcgcacaatccccacgtaatcccacatcagcaggcgcagttcgtgccagttgtgctggataaccaccagttcatccgggatctccacctgactttcatcccatgctggcagcgtggcgaccttctgggcgagcggcaggcgccgggtaatatcctccgcggcggaccagccatagaccaggcactccagcaacgagttcgacgccatacgattcgcgccgtgcagcccggtgtagctgacttcgccgatggcgtataaaccatcgacgtcggtgcggccattatcatccaccatcacgccgccgcaggtgtaatgcgcggcggggacgaccggcaccggctctttggttaaatcaattcccaggccgagcagcttttcataaatcatcgggaaatgctggcgaacaaacgcctcgggtttatggctgatatcaaggaacatacagtctacgcccaggcgcttcatttcatggtcgatggcgcgggcgacgatatcgcgcggggccagctcgccgcgctcgtcaaagtccggcataaagcgggtgccatccgggcgtttaaggtgggcgccttcgccgcgcagcgcttcagtaagcaggaaattacgcgcctgggggtgatatagcgcggtggggtggaactggttaaactccagattcgccacccgacatcccgcccgccaggccatcgcaatcccgtctccggaagagacgtcggggttagtggtatattggtaaaccttcgcggccccgccggtagcgagtactacggctttcgcgctgcaggtttccacccgctctttattacgattccagatccatgccccgaccacccggcgcgtgcctggcaagccaatcttatccgatacgatcaagtcgacggcattgctgcgctcaaggatgcggatattggggtgggcgagggctttatcgaccagcgtcgtctccaccgctttgccggtagcgtcggcggcgtggagaatgcgccgatggctgtggcccccttcgcgcgtgagatgatagctctcttcgccattggcctggacctgagtgtcaaacaatacgccctgatcgataagccactggacgcatgatctggcattgctggcgacgaaggtgaccgcatggcgatcgcataaccctgcgccggcaatcagggtatcttcgacatgggattcaatactgtccgtctcgtcgaaaacggcggcaatcccaccctgggcgtagaacgtcgaaccttcgctgatcggccctttactcagcacggtcaccgaactgtgctcagccaggcgcagggcaagggaaagaccggcagcgccgctgccgataatcaacacatcacaagagaagtcaggagtggtattcattgtctttgtttaatttactaaacacatttggctcacaatagcaccggtccgtgaggaatcgtacaatttttttgtctgctgttgtgacggctaaacaaaaggcgaacggaaacggcgtcttgcgcgctgaaaatgagacgcggggaaggttgatgacattggattttatagtgaaataaacggcgtgttacgatacccttcagacgggcctgcgctttttcttattgacttacctatcgtttagcaacctgggcatataatgattgataacgatctgccgccgttgccagacaaaaaacaaaaagcgtaacggaactttattgttttcatgcactccaacagtcagcttgctcataatgcagattttgggtggtgttttgaagacgcatgggaattgggtttggggagacattacctcggatgagcgagcagttaacggatcaggtccttgttgaacgggtccagaaaggagatcagaaagcgtttaatttgctggtagtgcgctatcagcataaggtcgcgagcctggtttcccgctatgtaccgccgggcgatatcgctgacgttgttcaggaatcgttcgttaaggcatggcgtgcgctggactctttccggggagatagcgctttttacacctggttataccgtatcgccgtcaacacggcgaagaattatctggttgctcaggggcgccgtccgccgtccagcgatgttgacgccaacgaggcggaaaacttcgaaagcggcggggcgttgaaagaaatttcgaaccctgagaacttaatgttgtcagaagaactgagacaaatagtttttcgtaccattgaatcgctcccggaagatttacgcatggcaattacgttacgggagctggatggcctgagctatgaagagatagccgctatcatggattgtccggttgggacggtgcgttcgcgtatcttccgggcgcgagaagctattgataataaagttcaaccgcttatcaggcgttgacgatagcggaatactggaaaagggtatcaggcatgcagaaagaaaaactttcggctttaatggatggtgaaacgctggataacgaactgctcaacgagctgagtcgttcttctgagatgcaaaaaacctgggagagttatcaccttatccgcgatacgctgcgtggcgataccgctgaggtgctgcaatttgatatctccgcccgggtgatggccgccattgaaaatgagcccgttcgtcagacggctccgcttattcctgaatctcagcccgcaccgcatcagtggcggcagatgccgttctggaacaaggtacgtccgtgggccagctccctgactcaaatgggcgttgccgcctgtgtatcgcttgcggttatcgtcggcgtccagcactataatggtcagtctgattccgctcagcagccagaagcgccggtgttcaatacgctgcccatgatgggtaaagcaagcccggtaagtcttggcgtgccggctgacgcgtcagcgggaagcggccagcaggcgcaggtccaggaacagcgccgccgaattaacgccatgctgcaggactacgaactgcagcgccgcctgcacgctgagcagcttcagtttggccaggcccagactcagcaggccgcagtccaggtaccgggctatcaaactttaggaacgcaatcgcagtaatgaagcaactttggtgtgccatgtcgctcatggcaggcagcctgttgttctctgtcaacgcctcggctgatacatcgtccggggcgttgttgcagcagatgaacctggccagccagtctctcaattatgagctgtcttttgttagcatcagcaaacaaggcgttgagtcgctgcgctatcgtcacgcgcgactgaacaaccaaccgctggcgcagttgctgcagctggacggtccgcgccgggaagtggtcctgcgcggcacggaaatcagctattttgaacccggtctcgatccgttcaccctgaacggggactatatcgtcgattcgctgccatcgctggtatatagcgatttcaaacgcctctccgcggcgtatgattttatctccgtgggccgtacccgtatcgctgaccgcctctgcgacgtgatccgcgtcgtggctcgcgacggcacgcgctacagctttatcgcctggctggatgctgaaaccaagctgccgctgcgcgtcgatttgctcgaccgcgacggggaaacgctggagcagttccgggtcgtctccttcaacgttggcgataacgtcagcgccagcatggagacgctggcaaaagcgaatttgccgccgcagctgtcggtgcctgaaggaggcgacaaagctaacttcaactgggcgccgacgtggctcccgcagggcgtgactgaggtttccagcagccagcgccgtcttcccacctttgacggtccggtagaatcacgtctctattccgacggcttgtttagcttctcgatcaatatcaaccgcgccacggcggccagcagcgaccagctgttgcgcaccggccgacgcaccgtcagcacgacggtgcgcgataacgcggagataaccgtagtgggcgagctgccgccgcagacggcgaagcgtatctctgacagtattaaattcaaggcagtacaatgattaaagagtgggctaccgtggtttcctggcataacggcgtggcgcaggtgcactgcgacgttaaagcctcctgcagcagctgcgcctcccgtgccggctgtggtagccgggtgctaaacaagctggggccgcagaccagccataccattagcgtgccctgcgagcagccgttggccgcggggcaaaaagtggagctggggatcgctgaaagcagcctgctgggctcagcgatgctggtgtatatggcgccgctggcggggctgtttgtaatggcgtctatttttcaggtgctgtttgccagcgatattgcgtcactttgcggcgcgctgctgggcggcgtcggcggcttcctggtggcgcgcggtctgtcgccgcgactggcggcacgtcagtcctggcagccggtgattttgaacgtcgcactgccgccggatctgctgcgtgttgatacgccttcctccgacatgggccagtgatttcactggcccttatctttatttacctttcctgttacaacgccacaatttctgcgggtatgctggatctaacagcatttcctggtttcgcggatgtagtgtagaatgcggcgttttcggattaaaaaacgtcaggcacagtacagcggcctcatgatactcgtaaggcataattaactctaaatatgaagaatatacgtaacttttcgatcatcgctcacatcgaccacggtaagtcgacgctgtctgaccgtatcatccagatttgcggtggcctttctgatcgtgaaatggaagcccaggttctggactccatggatcttgagcgcgaacgcgggatcaccatcaaggcgcagagcgtcaccctggactataaggccagcgacggtgagacctaccagctgaactttatcgacaccccgggccacgtggacttctcttatgaagtttcccgttctcttgccgcgtgcgaaggcgcgctgctggtggtagacgccgggcagggggtagaagcccagaccctggccaactgctacaccgccatggagatggatctcgaagtggttccggtactcaacaagatcgacctgcctgcggccgaccctgagcgcgtagcggacgagattgaagatatcgtcgggatcgacgcccacgacgcggtgcgctgctcagcgaaaaccggcgtcggcgtgaccgacgtgctggagcgtctggtgcgcgatatcccaccgccggaaggcgatccggacgcgccgctgcaggcgctgattatcgactcctggttcgataactacctcggcgtggtgtcgctggtgcggattaaaaacggcaccatgcgcaagggcgacaagatcaaggtcatgagcaccggccaggtctataacgctgatcgtctgggcatcttcaccccgaaacaggttgaccgtaccgagctgaaatgcggcgaggtaggctggctggtctgcgcgatcaaagacatcctcggcgcgccggtgggcgataccctgaccgccgcccgcaacccggcagacaaagcgctgcctggctttaagaaggtgaaaccgcaggtgtatgccggcctgttcccggtgagctccgatgattatgaagctttccgcgacgcgctgggcaaactgagccttaacgatgcctctctgttctacgagccggaaagctctaccgcgctgggcttcggcttccgctgcggcttcctcggcctgctgcacatggagatcattcaggagcgtctggagcgtgaatacgatctcgacctgatcaccaccgcgccaacggtagtctacgaagtagagaccacctccaaagaagttatctacgtcgacagcccgtccaagctgccgccgctgaataatattcaggagctgcgcgagccgatcgccgagtgtcacatgctgctgccgcaggagttcctcggcaacgtgattaccttgtgtgtcgagaagcgtggggtgcagaccaacatggtttaccacggtaaacaggtggcgctgacctatgaaattccgatggcggaagtggttctcgacttcttcgaccgcctgaagtccacctcccgcggctatgcgtcgctggactacaacttcaaacgcttccaggcgtcgaacatggtacgcgtcgatgtgctgatcaacggtgagcgcgtcgatgcgctggcgctgatcacccacaacgataacgcgccgtatcgcggccgcgagctggtggaaaagatgaaagatctgattccgcgtcagcagttcgatatcgcgattcaggcggccatcggtaaccacattatcgcgcgctctacggtgaaacagctgcgtaaaaacgtcctggcgaaatgctacggcggcgacgtcagccgtaagaaaaagctgctgcagaagcagaaagaaggtaagaagcgtatgaagcaggtcggtaacgttgagctgccgcaggaagcgttcctcgccattctgcacgttggtaaagacggcaaataaccctaaggagttggcatggcgaacatgtttgccctgatcctggtgattgcaaccctggtgacgggcgttttatggtgcctggacaagttcatttttgcaccgaaacgtcgtgaacgtcaggccgctgctcaggcagcgaccggcgagcaactggacaagaagacgctgaagaaagtcggcccgaaaccgggctggctggaaaccggcgcatcggttttcccggtgctggcgatcgttctggtggtacgttcatttatttatgagcctttccagatcccttcaggttcgatgatgccaacgctgctcatcggcgattttattctggtggagaaatttgcctacggcattaaagatcctatctatcagaaaacgctgatcgagaccggccatccgaagcgcggcgacatcgtggtgtttaaatatccggaagacccgcgtctggactacattaagcgcgcggtggggttaccgggtgataaggtcacctacgatccggttgccaaacaggtcactattcagccgggctgcagttccggacaggcctgcggcaacgcgctgccggtgacctattccaacgtggagccgagcgattttgttcagaccttctcccgcagcaacggcggcgaagcgagcagcggtttctggcagttgccgaagggcgaaaccaaagccgacggcattcgtcttaccgagcgtcaggagacattgggcgacgtgacgcaccgaattctaatggtgccgattgcccaggatcaggttgggatgtactaccatcagtccggtctgccgctggccacctggattgtgccgcccggtcagtacttcatgatgggcgacaaccgggataacagcgccgacagccggtactggggctttgtgccggaagccaacctggtcggaaaagcaaccgctatctggatgagttttgaaaagcaggaaggtgaatggccgaccggcgtgcggttatcgcgcattggtggaattcattaatttcctctgctgaattcacgtcgctgctgttatcgcagcggcgtgaattatttagtatttaaatccattcaaactaacgacatcccgtgtcgttgcgtatagaatatccccccgaagtttttggttgtcgctctgccgggtgacactgcacacgaaagcgtattggtctgtttcaaattactgtttgaagcgaatgctcaggtcggtttcgtgtgctgcatctttgacgcattcatttattggtaacgcatgaaccccatcgtaattaatcggcttcaacgaaagctgggctacacttttcatcatcaggagctgttgcaacaggcattaactcaccgcagtgccagcagcaaacataatgagcgcctggaatttttaggtgactccattttaagtttcgtgatcgcgaatgcgctgtatcatcgctttcctcgtgtcgatgaaggcgatatgagccgtatgcgcgcgacgctggtgcgcggcaacacgctggcggagatcgcccgcgagtttgagctgggcgagtgtctgcgcctcgggccgggagagctgaaaagcggcggtttccgtcgcgaatcgattctcgcggataccgttgaagcgttaattggcggggttttcctcgacagcgatattcagaacgttgaacgcttaatcctctcctggtaccagacccgtctggacgaaatcagtccgggcgataagcaaaaggatccgaagacgcgtctgcaggaatatctgcagggacgtcatctgccgctgccgtcttacctggtggtccaggttcgcggcgaagcgcacgatcaggaatttactatccactgccaggtcagtggcctgagtgaaccggtggttggcacaggttccagccgtcgtaaggcggagcaggctgccgccgaacaggcgctgaaaaagctggagctggaatgagcgaagaaaaaagttattgcggatttgtcgccatcgtgggtcgtccaaacgttggcaaatccacgctgttgaacaagctgcttgggcagaagatctcgatcacctcccgtaaagcgcagaccacccgtcaccgcatcgtcggtatccataccgaagggccgtatcaggcgatttacgttgatactccgggcctgcatatggaagagaagcgtgccattaaccgcttaatgaacaaagcggccagcagttcgattggcgacgtggaactggtcatcttcgtggtggaaggcacccgctggacgcaggacgacgagatggtgctcaacaagctgcgcgacgcgaaagcgccggtgatcctcgcggtcaacaaggtggataacgtgcaggaaaaagcggatctgttaccgcacctgcagttcctcgccagccagatgaatttcctcgatatcgtaccgatctcagcggaaaccggcaccaacgttgataccatcgcggcgatcgtgcgtaagcatctgccggaagcgatccatcacttcccggaagattatattaccgatcgctcacaacgctttatggcctccgaaatcatccgtgaaaaactgatgcgtttcctcggcgctgagctgccgtactccgtcaccgtggaaatcgaacgtttcgtcagcaacgagcgcggcggttacgatatcaacggcctgatcctcgtcgagcgcgaagggcagaaaaagatggtgattggcaacaaaggcgccaaaattaaaaccatcggtatcgaagcgcgtaaggacatgcaggagatgtttgaagcgccggtgcacctcgagctgtgggtgaaagtgaaatccggctgggccgatgacgagcgcgccctgcgcagtctcggttacgttgacgacctctgagttaacgcaacgtggatggatggcagcgcgcctttgtcctgcatagccgtccgtggagcgaaaccagcctgatgctggacgtcttcacggaagaatccggtcgcgtgcgcctcgttgccaagggcgcacgctccaaacgctctaatctcaaaggcgctttacagccctttacccccttgttggttcgcttcggcgggcgcggcgaagtcaaaaccctgcgcagcgcggaagccgtttcgctggcgctgccgctcagcggcatcaccctctacagcggtctctacgttaacgagcttatctcccgcgtgctggagcacgaaacacgcttctccgaactctttttcgactacctgcactgcattcaggcgctcgccggggccagcggctcgccggagcccgcgctgcggcgttttgagctggcgctgctcgggcacctggggtatggcgtggattttctccactgcgccgggagcggcgagccggtagacgacaccatgacctaccgctatcgtgaagaaaaaggctttattgccagcctggtgattgataacaacacgtttaccgggcaccatttgaaagcattggcgagtcgcgagtttcctgatgttgatacgctgcgcgccgcgaagcgctttacccgtatcgccctgaagccctatctcggcggcaaaccgctcaagagccgggagttgtttcgccagtttatgcccgcgcgaaaggcgcgagccgataatacgaataatgattaacgaggattgtcatggctgaattattgttaggggtcaatattgaccatatcgcgaccttgcgtaacgcccgcggcaccgcttacccggatccggttcaggcggctttcattgccgaacaggccggcgctgacggcatcaccgtgcatctgcgcgaagaccgtcgccatattaccgatcgcgatgtgcgtatcctgcgcgagacgctgcacacccggatgaatcttgaaatggcggtcaccgaagagatgctgacgatcgcctgcgaaaccaaaccacacttctgctgcctggtgccggagaaacgtcaggaagtcactaccgaaggcggactggacgtggccgggcagcgcgacaagatgcgcgatgcctgtcaacgcctggcggatgccggcatcctggtctccctgtttatcgatgcggatgaagcgcagatcaaagcggcggcggacgttggcgcgccctatatcgaaatccacaccggctgctatgccgatgccaaaaccgacgccgagcaggccagggagctggaacgtattgccaaagcggccacctacgccgccagcctcgggctgaaggtgaatgccggccacggtctgacctaccacaacgtgaaagcgattgctgcgctgccggaaatgcatgagctgaatatcggtcacgcgattattggccgtgcggtgatgagcggcctgaaagaggcggtggcggaaatgaagcgtctgatgctggaagcgcgcggctaatggccattctcgggttgggtaccgacatcgtcgagatcgcccgcatcgaagcggtgatcgcccgcagcggcgatcgccttgcccgccgggtgctgagcgaccatgaatggagcatctgggagcagcaccagcagccggtgcgtttcctggcgaaacgctttgcggtcaaggaagcggcggcgaaagcgctgggaaccgggatccgtaacgggctggcgtttaaccagttcgaggtttacaacgacgagctgggcaagccgaagctgcggctatggggtgaagcaaaccttttagctgaacgcatgggagtaagcgctattcacgttactctcgctgatgaacgccactacgcctgcgccacggtgattgtcgaaagctagccaggagggcggttaaattttatccgcgtggtgcatcagcacgaatttatcccacagctgttcttcactctcgaggtgtgccggatctttcaggatcgtattcgggatcgggcacactttctggcaggttggcgtgtcgtaatgacccacgcactcggtgcagcggtcgctgttaatctcataaatgctgtcacccatcgaaatggcctcattcgggcactccggctcgcacatatcgcagttgatgcattttttggtaattaacagcgccatcaggaaagtctcagaaacaacacaaacagggcgggcattatacgcccattttctgctcagaccagctttttcaccagcgcttcgctatggcgaatgcgctccggcgcccgctccagatcctgctgcaccagccccataaacagcagatcggtgagcatcatttgcgcgctggtggaggagatggcggcgctgcgcgtcgcctgctcttcggcgatagtatacaggcagtgggtcgcctgctgttgcagggcgttcgggctaaacccggtgatcgccaggatcttacagccgacgcgcagcgcttcaccggccgccatattgatctcccggcgctcgccggagtaagagatcgccagcagaagatcgtcgctggacatggcctgcaccgtcgccagcagggcatgcatatcctgctcagaaacagcgttgatgccgatcttcatcagcttccagctaaagttacgcgccaccaggccggaggcgccaatcccggtgacgatcactcgccgggcgttgcgcagcagcgtgacggcttcccgtagcgtctcttcagtgttgacgtccagcgaggcatgcatggcggcgacattgtctttaatgagtttctcgccgaccagacgcagcggatcgtcaccgcgaatgtggttatgcaccgggacggagtgcggatccgggctactcgccagcgcttcactaagggccagcttcagcgccggaaagcctttgaatcccagcttctgggaaaatttaaccacgctggactgactcacaccggcttccgccgccagctgctgcgagctgaggtgccgggtctcatcgggctggctcagaatataatcggccaactttttgtcgctcgccgccagggtgggatagcgctgacgaatacgcgttaaacagttcattggagctccgctggagccgtccggctcgtgactgacagaatttttattcgattataaggggtataccatgaattaaaaattcttaagccacaatttttccttcgcctgctactttaattctttcttaacggcaggggatgttttccctcgacatggcgtcaggctgttaagcttaccctaacgagaagcgagttctgagataaaggaggcagtttgcagcacactgaacggagagtggtgtttttcgatctggacggaaccttacaccaacaggatatgttcggcagttttctgcgctatctgctgcgccatttgccgctgaacctgttgctggtggtgccgatggggccggtgatccttgccgggctggcagtgagcggacgggcggcgcgctggccgatgagcctcctgctgtgggcgacaacctttggccgccgcgaggcggtgctgaagcggctggaagcggagtttgtcggctggtttcgccatcatgtgacggcgtttccggtagttcatgcgcggcttaccgcctacctgaccagcaccgatgccgacgtctggttgatcaccggctcgccgcagtcgctggtggagcaggtctatcgcgataccctctggttgccgcgggtgaatctgatagccagccgcaccgcgcgccgctggggcggctgggtattgaccctgcgctgcctggggcatgaaaaggtggtacagctggagaaaaagattggcgccccgctgcggctgtatagcggctatagcgatagtgagcaggataatccattgctcggcttttgccagcatcgctggcgggtaacccctcagggagagcttcagcagctggagtaatagtgtgtaattgatagcgcccatgtataatgcgccccgctttttctgctggagtggccgctgtgtctgacctcgaactcaatgatgaatactggatgcgtcatgccctgacgctggcgaaacgcgcctgggaagagggcgaggtgccggtgggcgcggtgctggtgcataacaatcaggtcattggcgagggctggaaccggccgataggccgtcacgaccccaccgcccatgcggagattatggccttacgccagggcggactggtgctgcaaaactaccgcctgatcgacgccacgctgtacgtgaccctcgagccctgcgtcatgtgcgcgggcgcgatggtgcacagccgtatcgcccgcctggtgtttggcgccagggatgccaagaccggcgccgccggctcgctgatggatgttctgcaccacccgggaatgaaccatcgggttgagattagcgaaggcgtgctggcagagtcctgctctgccatgctgagcgacttcttccgctggcggcgggaagagaaaaaagcgctgaagaaagcccgggcgcagactggggaaagttaatacaggtggccggggagtttcatccgggcattatccatctgcttatcggcgcgaaacttgaaaaagggcagggtggtctcctgcggctcttcgagctcattggggagcacggccgggtaatcctccgccagggccagcgtttgctgctgctggcgctccttctctgacaaatagccgacaaggcttatctgatatttgcggatgttttccacataggcgtaggcctcatggccgcgggcatagccgtattttagtttgctgtaatagggtttctggctcagcaacggtaaacgcagcttaacgtccgcccagctgttaggattgcctttctgtttgcgggtgagcgccatggcgtccagcatatgggcataacccatattataagcggccagcgcaaaccagatgcgttcatctttcgggatcgaatccggcactttatccatcatatcctgcaggtagcgcatgccgccgtcgatactctgcgccgcatcggtgcggtcggttagacccaggctttgcgccgtattgcgtgtgagcatcatcataccgcgcacgccggtaggggaggtggcctgcggatcccagtgggattcctgccaggcgatggcggccagcaggcgccagtcaatctcgcgggcgtatttttcaaacagcggctgcacctccggaagaatattttccaccgcgcgcaggaaggtgcgggtatcgacataatcgaaatcgttgccgtggccgaggtatttctcctccaggcgcgccagcgtcccgtcttcattaatgttattgaagaaatcaagcattgccgccgacagcgaattatcgtcgtcccgggcactaaaccaggtgaccggctgttcgtcagtgatatcgagggccaccgccagctccggatggacgcgctgaaacaggctgacggccaccgagtcggcgatggtgtaatcaagtttaccgtcaatcaccgcctgcatcagcgccgtggtaccgcgtttttcgtccacgcgccaggcaagatccgggtatttctcggcttttaaggtctgcaggtcgttgatcgccacgtggcccggagcgatagtgagctgctcggcggtcagcgccgcgagggtgcgcggccgggtattgccgacgcggtagaccagctgttgtgaaacagaatagtaggtggggccggcctgatagtttttcactcgctcctggttatagaccagtccggcggccagcatatcggcctgaccgtcgtcgaggtcgtcaaacagctggctgatgttttgccggacggttatcttaagcgtgacgccaaggtagtcggcaaactgcttcgccagttcataatccagaccgaacgctttattgttcatggtggcgaaggtcattggcgagttgatggtgctgatgcgcagctcgccgcgagcgataatgcccgccacccggttctcgggtttaccagaccaggggatcgacggccacagggccgccgccagcaaaagg

SEQ ID NO: 5402 - DNA, 573 bp, Unknown
  gut microbiota DNA sequence
atacctcgggggacgacaatgccaaattcggccaataaccccctgatttgattggcttgtgcggttcgctgtttgatgaagctctgacgactccggtgaagtgccaatacggcttgctgctcagcggttttgaccggcacgaaccgcatgttaggtcgagtgacggcttcacaaatagcttcagcgtctgcagcatcatgcttattggttttaacatagggtttgacgaactgaggggccatcagtttgacattatggcccatcgatatcagtttattggcccagaaatgagcagatgcacaggcctccatgccgatcaaacagggtgggatgttggcaaaaaaggaggccatttgtgcccgtctgagttgtttgttgaacaaccgttttccgtgctcgtcaaccccatggatctggaaaacgttttttgccaaatcgattccaatagttttaacgttcatgatagcagcgctccgttcaatgagtgacgatttatcgtcccactgtggcacaagagatgggaggcgaccattccattaacaaagcccatccaattatgaaaaaattatgaat

SEQ ID NO: 5403 - DNA, 1928 bp, Unknown
  gut microbiota DNA sequence
aaattacgccatgttcgctccattatctcctttcaacgcaaaataaaaccccgtcatggcaatcccttcgccataatccactttttccctgcccctgcgctggcgatgatcgcgaaaaccgtgcttgcgaaaaaaaatgtgaatccaatcacatataaaagtataacaattatataacatttagtttactaattaatttgtctgcgtgacgtggtacgcccgacaagacagattgcagtctttgctggagcaatataacaatgacagaaagtagcattaccgaacggggcgcgccggaactggccgatacccgtcgtcgtatttgggcaattgttggcgcttcctcggggaatctggttgaatggtttgatttttacgtttactcattctgctcgctctatttcgcgcacatcttctttccatccggaaataccaccacccaactgctgcaaacggcaggcgtatttgccgccggatttctgatgcgtcctatcggtggatggctgtttggtcggatcgctgaccgccggggacgtaaaacgtccatgcttatctcggtctgcatgatgtgctttggctcactggtgattgcctgtctgccgggttatgcggtgatcggcacctgggccccggcgctgctgctgctggcgcgtctgttccaggggctgtctgttggcggagaatacggcaccagtgcgacctatatgagtgaagtcgcggtggagggaaagaaaggcttctatgcctccttccagtacgttacgctgattggtggtcaactgctggctgtattagtggttgtggcgctccagcaggtgcttagcgatgaagatctccatgcctggggatggcgtattccttttgccctcggggcggtactggctatcgtcgcgctgtggctgcgtcgccagctggacgaaacctcgaagcaggagacccgggcgctgaaagaggctggctcattaaaagggttgtggcgcaatcgccgggcctttgcgatggtgttaggctttaccgccgccggatcgctgaccttctacaccttcaccacctatatgcaaaagtatctggtcaacacggcgggcatgacggccagcaccgccagcgtgatcatgaccgcggcgctgttcgtttatatgctggttcagccgctattcggcgccttctcggataaagttggccgccggacctccatgctgtgctttggcgtgctggcgacgttatttaccgtgcctattctcagcgccttgcaaaaagtgagctcaccctatgccgccttcggcctggtgatctgcgccttactgattgtcagtttctatacctcgatcagcggcatcctgaaagcagagatgttcccggctcaggttcgcgcgcttggggtcgggttgtcctatgccgtcgcgaacgcattgttcggcggctctgcggagtacgtcgcgctgtcgcttaagtcggcagggatagagcacgcgttctactggtatgtgacggtgatggccgccattgccttccttgtctccctgatgttgcatcgcaaagggaaggggttgcgtctgtaacgcttactgatgagccaactgccatacagcgtagccggtggtcgcgccggcgacatcccaggcaaaatccttccagctccagccgctcccagccgggcggctgtcccaaagctcttttgaggcgccaaggctgacggaaaacatcaggccgatagcggcgctgcggtcccggctgtaaccctgatgttgcgcatattcattgccagcggcagagagcatcgctgaggccagaaaatgctgggctttgtcctgaccggaccatgcatcatttgccatgtggctacagccggttaacagcagcgaagcaatcactattatcgtacgcatagcgcttccagaaaaaagccccgtcgaggcggggctgatagt

SEQ ID NO: 5404 - DNA, 958 bp, Unknown
  gut microbiota DNA sequence
ccaggcgctcggcgttatcgagcagcacagcgggagacgtgctccccagctccgggttaaaggccatgttttttgctccaaagaaggcgttcgcccaaacgagggtttgagcgaaaagagttaattaggggttgttatggggtattaagcgacgtcgccggggtatgtggcgtcgtcgtactggtagaaaatttctttatattcaggtgcagtaatctgacagttgctgtcacccgatggggcaacctcctggactatcccatgccgcgcacccttttcactgtcgcagaacaataacttcggcagatcaatatctgggtcgtccataatccagtcgccgggatgcaggtcgtcgttgtacggcaccgtcagcgtgaaatcatctacccgttgcggcgtgagcattcgcgatgatggtctaccgtcctgaaactgtatccagcagcgaggattcgcgtagctccagtccagtggctccgtaacgtgcagcgtaatttcctggaagtcgtaaatcatcgcgtcaatcaggcaactttgggttttcccggttggaatgtcgtcggacaaaatgatgtgatcaccgaagtcatgacaccatcccagcattgaagtcgtagccgtatacgttcggcgttggtggagatatttcattaaccgacgcatcccgatacgccaggcgcgatctgcagtcatggcaacatcaatggtgtatgcctccgttttgcgcggaaaaggattttccggcgtccggcactgtacggtttcctccgcccaggtcacagggttgatatatttcacatccacgccatcaaaatcatcctccgacgggaccctgaatgacgtctgcatttcctcgacggtatcctgaggtgtaatgatccctgtccagcttttgacgccctctctcccgacagaaagcaacccgtcagacagcagaaaataccccatgccagcctcg

SEQ ID NO: 5405 - DNA, 11139 bp, Unknown
  gut microbiota DNA sequence
tacgctttcctctttcagagtcaacccgtttttcaggatttttctctgcaaccgaaccggctgtttgtgtgaagtgattcacatctgccgtgtcagtgggtgcgcattatagggatcccatttttttgcacaagccttttttcgatctttttttctgaatggtgatttttcacccttttcgccgtgtaattgcacgatttgctcaattttcaccgttttcaggggttgcacagggagataaaagccaccaaagtcttcttacgttcccgtattttgaggtctatatgtctgctcagctgcgcccctacaaagcatttttcccacaaatcggtcttcgcgtcatgattgacgcatccagcgttgtcatcggcgatgtcagaattgccgatgacgtcagcgtctggcctctggtggccattcgcggcgacgtcaactatgtatcgataggtcaacgcagcaatattcaggacggtagcgttctccatgtgacccataagtcctcttataagccggagggaaatccgctgatcattggtgaggatgtaactgttggtcataaagtgatgctgcacggctgcactatcggcaaccgcgtactggttggtatgggttcgatcttattagatggtgtcgtcgttggcgatgacgtcatgattggtgcgggcagtctggttccgcagaataaacagctggaaagcggctacctttactttggcaatccggtcaaacagatccgccccctgacagagggggaacgggaaggactcaagtattcagcaaataactatgtgaaatggaaaaatgagtacctggatcaggataaccagatccagccctgagcatcttcctgaccatcgcggatcaatgcttctgcctcttcctctagatcccaacgatgttcctggaaggcggccagccactgcgctggcccctctgcgccgaaacgctgctgcaagatttgccctgaaattgcgcaggttaattgcatcccattcaccagcgcgggaaaaaccacgccctgccgttcggcatcccatgattcccggtcaggaaactgaatcgcctgattcatgcattcagttcctgctgcagcgtttcaatgaccggagcgatagccggcagaacgccgtgccatagcagaacagcatgggcggcttgcgccaccagcattcccagcccatcggcacagtggactgcgccatattgctggcaccagtgaagaaacggtgtcggccctttctggtaaaacatgtcatagcaatatacgtcagcgttgacaatagatgccgggatagctggtacatcaccgtctattccactggacgtcgcattgacgatcagatcgaatgtttccccggataaggtatccatctcccttgcgctaacgctcccggtatgggcgaagagagtggctaactcacgggcacgagaataggtgcgattcacgatcgtgacggcgcatcccagcgacagaagcggcaaaagaaccccgcgagatgccccaccagcaccaacaagcaggatccgttggcgtggcttaatgaatcccaggcgttccagatcgctcagaagaccaataccgtcggtgttgtcccccagtaaacggccatcttccaggcgtttcagggtgtttactgctcccgccagcgctgcgcgttctgtcagttcgtcggcacgcgcaaaggcttcctctttaaaaggaacggtgacgttggccccctttcctccttctgcaaagaactgattcagagaagagacaaaatcgtccagcggcgccagtacacgtccataaggatgagtaattcctaactggcgggcaaacagctgatgaatagcaggcgacttgctgtgcgcgatcggattaccaaaaacggcataggtttccatggttcacccctggcggaacagttcacccgtcagggcatcacggatttcagatgggttttgccggccgcccgtggcgccatccaccaccgggaagctgtcgccaaactgagcatggacctctgcggtagtacggcacggtggttgcccggtgagattggcgctggtcgaaaccagtggttttccgtaggcttcgcacaattcgattaccagcggatggttagtcacgcgtacggccagtgaatcaaaacgtccagtcagccagcgcggcgtttcaggacgcgccgggaatacaaacgtcaccggtcccggccagcaagagaagatggcttcccgctgtgagtcacttaaccgtgaatcatcaatatagggcttcagttgctcaaagctggcggcgataaggatcaatcctttctcaacaggacgctgcttcagctccagcaggcgcataacggccgtttcgctgtcagggtcgcagccgacgccaaacacggcttcggtgggataggcgatgacatgttcatttttcaggaccgccacggcatgggcgacggcttctgagggcaggttattgttcactgatttattccgccgggatcggctttccacattgtttactggcacagaagcgtctgagcccctgcgccgtcttcttttctattaacagcgggtaatggcattcagggcattcgcccgccaccggtttaaaattgataacgaactggcaatcaggatagcgatcgcaggagtgaaaggttttaccgaaacgggaacgacgctggaccagatggccttgtccgcactgcgggcaagcgatagccgtctcatcgggtttatcaatcagctcggtatgttcacattccggatagcggctacagccaatgaacatcccaaaacgcccctggcgtaacaccataaccgcaccgcacgatgggcactcttgcccctccagcaccttaacgatatgcccgtccgcctggcttttcaggggacgaatatagtcacagtccggataatgcgaacagccgagaaacgggccatgtttcccggaacggatcaccagttcggccccgcactgcgggcagggctcatttttacgcaccgaaaacagtgctgatttggtcataacaactcgatgttgctgcaaaagattaatgcagcataccttcatttacttcgaagagtaattcttccatttgctgataggcgttttcacagcccgggatattgaacagtaccatcaggatgacccatttcaggtcttccagctcaaattctgccgtatccagcgccagtacgcgctctatcaccatttctcgcgtttcgaggttcaacacctgaatctgctcgaggaagagtaaaaacccccggcaactggcatccagacgctggcactcctcttcggtatatacccgaagagagagcgggtcggaagcgagctgcatgggttcaacgagaccctcctgataatcagccagtttctcgagccacattaacgcgttatagatgtcttcccgctcaaaacccgcatcggtaagatcccgcgtcagtttgtcctgatccacgcgcatttctgcttcgctatggatgtaagtttcaaacaaatacatgagtacgtcgaacatggcttgccctccttaatcggacatagccgccgggtacagctgcgatccagcctgctaactccagttcaagtagctgagctacggttactggcacagattggccggcacgttcagcgacaacgtcaacaggtgttacctcatctcctacgttagccaggagctccggaaatggcaatgctacagacggctgatcgacgcaaatatttatcgaatcagacgtatcagtcagccaggccagctcgttatgccagtattccacaatatcctctggcgaggtcactggcaccgcgccttgcttaattaaccagtgcgggccttccgatcccggattgcctatcgggccaggcagggcgaacacatcccttccctgctccagggcgcagcggacggtgaccagcgatccgcttcgcaacgccgcctcaatcaccagcacgcccaggcttaagccgctgataatccggttgcgcctggggaaatgtgcgggaagcggcggcgtaatgagtggaaattcagataccagcgtaccgccattgtcgatgatctgccgggcgagggttgcatggcgccgcggataaacctgactcagcccattgcccagtaccgcgatagttttaccctccgccgccagcgcgccgcggtgcgcgaccccgtcaatgcctaacgccagcccactggtgatggtaatccctttctgcgccagcgtttcgctgaacagtttcccccagcgggcgccataccaggagtgcgagcgactgccaataacggcaagctgcgcgctgtgaagcagggcgaggccgccgctgaccagcaacgcgccgggataatcagcgatagcctttaaccgcaatggatagcgcggatcgtcaccccgtaacaaatgatgatccggttgtcccagccagcgccgcgtctcgtcaagctcatgctcgtcaagccggaaaaataactttgcctgcgccgcggtcatcccgacggcatgcagcgcttcacgatcaacgctggcggctgcgcataagcgctgagcgatctctaccatcctgtcgccatacaagctactgaccttcattagccgcagccaaatctcgtcgggcgtcatccttaccccctgccataagcggtattgacaatctttgcgattggacagtgagactgtcaattgcagggggttttgtctagaatagagctaataatcttatcaactcctgaatacgactctggaactttatggcagttttgcaagtgttacatattccggacgagcgccttcgcaaagtcgccgagccggtcaaagaagtgaatgcggaaattcagcgtatcgtcgatgatatgttcgacaccatgtacgccgaggaaggcatcggtctggccgcaacccaggtcgatatccatcagcgcattatcgttattgatgtgtcggaaaatcgtgaagagcagctggtattaattaatccggaaatgctggagaaagatggcgaaaccggtattgaagaaggctgcttgtctattcctgaacagcgcgccctggtcccgcgtgcggaaaaagtgaagatccgggcactggatcgcgatggtaagccgtttgaactggaggccgatggcctgctggctatctgtatccagcatgagatggatcacctggtcggcaaactgtttattgactatctgtcaccactcaaacaacagcgcattcgtcagaaggtagagaaactggatcgtttacgttcccgtgcctgataacaaggaataccgtgtcacaatcactacgtatcattttcgccggcacccctgattttgcagcgcgtcatcttgatgcgctgctgtcgtctgaacatcaggttgttggcgtattcactcagcctgatcgccctgctggtcgcggcaaaaaattgatgccaagcccggtaaaagtgctggcagaagcccataacttacctgtgttccagccatcctccctgcgtccgcaggataaccagcggttagtcgccgatctcggcgccgatattatggtggtagtggcgtacggtctgattctgcctaaagcggtgctggagatgccccgtctgggctgtatcaacgttcacggctcgctgctaccgcgctggcgtggtgcagcgcctattcagcgttcactgtgggcgggggatagcgaaactggcgtaaccatcatgcagatggacgtcggccttgatacgggggatatgctgtataagctttcctgccccattaccgcagaggataccagcggcagcctgtacgataagctggccgagctcggccctcaggggctgctggcaacgttagcccagctggccaacggcaccgcacggcctgaagtacaagatgaatcgctggtgtgccatgccgaaaagctgagtaaagaagaggctcgtatcgattggtcgctttccgctgcgcagttggaacgctgcatccgcgcgtttaatccgtggccaatgagctggctggaaattgacggacaaccggtaaaagtgtggcgagcatcggtcatcgccgaagccgctcacgccgaaccgggtactatcgtagcagcaaccaaacagggtattcaggtcgccacgggggatgggatcctcagcctggagtcgctacagcctgcgggtaaaaaagcgatgagcgcccaggacttactcaattcccgccgggagtggtttatccctggcacccgtctcgcctgacggtcgtctcttctgaagcccgggttcgccgggcatttttatttttgcgcttatgaaaaagaatataaatttacgcagcctggccgcccaggctatcgagcaagttgttgaaaaagggcagtctttaagcaacgtactgccccctctacagcagaaagtcagcgataaagataaagcgctactgcaggagttgtgctttggtgtactacgtactctaagccagctggagtggcttatcagcaagctaatggcgcgtccgatgaccggcaaacagcgcaccgtgcactttctgatcatggttggtctctatcagttactctacacccgcattccaccacacgccgcgctggcggaaacggtagaaggcgcggtggccattaaacgcccgcagcttaaagggctaatcaacggcgtgctacgccagttccagcgccagcaggaagcgttgttagccgaatttgctgagcatgaaaaccgctatcttcatcccaaatggctgctgaaacgcctgcagcaggcctggccggagcagtggcaggagatcgtcgaggcgaacaaccagcgcccgccgatgtggctgcgcgttaaccgcaaccatcattcccgggatgagtggcttgccctgcttaacgaggccggtttagagggctttacccaccctgattatccggacgccgtacgcctggccacccctgccccggtccacgcgttaccaggatttgatgaaggttgggtaaccgttcaggacgcctcggcccagggctgtatgcgctacctgcagccgaaaaatggcgaacgcatcctcgatctctgcgcggcaccgggcgggaaaacgacgcatattctggaagtcgccccccagtctcaggtcatggcggtggatattgatgaacagcgtctgtcccgcgtctatgacaacctgaaacggctgggcatgaaagccgaagtcaagcagggcgatggccgcttccctgagcagtggtgtggcaatgagcagttcgatcgtattctgctggatgccccctgctccgcaaccggcgttattcgccgccatccggatatcaaatggctgcgccgggatcgggatatcgccgagttagcccagctgcaggccgagatcctcaatgccacctggacgcacctgaagccaggcggcacgctggtttacgcaacctgttctattctgccggaagagaacggtcagcaaattgccgctttcctcgcgcgaactccggatgcagaacttcacgccaccggcacgccggcgagccccgggcagcaaaatctgccgggcgtggaagaaggtgatggcttcttttacgctaagctaatcaaacgtcggaactaatgggtcactgcagatgaagattattattctgggcgccggccaggtcggcggcacgctggcggaaaacctcgtcggcgagaacaatgatattacgctggttgataccaatggcgaccgtctgcgcagcctgcaggataagttcgatctgcgtgtcgtccaggggcatggctctcaccctcgcgtactgcgcgaggcgggagccgatgatgccgatatgctggtagcggtcactagttcggacgaaaccaacatggtggcctgccaggtcgcttactcattgttcaatacgccaaaccgcatagcgcgtattcgtgcgcctgattacgttcgtgatgcggaaaagctcttcaactctgaagcggtacccatcgatcacttaatcgctccggaacaactggtcatcgacaacatccaccgtctgatcgaatatcccggcgcgctgcaggtcgtgaacttcgcagaaggaaaagtcagtctcgcggtagtaaaagcctattatggtggcccgctggtggggaatgccttatccactatgcgggagcatatgccgcatatcgatacgcgcgtggccgccattttccgccacgatcgccccatccgcccgcagggctcgacgattgtcgaggccggagatgaagtcttctttattgccgcctcgcagcatattcgcgcggtcatgagcgaactgcagcgactggaaaagccgtataagcgtattatgctggtcggcgggggcaatattggcgcgggtctggcccataagctggaaaaagattacagcgttaagcttatcgaacgtaatcagcagcgagccgctgagctagcggaaaagctgcagcatactatcgtcttctacggggatgcatcggaccaggagctgttggctgaagagcatattgaccaggtggacctgtttattgccgtcactaacgacgacgaagccaatattatgtcggctatgttggccaagcgaatgggcgcgaaaaaagtgatggtgctaatccagcgcagagcctacgtggatctggtccagggtagcgtcatcgatattgcgatttcgcctcagcaggccacaatttccgcactcctcagtcatgtccgtaaagccgatattgtcggcgtctcctccttgcgccgcggcgttgcagaagcgattgaggcagtcgcgcacggcgatgagagcacctcccgggtagtcgggcgttcgatcgatgagatcaaacttccaccgggcacgatcatcggcgccgtcgtgcggggcaatgacgtgatgatcgccaataataatctacggatcgagcagggcgaccatgtgatcatgtttttgaccgataagaagtttatttccgatgtcgaaaggctgttccagccaagtcctttcttcctgtaattcccagggcgccgaacaggcgcctttttattatcccttattattcaaaggttaatattttgcagtaactatctgctgggaatggcaaatgaaaatacatttgttaaacttacaacgtcagctggcacaaggagaataaaatgagttttttaaaagagtttcgcgaattcgcgatgcgcgggaacgttgtcgatttggcagtgggtgtgatcatcggtgcagcattcggtaaaattgtttcatcactggtcgcggatattattatgccgccactcggcctgttgattggcgggatcgattttaaacagtttgccgtcacgctacgtgatgcccagggcgatgtcccggctgtggtgatgcattatggggtattcattcagaacgttttcgatttcatcatcgtcgcgtttgccatcttcatggcgattaaattgatgaataagttaaatcgtaagaaagaagaggctccggcggcaccgccagctccctctaaagaagaagttctgctgagcgaaattcgcgatctgctgaaagaacaaaacaaccgttcttaatcagcagagaaagcagaaggccagtggtaaaaaagcgattcgcttgcttgccactggcctcccgatcaacccttcctgcatgtttatctttacgttgatagcttcctttccctttcttgtttttctctacgcgctgcctgaataacggatcgtggagaagtgcctcaatggcgttatctttaatttgtcctttagtatgctgatagcgactcatagttactccggtatatgtataaactcggcgcgagtgtagatccgcgcgtttaaaaaatcaacgtccgccattgccgttgctggccccttgttcaagggcctcaaggatagaacagtaaacgctgctgtgggcagtgccgcaacaggcatcgttgagccgctgcagagagcggcgcatcgtctgtagctctttaatccgcgcctcaacttcacttaatcgcgcctgaacgatccctttcgactcctgacaggtatgatgctccggatcgatgcggatcgacaataattcgcggatcgcttccagggtgaaacccagttgtcgggcataacgaataaagcgcagccgttgaagatcgttatccgagtacagacgaaatcctccctcggtgcgtatgtcatgatccatcatctgctgcttttcatagtagcggatggtatcaggcgtcacgtcagccagttttgccaattcaccaatacgatacatatttactcctgatttattttttgcagcaacgcatcggcgtactcaccgcgtaaaaagtcggtgttcagacctgcctgacgtaacttcagctcgagcagggcaaggcgtttgctaagttcggcatgacgcggatcgtcctgacggacgccgttcagtaagtctgccagagccaacgcttctttgcgttgctccagttccggaggaagacatcctgcatttttcagaaggcgatagcctgcccgcaactccgccggcacatgtgaatcgtcatcgagagtcagcggttctccgctgccgggtaaattatcgaactcacctttggtttgggcatcgaggatatgacgttccgcccactgatccagcaaccacattctacggctccaggggatgaacaaaaagagtacagatagtgtagtgaaatggggatggggtagatataaaaaaacccgccagggcgggtttttttacgttactacagattactctgcagcagcttctgctttcggctcagcacgatcaaccagctcgatgtatgccatcggcgcgttgtcgcctgcacggaagccacacttcagaatgcgagtgtaaccaccggcgcggctcgcgaaacgcgggcccagctcgttaaacagttttgccacgatctcgttatcacgagtgcgggcgaatgccagacgacgattagcaacgctatcagtcttggcaagagtaatcagcggctcaactacgcgacgcagttctttcgctttcggcagggtcgtcttgatgatttcatgacgaaccagcgaacctgccatgttacggaacatagcctggcgatggctgctgttgcggttcagttgacgaccactcttacgatggcgcatgaccttatccttctcagtaaaaccttaacctgtgatccggttactcgtcagcaatgcttgctggtggccagttttccag

SEQ ID NO: 5406 - DNA, 2619 bp, Unknown
  gut microbiota DNA sequence
gggcatcatcaatgcacaactggccaaaaataccaccaaaatcacaataaacgtctttactcacgttttcagccggctattcgctattttgtgacatcttccattgcatttttttatcgatgaacagatcttttttcgcgaagcttatggctgaatgcagcattttccgctgtgcgttttaacgttcacgctattaatcgctcacatattggtcacacagcaagaaatttttctcatttgctggcattgtttcccactgggtgttgcaaattaataaggtctttattctgctgaattgccagtagcataaatttctctgctgaaaatagcgtcctgaagtttttttaatctttgcctgccgtttctcacgctggatgtaaaacccggctggctgtattgacgtttccccattctgttgacagattgtagggcatgaggggcatttcatggagaatccgtactgcaactcagtcgtttttgcgaaaggaatccccatctctctctacgccttcgggcaccaccgaccggaccgggtaaaaaataaataaaggtccggcggatatatgcaaacaacatcacaattttggagcagaataatgagtatttccttgaagaaatcagggatgctgaagcttggtctgagcctggtcgccatgaccgtcgccgccagcgtgcaagcgaaaaccctggtttattgttctgaaggctcgccggaaggatttaacccacagctcttcacctctggcaccacctatgatgccagctccgtaccgatctataaccgcctggtcgaatttaaaaccggtacgacggaagttattccaggacttgctgagaaatgggaagtcagtgcggatggcaaaacctatactttccacctccgtcagggtgtgaagtggcaggataataaagactttaaaccaacccgtgacctgaacgccgatgacgtggtgttctccttcgatcgccagaagaatactaataacccgtaccataaagtttctggcggcagctatgaatactttgaagggatgggcttaccggacctgattagcgaagtgaagaaagtggacgataataccgtccagttcgtcctgacccgtccggaagcgccgttcctcgctgatctggccatggacttcgcctccattctttcgaaagagtatgctgacaacatgctgaaagccggcacgccggaaaaagtggatctcaatcctatcggtaccggcccattccagctgctgcaataccagaaagattcccgcattctgtataaagccttcccgggctactggggtaccaagccgaagatcgatcgtctggtcttctccatcaccccggacgcttccgtgcgctatgccaagctgcagaaaaacgagtgccaggtgatgccgtacccgaacccggcggacatcgcgcgcatgaaggaagataagaacattaccctgctggaacagccgggtctgaacgttggttatctctcctttaacaccgagaagaaaccgctggacgacgtcaaagtacgtcaggcgctgacctacgcggtcaacaaagaagcgatcatcaaagcggtttaccagggcgcaggccaggcggcgaagaacctgatcccgccgaccatgtggggctataacgacgacgttaaggactacacctacgatccggagaaggcgaagcagctgctgaaagaagcgggcctggaaaaaggcttcaccatcgatctgtgggcgatgccggtacagcgtccgtacaacccgaacgcccgccgcatggcggagatgattcaggctgactgggccaagattggcgtccaggccaagatcgtcacctacgagtggggcgagtatctgaagcgggcgaaagcgggcgagcaccagagcgtgatgatgggctggaccggcgacaacggggatccggataacttcttcgcgaccctgttcagctgcgccgcggcgaaagacggctccaactactcgcgctggtgctataagccgtttgaagatcttattcagccggcccgcgctaccgacgaccacaacaaacgtattgaactgtacaaacaggctcaggtagtgatgcatgaccaggctccggcgctgatcattgctcactccaccgtctatgagccggtgcgtaaagaagtcaaaggctatgtggtggacccgctgggcaaacaccacttcgataacgtctctgtcgaataataagcacgatgcctgaccccctctccccgcgtgggagaggcggggggcgtattcccgctattccggggaatgcttttgtgagcaatacagacgccctgtcgccaggcggggcgtcactagagagaatccgggttatgttgcagtttattctccgacgtctgggactagtcatcccgacatttatcggtatcacccttctcacctttgccttcgtccatatgatccccggcgatccggtgatgattatggcgggcgaacgtggtatttcccccgaacgtcacgcgcagctgctggccgaaatgggccttgataagccgctgtggcagcaatatgcccactatatctggggcgtgctgcacggcgatttaggcatctcgctgaaaagccgcattcccgtgtggcaggagtttgtccc

SEQ ID NO: 5407 - DNA, 2818 bp, Unknown
  gut microbiota DNA sequence
gtgtggcaggccggtaaagccaatagccacccccggcaaataggcggcggccagccaggcggcaaggtagagaagggtcagccacagcgcccagcgcgcttctttgtgggcctgaacaaagcgtttgtccattttttgtcccttgaggatgaagaaagcggggattgtaccgcatggtatagatgaggagagagaaaaagaaaaaaggccggtttacccggccttttgctgagagagcagaattatttttcctgcaagccgagttttttctccagatagtggatattggtgccaccatgctggaaattctcgtcgctcataatgcgcatctgcagatcgacgttggttttgatgccatcgatgatcagctcctgcagcgcattcttcatgcgggcaatcgccacgtcacggctttcgccgtagcagatcagtttaccgatcatggagtcatagtacggcggtacggtgtaaccggcgtaaatatgtgactcccagcgcacgccaaagccacccggcgcgtggaaacgggtgattttgcccgggctcggcaggaaggtgttcgggtcttcggcgttgatacggcattccaccgcatggccgcgaactaccacttcatcctgcttgatggacagcggctggccggctgcgatacgcagctgctctttgatcaggtcaacgccggtgatcatttcagttaccggatgctctacctggatacgggtgttcatttcaatgaagtagaactcgccgttttcgaacaggaactcaaaggtacccgccccgcggtagccgatatccacacaggctttcgcgcaacgctcgccgatgtagcgacgcagttccggggtgatgcccggcgccggcgcttcttcgaccactttctgatgacggcgctgcatggagcagtcgcgttcagccagatagatcgcgttaccctgaccatccgccagcacctgaatttcaatgtggcgtgggttttccaggtatttctccatgtagaccatgtcgttgttgaaagccgctttggcttccgctttggtcatggagatggattgcgccagttcagcgtcgctacgtacaacgcgcataccgcgaccgccgccgccgccggaggctttgatgatcaccggatagccgatgcgtttggcatgggcgcggttagcgtccatgtcgtcgcccagcgggccatcagaacctggaacggtcggaacgccagctttcttcatggcggtgatggcggacactttgtcgcccatcaggcggatagtgtcggctttcgggccgatgaagatgaaaccggaacgctcaacctgctcagcaaaattagcgttctcagagaggaagccataacccgggtgaatcgctaccgcgccagtgatctcagcggcgctgataatggccggaatgttcagatagctttttacggacggagccggaccgatgcagaccgtctcatccgctaacaatacgtgttttagatcgcgatccgcagtggagtgcacagcgacagtcttgatgcccagttctttacaggcacgcaggatgcgcagtgcgatctcgccacggttagcgatgacaattttatccagcatgttcgcctcgttactcgataactaccagcggctcgtcgaattctaccggttggccgctttcgatcagaatggctttcaccacgccggctttgtcggcttcgatctggttcatcattttcatcgcttcgacgatgcacagggtgtcgcccacgttaactttctggccaacttccacaaacgctttcgcgtccgggctcggcgtacgatagaaagtaccaaccatcggggaacgtacgatgtgaccactgatttccgctttcgccggcgcttcagccgcagcagctggtgcggcagtcgcggcggcaggcgcctgaggctgcatcatcggcgcagcataagcctgctgcataaccggatagcttgcggccggtgcagagcggctgatgcgaacagactcttcgccttcagaaatttccagttcggagatacctgattcttcaaccagctcgatcagttttttaatcttacgaatatccatgagtgggttccgtactctttgtttagtgtgattgtgacaggcgttttaccgccgtctgtaaagcgtatgaataaccatccgcccccagcccgcaaatgacgccagcggcgacatctgacagatacgagtgctggcggaagggttcgcgtgcatgcacattgctcaggtgaatctcgataaacgggatgttcacggcgagcaaagcgtcacggattgctacgctggtatgcgtgaacgcggccggattaatcaggatatagtccacgttgtctttagcctgatgaattcggtcgattaacgcatgctccgcgttggactgcaggtgatccagactcacattcagcgccgccgcttcagatgttaaacggttaacaatttcagccagcgtgagagggccatacttctcaggctcgcgggtaccgagcatgttaatgtttggaccattcaaaagcaaaatgtgaaacttcactgccattgtgtggcgatctcctgccattttcgggtaaaaaacaacatataccttcaatgcgcccttgtcaccttttcagggtcagaaaaccccgtcaggaaaaccaaagtcgcacattataacgatttcgtagcaattggcagctaaatactggtcttatcagggaagattatcaaccgctatctgaaaaagagtcgcggttgataaaggatctgcgggaaactgcacattaccggattgcgcgccaccactggcggaacttcttgtaacgccatgtca

SEQ ID NO: 5408 - DNA, 6125 bp, Unknown
  gut microbiota DNA sequence
ccccgctgccagcagggcatatataacgggctgcggcgagacgatcttcactgaccacaggtagtgtatcggcgcgaggatcgccaccagatagacgaagttgtgtaaaagttgccagcgacgccccagttttcgctgcatcgcttgcgtggaggtcaccgccagcgccagcagaatcgcccagctgatcatgcccaatgtcagataggggcgggtgataatctccgagcccagcagcgccagattgttaatgcccagctccagtagggtatagctggtcaggtgcagcgtcgcccaggcaaaacaccataaacctaacagccgacgaacgcgaatcaataatggctgcttcgcatagcgcgccagcggagagaccagcagcgtcgccagcagaaacttaagcgccattctgccggtaaagtgctggatatccttggctggatcggcgctaaagtagccctggtgcccggcccagaataaccagaccagcggcaaaaaccccgcaaggtgaagtaaaaccttcagccagacgatctgtttgacggtgaaacgcactagaagttctcccgcagattcatgccgcgatacagcgacgccacttcgtcggcatagccattaaacagcaacgtcggttgacgcttcacatcgagcacgccgccggcgccgataaaccgctcgctagcctgcgaccagcgggggtgatcgacgtgcggattgacgttggcgaagaagccgtattcgtccggcgccgccaggttccaggtggttggcggccgctcgcgggtcagctcgatactaacaatggattttatgcctttaaaaccgtacttccacggcacggtcaggcggaccggcgcgccgttttgcggcggcagcgctttgccatacaccccgacggtgagtagcgtcagcgggtgcatcgcttcatccagccgtagcccctccacgtaagggtaagcgagccccccgccgataaaccggtctttctggccgggcatttgatccggagcatagagggttttgaaggccacatagcgcgcgctgctggtgggctccaccagcgccagcagtttatgcagcgggaagccgacccaggggaccaccatcgaccaggcttccacacagcgcatacgataaatgcgctcttccagcgggaagcgtttggtcagatcgtcatggtcaagggtcagaggtttcgccacttcgccaccgatggtgagcgtccagggatcggtgcgcaggctacccgcgttcgccgccggatcggctttatcgaggccgaattcataaaaattattgtaaccggcgaccttatcttccggggtaagcgtcagattagcctgccactcggcgggtttagcaaactccagggccttgcccgctggcgctggcgggcggtcgtggcctttaaaccagtccagcaggtcggcctgcgcggcggcgggaagggaaagcgcggtcgcgctgatgcccagcattttcagcacctggcgccgcttgagcataaaaacggattcggccgtgacgtcggcttccgtcagtttttttcttttcatggtgtcctccgtcatgcgtttccctaagcatgacggagacggcgatgaatggcgaatatgtcacgaaaaattgcacattaggatgaggagccgccgccgaagcagaggcgcggtcgtccaggaatcatcggaaagtggcgcaagacgtttcctttgccgcgcatgacccggcatctttagcagggaaaagagggcggcaagcaggccaaacggtaaaccggtaataatttgcgtcgctggcgcgggtttgccatcctgcgtctaaaattaaagcgcttctggcgcaggccgcaggcgggcgacgattggcaaattttttctgcaaactatactcgctatcggcatacttttaccgataatacgcattccattgccagactcgccatctttgatagtatgcgtcgcgctttaaaaggttaatgcttgcggcaaggcgcgcgccggcacgggagcctgatggttcatcgggtagtcattcactcgcggagttaacacagggatgcgattaacgacgaagttctcagcctttattacgctgctaactagcctgaccatctttgtcacgctgattggcgcttcgctgagtttttataacggcattgagaacaaggtcgaaaaccgcgttcaggcggtggcgaccatgctggataaccggctcatcaccacctctttcgataagcttgaaccgcagttggatgagctgatgacgccgatcgagatcgtgcatatcgatttcatgctcaacggcaaaccgctctacagccattcccgacccgatagctatcgcccgctcggcagccatgagcaattccgtgagatcacggttcagtcgcttaaacatcctggtattacgctgcatctggtctacgttgacccgatggtgaactatttccgttcgctgtcgatcactgccccgctgtcgatctccattggcttcatggtggtgattattttcttcgccgtccgctggatccgccgccagctggccggccaagagctgctggagctgcgttccacgcgtatcctgagcggcgagcgcgggccgcaggtgcgcgggtcggtctatgaatggccggccagcaccagtagcgcgctggatatgctgctgtcggagctacagttcgccagcgatcagcgcagccggatggatacgcttattcgctcctacgcggcgcaggattcgaaaaccggactgaataaccgcctgttttttgacaatcagctggccacgctgctggaagaccaggagaaggtgggagcctacggcatcgtgatgatgatccgtctgccggagtttgatctgctacgggacaactggggacgggcggcggccgaagaacattactttacgcttatcaacctgctctctacctttattatgcgttaccccggcgcgctgttggcgcgctatcaccgtagcgacttcgccgtgctgctgccgcaccgtacgttgaaagaggcggatagtatcgccggcctgttgctgaaggcgatggatgcgctgcctccaacgcgtatcctcgatcgcgacgatatgatgcatatcggcatctgttcgttccgcagcgggcaatcggcggcgcaggtgatggaacatgcggaagcggcgacgcgcaacgcggtgctgcagggcagcaacagctggtcggtctatgatgacacccttccggagaaaggtcgcggcaacgttcgctggcgaacgctgatcgaacagatgctgagccgcggcgggccgcggttgtaccaaaaaccagctgtcacccgcgacgggcgggtacatcatcgtgaactgatgtcgcggatgtacgacggtaaagaagaggtgattgcagcggaatacatgccgatggtgctgcagtttggcctggcggaggagtatgaccgcctgcaggtaacgcgcctgctgccgtttttaggcttctggcccgaggagaatctggcgctccaactgtcggtggagtcgctgatccgtccgcgtttccagcgctggctgcgcgatgccttgatgcagtgtgaaaaatcgcagcgtcagcggattatttttgaacttgcagaggcagatgtttgtcaatatatcggccgtctgcagccggttatgcgattggttaacgctctgggcgttcgggtggcagtggttcaggcggggttaaccctggttggaaccagctggatcaagcagctggatgcggagctgatcaaactgcatccgggtctggcgcgcaacatcgaaaagcgcagcgagaaccaactgctggtgcaaagcctggtggaagcctgtaaaggcatgcctatgcaagtttttgcgacgggcgtacgcagccgcagcgagtggttggtactgtcccaatgcggtgtcacgggcgggcagggggaattttttgccgcctcacagccacttgacacaaatgtgaaaaaatattcgcaaagatactcggtttgatctgccgtttagcgtgatttcacgtagaataacgcgcgccatcgtgaagggggtgtgcttgtctacctgccggatcatcgcaatgtaaatgccagtgaccctcctttgacaggttacaaattcaggcgtggagcgctgctgaagatttcagcaatgaacggagtcgggaaaatttgtaacaaaggaaatgaactgcactaattttcaccgcagcaggtgatttttgcgccttgtcgctgctgcgtgtggttggtaaagtaagcggattttgttttccgccccagctttcaggattatcccttagtatgttaaaaaaatttcgtggcatgttttccaatgacctgtccattgacctgggtaccgcgaatacccttatttacgtaaaaggacaaggcatcgtattgaatgagccttccgtggtggccattcgtcaggatcgtgccggatcgccgaaaagcgtcgccgccgtgggtcatgaagcgaagcagatgctcggccgtaccccgggtaatatcgcggcgattcgcccgatgaaggacggcgttatcgctgacttcttcgtgacggaaaagatgctgcagcactttatcaaacaagtgcacagcaacagctttatgcgcccgagcccgcgcgtgctggtgtgtgtaccggttggcgcaacccaggtcgaacgtcgcgctattcgtgaatccgcgcagggcgcaggcgcccgtgaagtcttcctgatcgaagagccgatggcggcagcgattggcgcaggcttaccggtttctgaagcgaccggctccatggtggtggatatcggtggcggtaccactgaggtggcggttatctccctgaacggcgtggtctattcctcttctgtacgtatcggcggtgaccgcttcgacgaagccgttatcaattacgtgcgtcgtaactacggctccctgatcggtgaagcgaccgctgaacgtatcaagcatgaaatcggttcggcttacccgggcgatgaagtgcgcgaaattgaagtgcgcggtcgtaacctggcggaaggcgtgccacgcggcttcaccctgaactcaaacgaaattcttgaagcgctgcaggagcctctgaccggcatcgtgagtgcggtcatggttgcccttgagcagtgcccgccggaactggcgtctgatatctctgaacgcgggatggttctcaccggcggtggtgcgctgctgcgcaacctggaccgtctgttaatggaagaaaccggtattccagtcgtggttgctgaagatccgctgacctgcgtagcgcgtggcggcggcaaggcgctggagatgatcgacatgcacggcggcgacctgtttagcgaagagtagtcagcctgaaggtccggggcggcatacgagctgcccctggtctttactgacacgagaatacgcatagcctatgaagccaatttttagccgtggcccctcgctacagattcgccttattctggcggtgctggtggcgcttggcgtgattatcgccgacagccgcctgggtacgttcagtcaaatcagaacgtacatggatacagccgtcagccctttctactttgtctctaatggtccccgggaactgctcgacagcgtatcgcagacgctagctacccgcgaccagctcgaactggaaaaccgcgcgctgcgccaggagctgttgctgaaaaacagcgatctgctgatgctgggccagtacaagcaggagaacgcgcgcctgcgtgaactgcttggctcgccgctgcgccaggacgagcaaaaaatggtgacgcaggtcatctcaacggtcaacgacccttacagcgatcaggtggttattgacaaaggcagcgtgaacggcgtctatgaaggccagccggttatcagcgataaaggcgtcgtggggcaggtcgtggccgtggcgaaaatgaccagccgggtgctgctgatctgcgatgccactcatgcgctgccgatccaggttctgcgtaacgacattcgcgtcattgccgccggtaacggctgcacggacgatctccagcttgagcatctgccggcgaataccgatattcgcgtcggcgacgtgctggtgacctccggtctcggcggtcgtttccctgaagggtatccggttggggt

SEQ ID NO: 5409 - DNA, 3794 bp, Unknown
  gut microbiota DNA sequence
cccaaagaacgctgatatgtcactgacgcgcttgctcatcaaagacttccgcaatattgaaagcgcggatctcgctttatctcccggctttaacttcctggttggcgcgaacggcagcggcaaaaccagcgtgctggaagctatctacacgcttggccacggccgggcatttcgcagtttgcaaattggccgagtgatccgccacgagcaggatgcgtttgttctgcatggccgtctgcagggtgaagagcgggaaaccgccatcggcctgaccaaagacaaacagggcgacagcaaggtgcgtatcgacggcaccgacggccacaaagtggcggagctggcgcacctgatgccgatgcagctgattacgccggaggggtttactttactcaacggcggccccaaatacagaagagcattccttgactggggatgctttcataacgaagccggattcttcaccgcctggagcaatctgaagcgcctggtcaagcagcgcaacgccgcgctgcgtcaggtcagccgctatgcccagctgcggccttgggatctggaattaatcccgctggcggagcagatcagccgctggcgtgccgaatacagcgccgctatcgtcgaagacatggcggatacctgtcagcaatttttaccggaattcacgctcaccttctctttccagcgcggctgggaaaaagagaccgactacgcggaggtgttggagcggaatttcgagcgcgacagaatgttaacctacaccgcccacggcccgcataaagcggattttcgcattcgcgccgacggggcgccggtggaagataccttgtcgcgcgggcagcttaagctgctgatgtgcgccctgcgtctggcgcaaggagagttcctcacccgcgtcagcgggcggcgctgcctgtacctgatagatgattttgcctcggaacttgatgatgcccgccgcggtctgttatccagccgcctgaaagcgacgcagtcgcaggttttcgtcagcgcgatcagcgctgaacacgttatggacatgtcggacaaaaattcgaagatgttccgcgtggaaaaaggtaaaataacggattaacccaagattaaatgagcgagaaacgttgatgtcgaattcttatgactcctccagtatcaaagtcctgaaagggctggatgcggtgcgtaagcgcccgggtatgtatatcggcgacacggatgacggcaccggtctgcaccacatggtattcgaggttgtggataacgctatcgacgaagcgctcgcgggttactgcaaagatatcgttgtcaccatccacagcgataactccgtctccgtccaggatgacggccgcggcatcccgaccggcattcacccggaagagggcgtctccgcagcggaagttatcatgaccgtcctgcacgctggcggtaaattcgatgataactcctataaagtttccggcggtctgcacggcgtaggcgtctcggtggttaacgccctgtcgcagaagctggagctggttatccagcgcgataacaaagttcacaagcagatgtacgaacacggtgtgccgcaggcaccgctggccgtgactggcgaaaccgacaaaaccggcaccatggtgcgtttctggccaagcctggaaaccttcaccaatgtcaccgaatttgaatatgacatcctggcgaaacgcctgcgcgagctgtcgttcctgaactccggcgtctctatccgcctgcgcgataagcgcgacggcaaagaagaccatttccactacgaaggcggcatcaaggcgttcgttgagtatctcaacaagaacaaaacgccgatccacccgaatattttctatttctccaccgaaaaagacggtatcggcgtggaagtggccctgcagtggaacgacggcttccaggaaaacatctactgctttaccaacaacattccgcagcgtgacggcggtactcacctcgccggcttccgcgcggcgatgacccgtacccttaacgcctatatggacaaagagggctacagcaaaaaagcgaaagtcagcgccaccggcgacgatgcgcgtgaaggcctgattgccgtggtatccgtgaaggtgccggatccgaaattctcctcgcagaccaaagacaagctggtctcctccgaggtgaaatcggcggtggagcagcagatgaacgaactgctgagcgaatacctgctggaaaacccatccgatgcgaaaatcgtggtcggcaaaattattgacgccgcgcgcgcccgtgaggccgcacgtcgcgcccgtgagatgactcgtcgtaaaggcgcgctggatctggcaggcctgccgggcaaactggcggattgccaggagcgcgacccggcgctgtccgaactgtacctggtggaaggggactccgcgggcggctctgctaaacagggtcgtaaccgcaagaaccaggcgatcctgccgctgaagggtaaaatccttaacgttgagaaagcccgcttcgataaaatgctctcttcccaggaagtggcgacgctgatcaccgcgctgggctgcggtatcggtcgcgatgagtacaatccggataaactgcgctaccacagcatcatcatcatgaccgatgcggacgtcgacggctcgcacattcgtaccctgctgttgaccttcttctatcgtcagatgccggagatcgtcgagcgcggccacgtctacattgcccagccgccgctgtacaaagtgaagaaaggcaagcaggaacagtacattaaagacgacgaagcgatggatcagtatcagatctccatcgcgctcgacggtgcgaccctgcacaccaacgccaatgcgccggcgctggcgggcgaaccgctggaaaaactggttgccgagttcaatgccacccagaaaatgattggccgcatggagcgccgcttcccgaaagcgctgctgaaagagcttatctatcagccgaccctgaccgaggccgacctggcggacgagcagaaggtgacccgctgggtgaacaccctggtctccgagctgaacgagaaagaacagcacggcagccagtggaaattcgatctccacgagaacaaagaactgcagcattttgagccggttattcgcgtacgtacccacggcgtggataccgactatccgctggataacgagttcattatggggccggaatatcgtcgtatttgtgccctgggcgagaaactgcgcggcctgatggaagaagatgcttacatcgagcgcggcgaacgtcgtcagccggtagccagcttcgagcaggccctggactggctggtgaaagagtcccgtcgcggtctctccatccagcgctataaaggtctgggcgagatgaacccggatcagctgtgggaaaccaccatggatccggacagccgtcgcatgctgcgcgtgaccgtcaaggatgccatcgctgccgatcagctgttcaccaccctgatgggcgatgccgttgagccgcgtcgcgcgtttatcgaagagaatgccctgaaagcggcgaatatcgatatttaagccgcatgtttcccggtaacgagttttaccggggcaacaggatgtataagcccggtcgcatcgcgcgatcgggcttttcttttgccgctaaaagaggaatccgctgctgcggttccatccccctttctggccgacacttttactgttttttgagcggaatcgcgttagcatgaggggagactcatcttacccggggaccctatggctattaaattgattgcaatcgatatggacggcacgctgctgctgcccgaccatacc

SEQ ID NO: 5410 - DNA, 16585 bp, Unknown
  gut microbiota DNA sequence
tgccggtcaacctgcaccgcaggcctatcagcctgagccagcgccgtatcagcagccggcttacgatccgtatgccggtcaacctgcgccgcaggcctatcagcctgagccagcgccgtatcagcagccaacttacgatccctatgccggtcagcctgcgcctcagacctatcagcagccggcttacgatccgaatgccggtcagcccgcgccgcagacctaccagcagccggcttacgacccgcatgccggccagcccgcgccgcagccgtatcagccggagccagcggcgtatcagccgcaaagcgcgccagttcccccaccggagccagagcccgaggtcgtgcaggaggaagtgaaacgtccgccgctctattatttcgaggaagtggaagagaagcgggcgcgcgaacgcgagctgttggcctcctggtatcagccaattcctgagccggaaagtccgattgccactaaaccgctgacgccgccgaccactgcgtccaaaccgccagtggagacaaccgtagtctctgcggtagcggctggggtgcatcaggctaccgccgccagcggcggcgcggcggcagcaacttcgtccactgccgcatccgctgcggctacgccattgttcagcccggcgtccagcggcccacgggttcaggtgaaagagggcatcggtccaaaactaccgcggcccaatcgcgtgcgtgttcctacgcgtcgggaactggcctcctacggcatcaagctaccgtcgcagcgggaggcggaacagcgcgcgcggcaggcggagcgcgatccgcattatgatgatgagctgctctcggatgaggaagcggatgctatggagcaggatgaactggctcgccagttcgccgccacccagcagcagcgctacggtcatcgctgggaagacgataacgcgactgatgacgatgaggccgacgccgcggcagaagcggagctggcgcgtcagtttgccgctactcagcagcagcggtacgctaccgagcagccgccgggcgccaacccgttctcgccggcagattatgaattctcgccgatgaaaacgttggtcaatgacggcccgagcgaaccgctgtttacgcccacgccggaagtccagccgcagcagccggcccagcgctatcaacaaccggcggccgctccgcagcagggttatcaacctgcgcagcatcagccgatacaccatcagcctgtgccgccgcagccgcaatcctatccgactgcgtcgcagcccgtacagccgcaacaaccggttgccccgcaggggcatcagcctgccgcccctgcgccgcaggagagcctgatccacccgctgctgatgcgcaatggcgatagtcgaccactgcaaaagccgaccacgccactgccgtcgctggatctgcttaccccgccgccgagtgaagtcgagccggtggatacctttgctctcgagcagatggcacgcctggtggaagcgcgactcgccgatttccgcattaaagcggatgtggtgaactactcaccggggccggtgatcacccgcttcgaactgaatctggcgcctggcgttaaggccgcacggatctctaacctgtcacgggacctggcgcgatcgctgtcaacggtcgccgtgcgcgtggtggaggtgatcccgggcaaaccgtatgtcgggcttgagctgccgaataaaaaacgccagaccgtctacctgcgtgaagtgctcgacaacgccaagttccgtgataacccatctccgctcaccgtggtgctgggtaaagacatcgctggcgatccggtagtagccgatctggcgaaaatgccgcatctgctggtggccggtaccaccggttccggtaagtctgttggcgtcaacgccatgatcctcagcatgctctacaaggcgcagccggaagatgtgcgtttcattatgatcgacccgaaaatgctcgagctgtcggtctacgaaggaattccgcacctgctgacggaagtagtcaccgacatgaaagacgccgccaatgcgctgcgctggagcgtcaatgagatggagcgccgctacaagctgatgtcggcgctgggcgtgcgtaacctcgcgggctacaacgagaagatcgccgaagccgcgcgcatgggacgtccgatcccggatccgtactggaagcctggcgacagcatggacgccgtacatccggtgctggaaaaactgccgtacatcgtggtgctggtggatgaattcgccgatctgatgatgaccgtcggcaaaaaggtggaagagctgatcgctcgcctggcgcagaaagcgcgcgcggcggggatccacctggtgctggcgacacagcgtccgtcggtagatgttattaccggcctgattaaggccaacatcccgacgcgcatcgcctttaccgtgtcgagtaaaattgactcacgtaccattctcgatcagggcggcgcggaatcgctgctgggtatgggggatatgctttactccgggccgaactctaccacgccggtgcgtgtccacggggcgtttgtgcgcgaccaggaagtccacgccgtggttcaggactggaaagcccgcggtcgcccgcaatatgtggatggcattacctccgacagcgaaagcgaaggcggcggtggcggcttcgacggcggggaagagctggatccgttgttcgatcaggcagtcaactttgtgaccgagaagcgcaaagcgtcgatttccggggttcagcgtcagttccgcatcggctataaccgtgccgcgcgtattatcgaacagatggaagcgcagggtatcgtcagcgagcagggccataacggtaaccgcgaagtgctggcgccgccgccctttgaatgagtgcaaagttgggtaaataagcgcaaaatcagccaattcttctgtcccgccgccgccggcggtcctacagtaggggcagaagaggctcccgcgtcgggagtgacgcacattaaggaagaacaatgaaaaaactcgcaatcacctgtgcattactgtctggtatggtcgtcagccaggtctgggcagatgcggccagcgacttaaaaagccgtcttgataaagtgagcagcttccatgccagcttcacgcaaaaagtcaccgacggtagcggtaacgccgtgcaggacgggcagggagacctgtgggtgaaacgcccgaacctgtttaactggcatatgacccagccggatgagagcgtcctcgtttcggatggtaaaacgctgtggttctataacccgttcgtcgagcaggccacggcgacctggctgaaagacgccaccagcaacacgccgtttatgctgattgcccgcaaccagtccagcgactggcagcaatataatatcaagcaaaatggcgatgattttgtgctgacgccaaaaagcggcagcggcaacctcaagcagttcacgatcaacgtcggtcgggacggcactatccatcagttcagcgccgtcgagcaggatgatcagcgcagcagctatcagctgaaatcgcagcagaacggcgccgtcgacgcagctaagttcacctttacgccgccgaaaggggtgacggtggacgatcaacgtaagtagaggcgaaagtgagcaatctgtcgctcgatttttccgacaacgcgtttcaacctctggccgctcgcatgcggccagaaaatttagcgcagtatattggccagcagcacctgctggcgccgggtaaacccctgccgcgggccattgaggccgggcacctgcattcgatgatcctctgggggccgccgggtaccggcaagaccactctggcggaagtgattgcccgctacgccagcgccgatgtcgaacggatctcagcggtaacctccggggtgaaagagattcgcgaggctattgagcgcgcgcggcagaatcgcaacgccggccggcggaccatcctgtttgttgacgaagtgcatcgctttaataaaagccagcaggatgcctttctgccgcatattgaagacggtaccattacttttattggcgcgaccaccgaaaacccctcctttgagcttaactcggcgctgctctcccgcgctcgcgtctacttactgaaatcgctcaccaccgacgatatcgagcgggtgcttgaccaggcgatgaacgataaaacccgcggctacggcggccaggatatcgttttgccggatgagacccgcagggccattgccgagctagtgaatggcgacgcgcggcgagcgctgaataccctggaaatgatggccgatatggccgaaagcgatgactcgggcaagcgggtgctgatggcggaactgctgaccgagatcgccggcgagcgaagcgcgcgctttgataataaaggcgaccggttctacgatttgatttccgccctgcataagtcggtgcgcggtagcgcgccggatgcggcactttactggtacgcgcggatcatcaccgccggcggcgatccgctgtacgttgcccgccgctgtctggcgattgcctcggaagatgtcggcaacgccgacccgcgggcgatgcaggtcgccatttcggcgtgggactgctttacccgcgtcgggccggcggaaggcgaacgggcgattgcccaggccattgtctatctggcctgcgcgccgaagagcaacgcggtgtacaccgccttcaaagcggcgctggccgacgcgcgggatcgtcctgactacgacgttccggtgcatctgcgcaatgcgccgacgaagctgatgaaagagatgggctacggccaggagtatcgttacgctcatgacgaacccaacgcctacgccgccggcgagcagtacttcccgcaggaaatggcgcaaacgcgctattatcacccgacaaaccgggggcttgagggtaaaattggcgaaaagctcgcctggctcgctgaacaggatcaaaatagcccgataaaacgctaccgctaattgaggcgttgcggtaaggttattacactatttccgtggtcgtagtctgcggccacttttcttttttaattcgataagcacaggataagcatgctcgatcccaatctgctgcgtaccgagccagacgcagtcgcagaaaaactggcacgccggggctttaagctggatgtagataaacttcgcgcgcttgaagagcgtcgtaaagttctgcaggtgcaaacggaaaacctgcaggcggagcgtaactcccgatcgaaatccattggccaggcgaaagcgcgcggggaagacatcgagccattacgcctggaagttaacaagcttggcgaacaactggatgctgcaaaatccgagctggaaacgctgctggcggaaattcgcgatatcgcgctggcgatcccgaatattcctcatgatgatgtgccggttggtcgcgacgaaaacgacaacgttgaagttagccgctggggtacgccgcgtcagttcgatttcgaggtgcgcgatcatgtgacgctgggtgaaatgcacggggggctggattttgccgccgccgttaagctcaccggctcgcgcttcgtggtgatgaaagggcagctggcccgtctgcaccgcgccctggcgcagttcatgctggatctgcacaccgaacagcatggctacagcgaaaactatgtcccgtacctggtaaaccaggacaccctgtatggcactggccagctgccgaaattcgccggcgacctgttccatacccgtccgctggaagaagaggctgacagcagcaactacgcgctgatcccgacggcggaagtgccgctgaccaacctggtgcgcgatgaaatcatcgacgaagacgatctgccgatcaaaatgaccgcccatacgccgtgcttccgctctgaagccggttcctatggccgcgacacccgcggtctgatccgtatgcaccagttcgataaagttgaaatggtgcagatcgtccgcccggaagactctatggccgcgctggaagagatgaccggtcacgccgagaaagtgctgcagctgctgggcctgccgtaccgtaaggtcgcgctgtgcaccggcgatatgggcttcagcgcctgcaaaacctatgacctcgaagtatgggttccggcgcaaaacacttatcgtgagatctcctcctgctccaacgtctgggatttccaggcgcgtcgtatgcaggctcgctgccgcagcaagtccgataagaagacccgtctcgttcataccctgaatggttctggcctggcagtaggtcgtacgctggtggcgctgatggaaaattatcagcaggctgatggccgtatcgagatcccggaagtgctgcgcccgtatatgcgcggcctcgaatatatcggctaaacttctcactccttcttttaaaagcgcctgcgggcgctttttttacgcccttattgataccgggcaataatccttgccgcgaatgcagtgatactccctttggattaaaccagcataaaaaaccaataatatcgcaaagcattatatatatgtctatataacgcttgtcagtttattgtgagcaaccaaagcgagtatccatgaaaattaaagcccctgatgctttactggctgctgaggtaagccgccgcggtctgatgaaaaccacggcaataggcggcctggcgctggccagcaacgcactaacgttaccctttacccgactgtcgcatgctgccgatacgccggggcccgccagtgagaaggtggtctggagcgcctgcaccgtcaactgcggtagccgttgcccgctgcgcatgcacgtggtggatggcgcgattaaatacgtcgaaaccgataataccggtgacgataactatgacggtttgcatcaggtccgcgcctgcctgcgtgggcgttcaatgcgccgccgagtctataatccggaccgtctgaagtacccgatgaagcgcgttggtaaacgcggtgagggcaagttcgagcaaatcagctgggaagaggcgttggataccatcgccagcaatatgcagcggctgattaaagagtacggcaatgaatccatctatctgaactacggcaccggcacgctcggcgggacgctgacccgctcctggccgccggggaaaacgctgattgcccgtctaatgaactgctgcggtggctatctcaaccattatggcgactattcatcagcgcaaattgctgccggtctgaattacacctacggcggctgggcggacggcaacagcccatcggatattgaaaacagtcagctggtggtgctgttcggcaataaccccggcgaaacgcggatgagcggcggcggggtgacgtactaccttgaacaggcgcggcagaaatccaatgcccggatgataatcatcgatccgcgctataccgacaccggcgccgggcgtgaagatgaatggatcccgattcgtcctgggaccgatgcggcactggtttcgggcctcgcgtgggtgatgatcaccgagaatctggtcgatcagccgttcctcgataaatactgcgtgggatacgacgagaaaacgctgcccgccggtgcgccagccaatggtcattacaaagcttacattcttggccagggcactgacggtatcgccaaaacgccggagtgggcctcgacgattaccggtattccgcgcgaacgcattgttaaactggcgcgcgaaattgccaccgccaaaccggcctatattagccagggctggggtccgcagcgtcacgccaacggtgagatcgccacccgcgccatctcaatgctcgccattctgacgggtaacgtcgggatcaacggtggcaatagcggggcacgcgagggctcgtatagtctgccttttgagcgtatgccgacgctggagaatccggttgagaccagtatctcgatgtttatgtggaccgatgcgattgagcgcggcccggaaatgaccgctctgcgcgacggcgtacgcggtaaagataagctcgacgtgccgatcaaaatgatctggaactatgcgggcaactgtctgattaaccagcattctgagatcaaccggacccacgaaatcctgcaggacgacaagaaatgcgagatgattgtggtcattgactgccatatgacctcctcggcgaaatacgctgatattctgctgccggactgtaccgcctccgagcagatggatttcgcgctggatgcctcctgcggcaacatgtcctacgttatctttgccgatcaggccatcaagccgcgctttgaatgcaaaaccatctatgagatgaccagcgaactggcaaagcgtctgggcgtcgaagagcagtttaccgagggccgtacccaggaaggctggatgcgctatctttatgagcagtcgcgcaaagcgattcccgacctgccggatttcgacaccttccgtcagcagggcatctataagcagcgcgatccgcaaggtcatcatgtggcctacaaagccttccgtgaggatccgcaggctaatccgctgaccacgccttcgggcaagatcgaaatttactcgcaggatctggcgaaaatcgcggctacctgggagctgccggaaggggatgttatcgatccgctgccgatctacaccccgggtttcgaaaactacaacgatccgctgacagagaaatacccgctacagctcaccggcttccactataaatctcgcgtccactcgacctacggcaacgtcgatgtgctgaaggccgcctgtcggcaggagatgtggattaacccgatcgatgcccgcaagcgcggcattgccaacggcgatcgtattcgcatcttcaacgatcggggtgaagtgcatatcgaagcgaaggtgacgccgcgcatgatgccgggcgtcgtcgcgctgggggaaggggcctggtacaacccggacgcctcgcgtgtggatcaggcgggcagtatcaacgtgctgaccacccagcgtccgtcgccgctggcgaagggaaacccgtcgcataccaacctcgttcaggttgagaagctgtaaggagtaaccgatgacaactcagtatggattttttattgattccgcccgttgcaccggttgcaaaacctgcgaactggcctgtaaggactacaagaacctgaccccggaggtcagcttccgccgcatctatgaatatgccggcggcgactggcaggagaacaacggcgtctggcagcagaacgtgtttgcctattacctctccatcgcctgtaaccactgtgaagatccggcctgcaccaaggtctgtccgagcggcgcgatgcataagcgcgaagacggttttgtggtggtcaacgaagaggtatgcattggctgccgctactgccatatggcctgcccgtacggcgccccacagtacaacgccgacaaaggccatatgaccaagtgcgatggctgtcacgagcgcgtcgccgaggggaaaaagccgatctgcgtcgagtcctgcccgctgcgggcgttggatttcgggccgattgccgaactgcgcgctaagcacggccagctggccgcggtagcgccgctgccgtcggcgcactttacccggccgagtatcgttatcaaacctaacgccaatgcccggccgtgtggcgataccaccggttacctggcgaacccgaaggaggtgtgagatgggaaacggatggcatgaatggccgctgatggtctttacggtcttcggccagtgcgtcgtaggcggctttattgttctggcgctggcgctgatgacaggcaagctttcccgtgagcaggagcagcgcgtggtgggcagtatgttcggcctgtgggtattgatggggatcgggtttattgcctcgacgatgcaccttggctcgccgctgcgggcctttaattcgctgaatcgcgtgggagcctcgtcgctgagtaatgaaatcgccagcggggcgatcttcttcgccgtcggcggaattggctggctgctggccgtgtgcaaaaagctgcctgccggcctgcggagcctgtggctggtggtgaccatggtgctgggcgtgattttcgtgtggatgatggtgcgggtatacaacaccatcgacacggtgccgacctggtacaccgtttggacgccgctgagcttcttcctgacgctgtttatcggcggtccactgctgggctacctgctgctgcgcgtcgcaggcgtcgatggttgggcgctgcgcctgctgccggtggttagtttgctggcgctgctggtcagtattatggtggtcgtgatgcagggaagtgaacttgccaccatccgcagctcagttcagcaggcctccgccctggtgccggattacgggttgcttatggcctggcgcgtagtgctgctggcgctggccctggcctgctggtgcgtgccgcagattcgcggccgcaaaccggcggtctcgctgctcggcctggcctttgttctgatactggcgggagagatgatcggccgcggcgtattctatggcctgcatatgaccgttgggatggctgtcgccagttaaccacctccatcatgccggtgcctaaccaccggcatgatgaaaacgtgctgtcgatagatgaaatttttcaactgaaattaacttcggcatttattaataaaccagcaaaaacaatagcgtattatctgttgtctcacctttttccatcctctggataaaaaacttctatcgtagccgacaaaaccgcgtcacgcctgatttcaggtggattgacaatgtttttagcagtggcatgatgcgctcgcgatctgaacattcctcacggtttttacccatgaccatctacacccggccagtgcaaatgctgctctgtggcctgcttttattgaccctggcgatagcggtgctgaatacgctcgtcccgctctggctcgcccatgaaaacatgccaacctggcaggtcggcatggtggggtcatcctattttaccggcaacctggccggtacgttgctggccggctgggtgatcaagcgcctggggtttaaccgtagctattatctcgcatcgttaattttcgccgtcggctgcgtagggctggggatcaccgttggcttctggacatggctgagctggcgttttatcgccggcgtaggttgcgcgatgatctgggtggtggtggaaagcgcgctggtttgcagcggcacttcccgcagtcgtggtcgtctgctggcggcgtacatgatggtctattacgtcggtaccgtactgggccagctgatggtcagtaaattacccaccgatttaatgagcgtcctgccgtgggtgaccggcctggcgctggcggcaatcctgccgttgctgtttacccgcattatggggcaggcagaagaaccgcatgaaacggtacgtatctggccgatgctgaagctgcgccaggcgcgccacggggtcaatggctgtattatttcggggattgtcctcggctcgctgtatggcctgatgccgctgtggctgaaccatcagggcgtcagcgactccggcatcggcttctggatggcggtgatggtgagtgcggggatcctcggccagtggccggtagggcgcctggcagaccgctacggtcgcctgctggtgctgcgggtacaggtctttgtggtcattctgggatgtctggcgatgcttagtcaggcggcaatggctccggcgctgtttgtgcttggggcatctggtttcacgctgtatccggtggcgatggcctgggcctgtgaaaaagtggagcaccatcagctggtggcgatgaatcaggcgctgctgatgagctataccatcggcagcctgctgggcccgaccctgacggcgatgctgatgcagaacttctcagacaacctgctgtttatcatgatcgccagcgtgtcgtttatctatctgctgaccctgctgcgcaaagccgggcatcatccgacgccggtggcgcacgcctgaccctgcaacgcgcagcgcatgctgcgcgtcatctgctgcaatcgcataggcttactgccgcagagaggacaagtcgtttttcatgagaatgaaacggcggggcggacacagcttcccacgccgttgcaggccggcataagcgcatcaccggcccgggcgggattagtacattactttgtgaccatactgctcaaggatgccttttacccgctccatggtctctttcttcggcggatggacgccgtccagcttgtactcttcgcccatcgctacccatttgtgtttacccagctcatggtagggcagcagctcgattttttcgacattgcccatatcgcgggtaaattcgcccaggcggtgcgcggaatcatcatcgtctgaccagccgggaaccaccacgtagcggatccagacattgatattcttcttcgccagatactgggcgaattccagcgtacgatggttagagacgcccaccaggttctggtgaatctcatcgttcatctgcttgagatccagcatcaccaggtctgttacctccagcagctcgtcgataaccggatcgtagcgacgtacgaagccgttggtatccaggcaggtgtggatgccttctttcttacacgcgcggaaccagtcgcgaacaaactccgcctgcaggatcgcctcaccgcccgaggcggtgacgccgccgccggaagcattcataaagtgacgataggtcaccacctctttcattaattcttcaacggtgatttctttgccgccgtgggtatcccaggtgtcacggttatggcagtacaggcagcgcatcaggcagccctggaaaaaggtaataaagcggatgcccgggccatcaacggtgccacaggattcaaaggagtgaatgcgaccaataactgacattgcggtgttttctccagatgtggcccatccggggccgtgttggtgcgcagctcagcggctgcgtcgagtctgttttgacaggtacccaaagtatagataactggcaaagcaggctggggcggggaatgcttgttaaaaaggccccactgatgtggggcctttattgtacgccttttcagtcagacagggaattacatggtctgagtgaaggtacgggtaataacatcctgctgctgttctttggtcagggagttaaaacgtacggcgtagccagatacgcggatggtcagctgcggatatttttccgggttttccatcgcgtcgagcagcatttcgcggttcatgacgttcacgttcaggtgctgaccaccttcgatggacgcttcgtgatggaagtaaccatccatcagacctgccaggttggtcttacgaacttcgtcgtctttacccagcgcgttcggcacgatagagaaggtataagagataccatctttcgcgtaagcaaacggcagtttagcgacggaggtcagagaggctactgcacctttctggtcacggccgtgcatcgggttagcacctggaccgaacggcgcgccagcgcgacgaccgtctggggtgttaccggttttcttaccgtacaccacgttagaggtgatggtcagaacagactgagtcgggatagcgttgcggtaggtgtgcagtttctgaattttcttcatgaaacgttcaaccaggtcaacggccatgtcatcgacgcgagggtcgttgttaccaaactgcgggtattcgccttcgatttcgaagtcaacagccagaccgtcttcgtcacgaatcggtttaactttcgcatatttgatagcagacagggagtcagcagcaacggacagaccagcgataccacacgccatggtgcggataacgtcacggtcgtgcagcgccatcagagaggcttcgtagctgtacttgtcgtgcatgtagtggatgatgttcagcgcggtgacgtactgtttagccagccagtccatgaagtgatccatgcgatccattacttcgtcgaagttcaggacgtcgcctttgatcggttcagatttcggaccaacctgcattttcagtttttcatccacgccgccgttgatagcgtacagcatggttttcgcgaggttagcgcgagcgccgaagaactgcatttgcttaccaacaaccatcgggcttacgcagcatgcgatagcgtagtcgtcgttgttgaagtccggacgcatcaggtcatcgttctcatactgcagagaagaggtatcgatggacactttagcggcgaatttcttgaagctcagcggcagtttttcagaccacaggatagtaatgttcggctccggagacggccccatggtgtacagggtgttcaggaagcggaagctgtttttggtcaccagagtacggccgtcaacgcccataccgccgatggattccgttgcccaaatcgggtcgccggagaacagttcatcatattccggggtacgcaggaagcgaaccatacgcagtttcatgaccaggtggtcaaccatttcctgcgcgtcttgctcggtgattttacccgcctgcaggtcacgctcgatgtagatatccaggaagctggaggtacgaccgaaggacattgccgcgccgttctgagatttcacggcagccaggtaaccgaagtaggtccactgaatcgcttcctgagcggtggtcgccggaccagagatgtcatagccatatttagcggccatctctttgatctggcccagtgcgcggtgttgttcagcgatttcttcacgcagacggatggtcgcttccaggtcttcgccgctttccagtttcgcttgcagagagttgaactgggcgaatttgtctttcatcaggaagtcgataccgtacagcgcaacgcgacggtagtcaccgatgatacgaccacgaccgtaagcgtccggcagacccgtcagcacgccggatttacggcagcgcaggatgtccggggtatagacgtcgaaaacgccctggttgtgagttttacggtactctgtgaagatttttttcagcatcgggtccagctcgcgattatacgctttgcaggaaccttcaaccattttgataccaccgaacgggatgatcgcacgtttcagcggcgcttcggtctgcagaccaacgattttttccagacctttctcgatatagcccgcgtcgtgagaggtgatggtggaagccagggcagtgtcaaaatcaacaggcgcgtgagtgcggttttcctgttttacaccttccattacggtgtcccacagcttggtggtcgcttcagtcgcgccagccaggaaggattcgtcgccttcatatggggtgtagtttttctgaataaagtcacggacgttgacttcattctgccagtcacctttcgcaaaaccttcccaggctgtggctaacttttcattaagctcggacatgtaacacctaccttcttaagtggattttttatttactgcctgaaacaacccttagtgatggtcgttgccacgcaggtaaatgacccagtatgtcaacccgaccagcagacccccgccgataatgttcccgatagttaccggaatcaggttatcagtgatgaagttcataacggtcaagtgagagaaactttccggagtcgaaccgatggcggtccagaattccgggcttgcaaagttgcggattacgatacccatcgggatcataaacatgttggcgatgctgtgctcaaagccgctggcaacgaacatcgctaccggcaggaccatgatcatcgctttatccatcaggctacgaccggaatagctcatccatacggcgagacaaaccatcaggttagcgaggatacccaggctcacggcctccacaaaagtatggtgcattttgtggtcggcggtctgcagaacgtttagcccccagccgccgttggcagtcatatattcgcctgataaccacatcagcagcacaaacagcagcgcgcccaccaggttaccaaaatagacgttgagccagttttttgccagttgcccccaggtaattcgaccgctggctttggccaccacgatcagtaccgtagaggtaaagaggtcagcgccgcagataacgcacagaatcagacccagagaaaaacagatcccaccgataagtttggcaatcccataaggcatcgcggcagtgccggtggtcgcggtgatatagaatacgaaagcgatggagatgaaaacgccagcggtgatcgccagataaaacgtcttcatcggatgcttcgttgctttatagacacctgcttcttcggcgactttcgccatcgcggcagggagcaaaagatcaaaagggttgtcagctttcacactaactctctctttatataagttggcggtgagatactaacaaagcattatagaagggaaattgatatagatcatatctcaccggaactatatgcctttttagtgtgtggtttttattgaaattatccgtaagatcatgaaatatatagagaaaataatttttaaattttataaataatgttgaattttttcttttttacccccatttttgagttaattaaaatggagtatttttattaaatttaacaattgataaatgatgaaatggcgttatttaacattaattaactttacaactacaaattataggaggcgctttctcagggttaaataacggagccgctgagggctccgttgtaagcattaacgatggcgcaagctgggcttattttgcccaaaacgccgctttcgc

SEQ ID NO: 5411 - DNA, 2562 bp, Unknown
  gut microbiota DNA sequence
cgatggtatccgccagcgcgccgacaaccagggcgaacatggtgctcgccagccaggcggccatcccggtcagaccgttggcggtagcgacttcgttacggccaaagacgtcggaagagagggtaatcagcgccccggacagcgcctggtgagcgaacccgccgatgcacagcagggcaatcgccacgtacgggctggtgaacaggccgatcatccccgggccaatcatcagcagggcgcccatggtgaccaccattttacgcgacacgatcaggttgacgccaaaccagcgctggaacagcggcggcagatatccgccgacgatgcagccgaggtcggcgaacagcatcggcatccaggcgaacatggcgatctctttcaggttaaaaccgtaaactttgaacatgaacagcgggatccaggcgttaaaggtcccccaggccggctcggcgaggaagcgcggcagggcgataccccagaactgacggttgcgcaggatttgccacggcgacattttcttcgcgttattggtctgatgctgagactcctgaccgccaatgatgtagtcacgttcttcgtcagataattttttctggtcgcgcgggtgtttgtagaagataagccaggcgatggcccaggcgaagctcaataccccggagatgatgaacgccatctgccagctgtgcatgacaatcgcccacaccaccaacggcggcgcgatcatggcgccaatagaggaacccacgttgaagtagcccactgcgatagagcgctcttttgccgggaaccactctgagctggccttcaggccggcggggatcattgcggcctccgctgcgccgactgcgccacgggccagcgccagtccaccccagctgccggccagcgccgttgagccgcagaataccgcccaggcgatggcgaagaaggcatagccaattttggtccccagaatatcaaggacataccccgcgacgggctgcataacggtataggcagcggaataggctgcaatgatataggagtactgttgggtcgaaatgtgtaactcttccatcagcgtcggcgcggccgccgctacggtgttacgggtcaggtagcccagcacggtgcccagcgtcaccagcgcgatcatgtaccaacgtaaccctttaattttacgcatgtaaacctcatcgtctgttatctttccgcatcaggtgcggcctttaccgagcgcaataagcggccgggaaagcgaaacggaggattcaggagggtagtcccctctggcctgaaccttaccatcagttgttatgttgaaagtcggtatccattccgtataagccgatgccataagcaccggtaatgcattccgtcggtttatatgttgcgacggcagaaagataacttgtcatacaactttaaaagttgagagctgtcacaaaagtgggaaagttagtgtggtctttatcccttgcctggaaagccagagatggcgcgctctggcgaggtgttttgctccagggcggtcatttttttatcgacgtttattgatctaactcacgaaaaacagttcggtctgtagaaattggtgtgataactttgtcagcattgtagtcaatcatctgaaaggctcccgcactggagcgaagaggacacgcgaatgacatcgtttatgactgaagattttctacttgataccgagtttgcccgccgtctgtaccatgattacgccaaagatcagccgattttcgactaccactgccaccttccgccgcagcaggtagccgaaaactatcgctttaaaaacctgtatgacatctggctgaaaggcgatcactataaatggcgcgcaatgcgcactaacggcgtgccggagcgtctgtgtaccggtgatgcgtccgatcgcgagaaatttgacgcctgggcggccacggttccgcacactattggcaacccgttataccactggacccatttagagctgcgtcgaccttttggtattacaggtaagctgttgtcgccatccaccgccgatgagatctgggaccagtgtaatgatttgctggctcaggatgccttctccgcccgcggaatcatgaagcagatgaatgtgaagatggtcggtaccaccgacgatccgattgattctcttgagcaccacgcggctgtcgccaaagacaactcctttgacatcaaagtgctgccgagctggcgcccggataaagccttcaacatcgagttggcgaccttcaatgattatatggctaagctgggcgaggtatccgataccgatattcgccgcttcgctgacctgcaaagcgccctgaccaaacgtctggatcattttgccgcacacggctgcaaagtctccgatcatgcgctggacgtggtgctgtttgccgaagcgaccgacgccgagctggatgacattctggcgcgccgcctggctggcgagacccttagcgaacacgaagtggcgcagttcaaaaccgcggtgctggtattcctcggcgcagagtatgcccgtcgcagctgggtccagcagtaccacattggcgctctgcgtaataacaacct

SEQ ID NO: 5412 - DNA, 3273 bp, Unknown
  gut microbiota DNA sequence
gaccaacagctatatggatattttccatcagatcaccctgctggtggtgctgctgctctcctcgaaaggggcggcaggggtgaccggcagcggcttcatcgtgctggcggcgaccatctcggccgtcgggcatttaccggtggctggcctggcgctgatcctcggtatcgaccgctttatgtccgaagcccgcgcgctgactaacctggtgggtaacggcgttgccacggtggtggtggcgaaatgggtgaaagaactggatgccaaacagatggatgacgttctgaataaccgtgttccggcgaacaaaacgcacgaattatcctcttaaatcctcctcttaggcccgtactcccttgctggagtacggcctcctgcgcataattagaggtcattcccgcccggcgggaatgacacgaaatgattattttacgttgtcatgcgacattttcgtctccgtgtggtctaaccgacgtatttcactctcacttttttcggcagcccgtcagtggggtgctgttgtaaccaggaatgttcatcaggggttcacatgcagggcacaacaattaaactcttaacgggcggtttgctgatggtagcggcggccggttatgtgcaggcagaagcgctccagcctgatccggcctggcaacaagggaccttagcgaatggtttgtcgtggcaggtattggccacgccgcaacgtcccagcgaccgtatcgaagtccgtttgtccgtcaatattggctcgctgagcgaaagcactcagcagagcggtttcagccgctttattccccgcctggcgttgacgcaaagcggcagcctgccgacgatgcaggcgcgctctttatggcagcagagtattgacccgaagcgtcctctgccgccggccatcgtctcctacgattacacgatgtttaatctcagcctgcccaataaccgcaacgatctgttgaaagaggcgctgagctggctggcggacgccagcggtaaactggccattacgcctgaatcgatcaatcatgcgctgcagggcagcgacatggtggcgacctggccactggataccaaagagggttggtggcgctatcgcctgaaagggtccaccatgctgggccatgaccccgccgcgccgctgaagcagccgatcgatgtggcgcagctgaaagacttttatcaaaaatggtacacccccgacgccatgacgctgatcgtggtggggaatgtcgacagccgcagcgttgccgagcaaatcaataagacctttggcgatctgaagggcaagcgggaaacccccgcagcggtgccgaccttatcgccgctgcctaccgtgccggtcagcatcatgaccaacgcggtgcgtcaggacaaactgtccatcatgtgggatgcgccatggcagccgatccgcgactccgcggcgctgcagcgctactggcgtgacgatctcgcccgtgaagcgctgttctggcacgtgcagcagagcctgagcaaaaataacgtgaaggatattggccttggctttgactgccgggtgctatatcagcgcgcgcagtgcgccatcaacatcgattccccgggcgagcgcctgaacaacaacctgagcgtggtttcgcgcgagctggcgaaagtgcgggacaacggcctgccgcaggaggagtttgacgcgcttatcgcccagaaaagcctcgagctgcagaagctgtttgccacctatgcgcgcactgacaccgacattctgatgagccagcgcatgcgctccctgcagaatcaggtggtggacatcgcgccggagcagtaccagaagctgcgtcaggagttcctcaactccctgacggtggacatgctgaaccagtatctgcgccagcagctctcgcaggacatggcgctggtgctgcaacagccgaagggcgaaccggaatacaatatgaaggaactgcaggccacctgggaaaaactgatggcgccgaatccggcggccacggcggctagcggcagcgccgatacggttgacgcccacagcgaggccagcgacatcccgccggggcagtaacctaacgcctctccggcgcgccagcggcggccggagagcgctttgtgcggagaattactgcggcatcgcttcccgcgggatgatcgccccgcgatactggatcaccgtgctggcggtcaggtgtccgcgtctggcggcggattcggcatcgccgccggtcaggcgaacggccaggtagccggcgctgaaagagtctccggcggcggtggtatccaccaccttctctttggccagcctgacggccggcacttcccgcagcggttgcccgctaaccgagaccaggcaggcatccgcgccgcgcttcaccaccacctcttccacgccggcggcgtgggtgcgggcgatcacctcagcaaccggtttttctccccacagcgcgtcttcatcatcgagggtcagaaacgcgatatcggtgcaggcgagcatctcctgatagacctgctgcgtttccgcctggctggcccacaggcgcggacgatagttgttgtcgaagatcaccttgccgccgttggcgcggcactcacgcagcagcgtgaacagcttgtcgcggctggccgggctgagaatggcgagactgatgccgctcagatagagatagtcgaaagtggccagctcttcgcaaatcgccgccgcgcgatcgctctccagccagaactttgccgccgcctcgttgcgccagtagtagaaggtgcgctcgccggtgtcatcggtttcaatgtaatacagtcccggcaggcggtcggccatccgctggataagatcggtgttgacgttttcctgttgccagctgtcgagcatctgctggctgaacgcatcggttcccagggcggtgacgtagtggacgctcaatgcgctggcatccgtctgccgcgcgatatagaccgaggtgtttaaggtatcgccgccaaagccgcggttaacggccccgtttttctctgacagctcaatcatgcattcgccaataacggcaatttttttagacatagccagaacctgcaatggaatcgatataagcgctagtgtgcgctgcgctgttttgctggtcaatcatattaaaacatcgttccattatttttttgacctgacgcgcgtaatgtgacgaaaagcgcatttccaggataaacgccgctttttgactatattcaggactgacgtgatgcaaaagtagcggagtagggatgagcagaacccgtaaaacgttggttatcatcacaggaacg

SEQ ID NO: 5413 - DNA, 2195 bp, Unknown
  gut microbiota DNA sequence
ctctgaactgtgcaccgtagtggatgacggcaccatcgccgatcgccgtggctcggtggccattgatgacgaagggacgccggggcaatacaacgtgctaatcgaaaacggcattctgaaaggctatatgcaggataaactcaacgcgcgcctgatgggcgtcgcaccgaccggcaatggccgacgtgagtcgtatgcccatctgccgatgccgcgtatgaccaacacctatatgctggcgggccagtcgacgccacaggagattatcgaatcggtcgactacggtatctttgcgcctaacttcggcggcgggcaggtggatatcacctccggtaaattcgtcttttccacttccgaggcctatctgatcgaaaaagggaaggtcacgaaggcggtgaaaggggccacgctgattggctccggcattgagaccatgcagcagatttcgatggtgggcaacgacctgcgcctggataacggcgtcggcgtctgtggcaaagagggccagagcgtgccggtgggcgtcggccagccgaccctgaaggtcgataaccttaccgtcggcggcaccgcctgatcctgacctggttcccggcgctgccgggaaccgcttcaccgggcgatcccgcgcccgtgcatgccctgatagatcttcgccacgtcgacaaaatactccgtcagatagttgatacagacctgcactttcagcggcagtttatccttttccgtatacagggcgtagaccggtcgcggatcggactgatagctgggcagcaggatctcaagctcaccgcggttgatctcttcgatcgcccacattaagggtacataggcgatacccaccccggcggtcagccagcgcaccagcgtcatagggtcgttggtcacgaagcgcccctgcggggtcaggcgggtcgagatcccttccggcgcgataatgacaaactcattgtccggccgcacgctatattccagccaggcatgtccggcaaggtcggccggtttctctggattgccagcctgcgccagatagcttttagcggcgcataataccatcggcattgagcccaggcggcgggaaaaaaggctggaatcctgcagggcgcccacgcggatcaccacgtcaaggccgtcggcgatcaggtctggcgcaggtatgccggtgaccagattaacagagagcccggggtattctttgagcattttcgccgttatgcgcgccagaacattctgtgccatagttgaagagcagccgatgcgcagcgtcccgatgggggtattgttaaatgcgtataattgctcatggacatcctgcgcttcaaacagcatcctacggcagccctggtaatagattttacctgcttcagttaagccaaggctgcgggtgctgcggttgagcagctttacctgcagctcatcttccagtttggcgacggtctgactgatcgaggaaacgctcatctgaagctggcgggccgctgcggtgaatgaacctaattcgaccactttggcgaaaacggacatgcgttttaatcgttccattattcactctggcttaaaagtgatttagatcacacattgtagataatgcggcaatcgttacgttaatatattgttagctacataataaacgcatctgctcactacctgtacgcttcttattcaaggtcatcatgagtctgtttcctgtcatcgtgattttcggcttatcgtttccgccgatcttcttcgagttgcttttgtcgctggctatcttttggctggtgcaccgactgctggttccgaccggcatttacgattttgtctggcacccagcactgtttaatacggcgctctattgctgccttttttatttgatatcgcgcttgttcgtttgaggttgatgtgaaaacactaacaagaaatatcctccgtactgccattaccgtgatactggtcattctggccttcgtggcgattttccgcgcctgggtttattacaccgcctcgccgtggacgcgtgatgcgcgctttagcgccgatattgtggcgattgcccccgacgtctccgggctgatttctcaggtaaacgtcaaggataaccaactggttaagaaagaccaggtattgttcgttattgaccaacctcgttaccaaaaagcgctggcgcaggcggaagctgatgtcgcctattatcagacgttagctcaggaaaa

SEQ ID NO: 5414 - DNA, 2093 bp, Unknown
  gut microbiota DNA sequence
tcccagctctcctcacgcattattaacgctttttaccgtccctggtttcttgagccggagctgatcaccgctgatgagatggacgccgggctggatgccgggcgctacacgttcgccatcaacatcccgcctaacttccagcgcgatgtactggccggtcggcagccggaaatccaggtcaacgtcgacgccacgcgcatgagtcaggcctttaccggcaacggttacatccagaatattatcaccggcgaagtaaacagttttatcgcccgctatcgggataacagcgtgctgccggtagagctggcggtcaggatgcgttttaatcctaaccttgagcaggagcgctttggcgcggtgatggcgatcatcaacaatatcaccatgctggccattgtcctcaccggttcggcgctgatccgcgagcgggaacatggcaccattgagcatctgctggtgatgccggtcacgccgtttgaaatcatgatggccaagatctggtcaatgggtctggtggtgctggtggtctccgggctgtcgctggtgctgatggtacaggggattttgcaggtgcccattgaagggtcgattcccctgtttatgctgggggtggcgctcagcctgttcgccacgacctcaatcggcatttttatgggcaccctcgcccgctcgatgccgcagctggggctgctgatgatcctggtcttactgccgctgcagatgctctccggcggatccacgccgcgagaaagtatgccgcagctggtacaggatattatgttgaccatgccgaccacccacttcgtcagcctggcgcaggcgatattgtatcgaggcgccagcttcgccatcgtctggccgcagttcttaaccttgctggctatcggcggagtgttctttactatcgcgttgctgcgttttcgtaagactatcggtgagatggcataaaggcttaagaagggccgtcgacttgcggcggccgaatggtttatttatggcgattcataaagcgacgtaaaccccaggtgaaggccatcgccatactgaagagaatgaacagcaataccacccagctgatggagatgcgcagcagcgtgccgggggtcataaacggctgcaggtagacggtgaaggactgggcgggtgattttcccagcagttcataaacgttatcggtgagccacacgccgacccggcagaacaaccagataatcgcaggccagcagagcagcaccagaaaggtaaagcgctcctgaatgtaagtgaagagctggcgcaatggcgaccagttaagcaggattttcatttctattctcatttgccagccgagaaccagcatatgtctcgcaaggtatttcgggcagcatccatacaggcaatcatccccctttgtatatcaaatttgctgccatataaaccagatcaagttaacaaagtgttaatgataaagctcatttagacaaaaacagggaagaagcataccgttcgccacaatacatccggaagcgaagtatccagtcacggaaatattttttctgaagcgtaaacgcgttattttgtgggaggaagagaccgcatcattattttaccggggcacaatataatggcgctgaaataaagagataatattaatcgtagctgctgataattattttccgacttgtatcatccggtaaattcactatccggttgaccatgccacaagcattcgtcacgctattttgcgaagcaataaaggcggtgctgcgcactttgtccggggtacggttttgtagccccggtaagcgctgcgccaccggggagacatgccggcacgctggccggacgacagaaacgcaaaaagcccatccggcaggatgggctcttcacttgtttgatgcctggcagtttatggcgggcgtcctgcccgccaccctccgggccgttgctgcgcaacgttcaaatccgctcccggcggatttgtcctactctggagagcgctcaccgacaaacaacagataaaacaaaaagcccggtctttcgaccgggctttctgctttatttgatgcctggcagttccctactctcacatggggagaccccacactaccatc

SEQ ID NO: 5415 - DNA, 899 bp, Unknown
  gut microbiota DNA sequence
agggcgccggggtgaagaactttgatatcggcggcgtgcagttcgacgtggcggcggtctcgcaggtgaaatcctgtagtccggaagtgatggctgacgagaccaacccgtcgcgcatcacctgtaccggcagctccgacaccggcgacaacggccactacgcgctgaccaccaaaacccacaacatcaaggccgggccgatcgacgtcgaggtgtacgccaactacggctttgattcgaaggcggtggacagcgacgcgcgtctcgaagcctggcagggcgggctggtgctgagccacaccaacgacagcggggtgaacaaggtgatcctgcgctattccgacaactcggataacagcgtctataacaaaaccgacgacctgaccacggtctacgccagcttcgagggcagccataagttcacccagcaggcgcaggtggaatatctgctggccttccacgactacgacaacggcaaagataataccgacaaccgcaaaaactacggcgccatcgtccggccgatgtacttctggaacgacgtgcactccacctggctggaagcgggctaccagcgcgtggattacgaccagggcggggataaccacggctggaagctgacgctgtcgcagaacatcgccatcggcatggggccggagttccgtccgatgctgcgcttctacgtgaccggcggccaggtggataacgagcacaccgcgaaggtcaacaacaccaaagaccagcagctggattcgctgaacgtcggcgggatgtttgaggcgtggttctgatgcgatagcgttgccgaaggagcgttcccggctggcgctacgcttagccgggctatgactggtgcgctccatttatgccggatggcggcataaatgccttatccggcc

SEQ ID NO: 5416 - DNA, 536 bp, Unknown
  gut microbiota DNA sequence
aaaatcgacgccgcggccaacaaaaaggtcgacgtgattactaacccggaaaccaccgccgcctcgccggatatggccattccgttcggcctcaagttcagcggctacgcccgctatggcgcccacttccagaccggcgaccagaaatatgtcggcgtcgacggctcctataacggcgcctcggcgatcggccgtctgggcaatgaaagcaacggcggcgaattccagatcagcaaggccttcaaaagcgcgcagggggctatctgggatcttaacgtgatgttcgaccactggagcgacgaagttaacctgaagaaggcctacgtcggggtcaccaacgtgctggaatccaaccccaacgcctatatctgggccggccgcgacttccaccagcgtccgcaacaggggatcaacgactacttctggatgaaccacgacggccagggcgccggggtgaagaactttgatatcggcggcgtgcagttcgacgtggcggcggtctcgcaggtgaaatcctgtagtccggaagtgatggc

SEQ ID NO: 5417 - DNA, 2008 bp, Unknown
  gut microbiota DNA sequence
agccggtactctgcaagccattctcgaatattttcgccgcagcttcatctaccgccatagccgcgccgaaaacgtcaaccccggccatcgtcggcatcatcccgcacacaccatcaagaccaaacccacgaatatgcatcatcctgtctacaggaatgatccgctgaacgccgttatccgtataggtgtactgtaattttccgctatcgagtcgttttacaaccatattctgaggaagtaacgggaccaacgataccagcttgctaccgatataaagcttttcgacaaatgcattaccgcgcagacaaacgctggccacaatcatcaacatgaagcgggaaggtgtcatttccgggttagggcgcctgcataatatctggtaggcgggattgttctgggccagctttctcgatccatcagcctgccgctcgtaaattttaagcggaagcgtggagatcgactcacttaatagccttacgcacgcccagacagcagaaagccggataactttgtcagcggtaaccacttttccgctactgctggttccgtaccactcccgccagaattcaccggtcgtcaggcttatgggaacaccaagccagtttaaaagagcgctcttaacgcgccctggttgctgtttattcttagccatcaggtacccactatgatcggatcgtcaaaaaagccctctatatcgccatcatcaggctcataaccttctgcagcaccaattgccatcgccgacgcaaccacaccatctattcgaccagtactctttttcttggcgaatatgcggttttctttttggtcggcttcggttacggcggaagcagcgttccatcggaggcaggggtttgttttaataatgattacgccatcatcgagcatctgttcaaaaagttcgatggaatgaggcatccacagtcctgaatcctgcgccttgtaatatccctgcccgtgaggaataagcggtactgatacagaagcgttttccagttccggttcaagatatttgatgcggtactggtcgaaggcgatcgccttgatatcgaacaacatggaaagatcagcaatgcgctcagcaacaaagccatatttcaccgcctttccgggagtggtatgaatatggcctccccgttcccatgcttcataaggtacgcggtctgttttcgctctatccagcaaagtatcttttggtgtccagaactccaccagcagctttctttttttagggaaaaagagcgccagagacgtaaggtcgcgagttcctgaaaggtcaaggccgccataacattcttctccctgcagctcctgcaggtcaaagtcctcttcgcaccccatccacacatcgctactcatccaggggttatcggcatccacccactgacagaagtttaaccgccgaacaatgctttccttcgacggcatcccccgagcctgagtaacctgctcacgcaggtagcgatcggtaaaagtatgaccaagagaggggttggcttttttccagcaggactcgtccttgaatgggtcttctccttcgtccagggagcaaatgaaagaaaagaaactgtcatcctcaatcgagccttcggcaactttccgcccatactcgtgatagtcgtagcagacgctggttttgtcgtgtccgctgttagtgatcataaaaatcaacgcctggcgacgacctttcgtcccggcgcgcatcatttccacaacctggttgtttttgtgctcgtgaatttcgtcaatcagagcacagtgtgggcgtggccctgactgcccatcatccgaacttataggccggaaaaatgagccggtctgaagaaacgcaaggttccactctttcccggcgccgcctgatttatttattcgctgtgctaacgcaggggactgatccaccatcgcgacagcatcacgaaaaaggatcatggcctggtcttttttcgttgccgctgcgtagacttctgcgcgaggttctttatcggcaaccagacagtaaagagcaatg

SEQ ID NO: 5418 - DNA, 27349 bp, Unknown
  gut microbiota DNA sequence
caaaccaggatcgttttccgctgcggtcgctgaaattttatgacaacgacggcgcgcgccaggagaccatcgccgaggcgtgcaaagtgatcctcaaagagcaggcgccggagattgagttcagctataccaccgatccgcaggcggcgtttaccgatgttgattttgtcatggcgcatatccgcgtcgggaaatatccgatgcgtgaacaagatgagaaaatcccgctacgccacggcgtgctgggccaggagacctgcggaccgggcgggatcgcctacggtatgcgctctatcggcggcgtgctggagctggtggattatatggaaaaatattcgccgaacgcctggatgcttaactactccaacccggcggcgattgtggcggaagccactcgtcgtctgcggccgaacgccaaaatcctcaacatctgcgatatgccgatcggcattgaagggcggatggcgcagattgtcggcctcaaagaccgtaaacagatgcgcgtgcgctactacggcctcaaccacttcggctggtggacgtcgattgaggacctcgacggcaatgatttgatgccgaaactgcgcgaatatgtggcgaaatacggctatgtgccgccctcgaacgatccgcacaccgaggccagctggaacgacacctttgccaaagcgaaagatgtgcaggcgctggatccgcagaccatgccgaatacctacctgaaatattatctgttcccggactatgtggtagcccactccaacccggaacgcacccgcgccaatgaggtgatggatcatcgggagaaaaacgtcttcagcgcctgccgggcgatcatcgccgccgggaaatccaccgccggcgatctggagattgacgagcatgcctcctatatcgtcgatctggcgacggctatcgcctttaacacgcaggaaaggatgctgctgattgtgccgaacaatggcgcgatccataactttgacgccgacgcgatggtggagatcccttgtctggtaggccacaacggaccggagccgctgacggtcggcgacatcccgcatttccagaaagggctgatgagccagcaggtggcagtggaaaaactggtggtcgatgcctgggaacagcgctcgtaccacaagctgtggcaggcgattaccctgtcgaaaaccgtgccgagcgcctcggtggcgaaagcgatcctcgacgacctcattgccgccaacaaagattattggcctgagctgcattaatccccgttgtactaccggcgccctgcggggcgccggttcttctccccggttcctgatttacgctatgctgaagcctgcagcgcgatgaacaaggaactgtaatgaaaatctcccgcctcggcgaagcgccggattaccgcttttcgctggctaacgaacgcacctttctggcatggatccgcacggcgctcggttttctcgccgccggcgtcggccttgaccagttagcgccggactttgccacgccgctgatccgtgaaattctcgccctgctgctgtgtctctttgccggcggcatggccatctatggctatctgcgctggctgaataacgagaaggcgatgcgtctcaagcaggaccttccctatacccgcacgctgctggtaattagcattctgctgctggcggtggtggccgcggtgatgctgctggtggtgtatggcggataaacgccgggcgcggcgggaaagcgatcccggtcttcagccagagcgcacctcgctggcctggtttcgcaccctgttgggctacggcgcgctgatggcgctggcgattaagcacagctggcaccgcgccggcctgccgttctggctgtcgatcggcgtgctggcgattgtggcggtgatcctctggggctatacccgccgtcgtcatctgatggatgtcgacgatagcgattttttacagccgcgggcggttcgtgacaaatttttgatcgcactcgcagtactttctctggcattcctgtttgctgttactcaccttcaaccgatcgttttattcattagggatatgtcatgacaggatgtccggcgaatttgcctctcactcatgcccccggccagcaacatgacactccctttcaggctgtcgtggtggaggcgcatcattgccatcaaccgcaggcgttctatgcacagcttcgtcaacaggggctcaccgctatccattttattccgcagctggcggccggcgacgccgcgctttggggagagtttctctgcgcagtctttcaccgctgggtgcgggaagatattgggcgcatcaatattttactgtttagcgagacgctgagcgcctggtgtggggagacgctgacccagccaggcgcgccggcggccaacagcacctgctacggctgcccgtggctgcgcctgtgccgctgtggcgaacaggaagacccgctgtgcgcgggttaccggcagttctacgattttagcgggccctatatgcgagtgatgcgggacctgcgacgacagcagcggccaccagaggcgctgatgccgctgctgcgctaaagattagcgccccttcgccaggtactgcgccatttcctcttccggcaccatgccgccgccggtggcccacaccaggtgggtggcctgctgcagctgttgctcactcagcccctgcagctgatggtacgctttgctggcgcagacccgctgcgctccggccatcccggccagcgcggagggttcaaggcggatattttccgctgccgccagccagcccagcatgtcatacatcgtctggtcgtcaagggtatagaacccgtcgagcaggcgctccattgcccggccaacgaacccggacgccctaccgaccgccagaccgtcggccgcggtcaggttatcaatacctaaatcctgcaccgctatctggtcgtggagcccggtatagacgccgagcagcatgcatggcgaatgggtcggttcggcgaacaggcagtgaacgtggtcgccgaaggccagcttcaggccaaatgccacgccgccggggccgccgccgacgccgcacggcagatagacgaacagcgggtgatcggcatcgaccacgcgccctgctttggcaaactgcgccttcaggcgctcgccggctacggcatagccgaggaacagcgtgcgtgagttttcatcatcaatgaaaaagcagttcggatcggattccgctgccttgcgcccctgttcgaccgccacgccatagtcctcttcatactcaaccaccgttacgccgtggctgcgcagtttggcttttttccacgccctggcatcggcggacatatgcaccgtgacttgaaaaccaatgcgcgcgctcatgatgccgatcgacatcccaaggttgccggtggagccgacggcgatgctgaactggctaaagaactgtttaaactccggcgtcagcaatttgcgataatcgtctgcggtcgtcagcagcccggcttccagcgccagcttttccgcatgggtcagcacttcataaatcccaccgcgcgctttgattgatccggagatcggcagatggctgtcttttttcagcagcagttcgccgctaattggctggccgaatttttgctcaaggctgcgtttcattgccggaatggcaaccacttctgattcgataatcccgccgctcgcggcggtttccgggaaggctgccgccagatagggcgcgaagcgctgaaggcgggcatgggcgtcttgcacatcgtcggcggtcagaccgacgtaaggcaacccctccgccagggtggtggttgccgggttaaaccaggtggtttctttcagggcgatcagatcctgcacaagcgggaaggtcgcggttaaggtggtcaggtcagcgtgtttcatcatacgtctctttgcgctcagataatgaaagaaagcaggaaggtggcggccagtgcaagtagcgatgcgataaatgtcgctgtcgtgtagtacttgaacgtttcactgaggctggcgccgcagtactgttttaccagccagaacagggaatcggtgacgatcgtgcagccaatggcgccggaaccgatggcaatggcgatgatctccgggcttacgccgggataaagcggcagcatcggggcaacgatggcggtagcgcccatcatcgccacggtggcggagccaacggcggcgtgcaggataagcgccaccagccaggccagcaaaatcgggtgcatatcaaggttcgacaggatcaccgcgaggctatcggccaggccgctggatttcaaaatcgcgttgaatgcgccgccggcgccgataatcagcaggatgttggcgatggacccaaagccgttttcggtatgagtcagcagaacgcccatccccatttgccgacggatgccgagcatgtaataggcgacaaagacggcgataaacatcgcggtgatggggttgccgataaattccagcactgtatacagcgtgccgcctttcgccatattcagttcagcgacggttttcaccagcatcaggccaatcggtaacagcacggtaaacagcgtggcgccgagcgacggcagcgtcgattcttcgcgaacgtcgaggttggaaaactcggctggcactggtttaaacggcaggcggttgccgagcagcctgaggaacagcgggccgccgaccagcgaggcgatcagaccgaccagcaggccatagacgataaccgtcccgatatcagcgcccagtttattcgccacgaacagcgcggccggatgcggcggtaccacgcagtgcaccgccatcagcgcggtacacagcggaatagccagcttcagcagcgaagtattggtttttttggcgatggagaatgccagcgggatcagcagcaccaccccgacttcgacaaacagggtaatgccgcagatcaggccgaccagcaccataatcacatccgccgacagccagcggcagcgctggagcgtcaggccgatgcgctccgccgcgccggagacctccatcatcttgccgagaatggtgccgagaccgatcaccgccgccaggaagcccagcgtaccgccgatcccgctctcaatggcgttgaccatctccagcgggcccattcccatcatcgccccgacgaaaaagcttgccagcagcagcgccagaaacggatgaaacttcagtttgacgatggttaatacaattaacacgatgctaatcagcaatgtgctcacaacccaaatttgcgattccataccccacctcgccgtaagtaacgtgtggttattgaacagaaactcggcatgggctgacaaacgatataaatgacctttcagatgagccaaattgaatcaaaaaggtgatttagctctaaaagtgacctctaaatatgctatgggtcaaattaactcatcctttagcggaagttccggcgttatttttttatcatccagactcccttttatcgccaggagcgcataatggatgtgctaaaaaccttaggtacccggttgctgaacggctggcaactctccaggctgtcgacgtttgaggtggcggcgcggcacgagtcgttcgcccttgccgccgacgagctggcgctcaccccaagcgccgtcagtcaccggattaatcagctggaagaggagctggggatccagctctttgtccgctcgcaccgcaaagtggagctgacgcgtgaagggaagcgcgtttactgggcgctgaagtcgtcgctggatggtctcaatcaggagattctggacatcaaaaaccaggagctctccggcagtctgacggtctactcgcggccctctatcgcccagtgctggctggtgccggcgctgggggatttcagtcgccgctacccggccatctcgctgaccgtgctgaccggcaacgataacgtcaacctgcagcgggcgggtatcgatctggcaatctattttgatgacgcgccgtcgtcgcagctaagccaccattttctgatggatgaggcgatcgtgccggtatgtacgccgtattacgcccgccagctgcagttaacgtcaaatcctgccagtctgcgccactgtacgctgcttcacgatcgccaggcatggagcaatgattccggcaccgatgaatggttcagttgggcacagcaatttgggattgaactgccgcaatcgtcgggcattggcttcgatcgttctgatttagcggtgattgcggcgatgaatcatgtcggggtagctatggggcgtaaacggctggtgcagaagcggctggagagtggagagttgatcgccccgttcggcgatatgacgctgaaatgccatcagcattattacgtgaccaccctgccgggccgtcagtggccgaaaatcgacgcctttatcgagtggctgcatagcctgacctgaaaatgagccgggctatccctcggtgttgttagggaggccgggtaaggcgtgagccgccacccggcaaaatgacggcactgcgcatgcgcgggccggcagacgaccagtccggtagcccggataaggcgtcaaccgccatccggggaacggccgccgcgcttataccggctgctgatggtgggtgaagcgcgaggccagcggcagccagcacagcagaatcaacaggcccatcagcatcatcagcaggccgaggctgccctgaccggtttgcggcatcatcgccgacagccaggccagcacgccggagccgatattctgcaagccgcccaccagcgccccggcggttccggcgaggaacgggaacggctccatcgcgccgctggtggccagcgggaacaacatcccggcgccgaagaagaacagcgccgcaggcaccagcagggtccagacggtcatgatgcccagcagccctgggatccacatcatcagacctgccagcaggcagcagatcaccgactgccacatcagggtcgggaaacgcttgttcggccggccggcaaaccacgccccgaagaacgccgccgggatcggcagaataaacagaatactcaccgccatgctgctcaggccgagcaccgcgcccatcagcaccccggagcaggcttcgaataccgcaatccccgccaggccgccgatcagcatcagcagatagcagttaaaggcgccggtgccgaacagcgttttgtagctggccagaagtttggtgcgcggcgccccttccgggcgcgtttccggcatccacttcgccatgctgaaggtcaccccggcgcacaggaccagcaggaaagcgtagcaggcgcgccagctccacagggtgtcgaggatgccgccgagcagcggcgcaatcagcgggctgaccagaatacccatatttaacaggctattggcatgacgcagctgagcgccttcgtacaggtcgcggggcagggtgcgcgccatcacgccgccgaccccggtgcccatcccctgcatggcgctggcggcgatcagcaccggcaggctatgggtggtaatagctaccagcgtcgccagcataaaaatcgacatcccgacgaggatcaccgggcggcgaccgacgcggtcagagagcgggccgtagaatagctgtgaaataccgtaggtcagcaggtaggccgccatcacgctttgtaccgccccttcgcggacgttcagcgcgaccgccatgtcggcgatggccggaatataaatggtctgcgccatctggccgacggccaccagcagtaccagcatcaacaacaaattgaagttcttatgccgtttcatgtcgatgaatactttgtgagtaaagagaaatgaagaatatgtgactaccacatcccgtaaacgatggaggaatctaccatattaaaatgacagaacaactgcaaagtgccgattgttgagggaattccaggcagattatgtaaacaggaacggcaactaatgttgccatctcaggctacgccaggcgcaggaggatcgccccggcggcaatcccgcaggcggccacgatgcgcagcggcatcagttgctctttcaggacgataaaggcgatcagcgcgccgaagagaatggaggtttcacgcagcgcggcgaccaccgccagcggggcctgggtcatcgcccatagcgccaggccgtaggagcccatggtgccgatcccgccgaggatgccttttttccagtgctgacgtaaataacgactggcctcacgccgtcgcgccaccatcgcccagcacagcaggcagaagccgttcataaaaaaggtccacagggtgtagcccagcgccgagcccgccagccggacgccggtgccgtccaccagcgtataaccggcgataaagcaggcgttgatcagcgccagcacgatgcctttgcgcgagctggcgcggccgttaaaggccatcgccagaatcgccaggcagatgacgccgatacccagccaggccagcggcgacagacgatcgccgaggaacagcacgcttatcgccgccaccagcagcggcgcagtgccgcgcatcagcggataggtctggctcatatccgatacctggtaggtcttcgccaccagcaccgtatacaccacctgtaacgcgcacgacgccagcagatagggggcgctgaccagcgcgggctgcggggcaaaggggagcatcaccagggcgatcagcgcggccgagccgctgacgccgatcgccgcgtacattttatcgccgctggctttgacgatagcgttccagctggcgtgcagcagggcggcgaacagcaaaatgcagaatacggtgagggtcatcgcagacaggttcaacagtgaaggtcaccggaatgtaacacgcgcccgcgctgcctgccagcgggggttaaagcgaacaaaacaggcgatgcgtcacccgcggttcatcgtacaccgggcgaaaaccaagcctttcataaaagggccaggcctgcgccggggcatgggtgttgagaaagtcgaaccaggcgctggagtgggtgataaccgagaccagcagctgctggccgatgccccggcgacgatagcgttcgctgatgtagaggtggcgaatgcgcccggcccgcggctgcggactgaagggatcgctattgatgccgcatacccctaccagctggtggttgacgaaggcgcccagcagcgtttcgcccggcgcgttaaagcggtttttgccgctctgccagttttccgccaggcggcgcagcatattgaaatgctgttcaaggctttcaatttgtagcgccgcgaaccccggtgcatccggcgtcgtggcggcaattaacaggggtggcatagcttcctccatcaagtcatcccgggacgcccggcgggcgcctgcaggggggcggtttcccgcccccctcaggtgcgacttgaacctgaatcagcggaactgtttcaggactgcatcaagtagttgcaacacagcaaccatgagtttcaggatcaaaataataatatccattccgcccatacgcgcgtctcctgtggttaaggagcacaataagctgacgtacctttccgctgcccgttgccagcttatccctgcctgtcgccggcggcgtctgccctggccgatagttcgtcctttccatgaacggcttcccggcccgccgcctgcaacgacaggggtgcgcagcgctgagccacgcgttgccgcgcgggccagtgactgcacgttgttgacgtaacacagtgtgctctctcggggttaaggcactgacggcaccacccgtttcagccaggacttcgttgcgccggtcaaacttgcggcccccgaatggcacaaagtgaacacacccagtatagataaatgctgtatggatgaacagtattttttggacaaatccgcccctctcatccatactctatgacagagaaaaaccgaccttaaattgcgcgaactgcagcgatcgcgtatacttttggcgttgacgtaatacagtgtgcttgcggctaccacctgtaaccatgctgataaaaacctcgctccggcggggttttttgttttctgcccttttgcgccgaactgtgatctttcgcgcaaattttcgtggatgaaaataaatccattgtgaaaacgtaaaacctgtgtttgtataaattcagcttatttttcgacacaacaggtccctaatgaacgcaaccctgatcgcttcgaccctactaaaaaccgcgccagccgcggtggtcgtcgtgtctgtggtggtcgtcgtcggcaatgcgccgtagggtccggaacaacacgaattccaaaccccgccggcgcaaaccgagcggggttttttgttggcgagccccccggtaaagtcggcccagaagaaaaggactggagcatggcaagttcgggcaccacatcaaacacaatgcgctttaccggcgcgcagctggttgttcatttactggagcgccagggtatcactatggtcagcggcattccgggcggctccatcctgcctatctacgatgccttaagccagagcacgcagatccgccacatcctggcgcgccacgagcagggcgcgggctttatcgcccaggggatggcgcgtaccgaaggcaagccggcggtctgtatggcctgcagcggcccgggggcgacgaacctggtgacggcgatcgccgatgcccgcctggattcgattccgctggtctgcatcaccggccaggtaccggcctcgatgatcggtaccgacgccttccaggaagtggacacctacggcatctctatccccatcaccaaacataactatctggtgcgcgacattgccgagctgccgcaggtgatcagcgacgccttccgtattgcccagtccgggcgtcccgggccggtgtggatagacattcctaaggacgtgcagtcggcgaccattgagctggaagcgctgcctgagcctggcgagcgcgccccggcaccggcattcgcgcctgaaagcgtgcgtgaagcggcggcaatgatcaacgcggcgaaacgcccggtactgtatctgggcggcggggtgattaacgcgccgcaggcgatccgtgagctggcggaaaaagccaacctgccgaccaccatgaccttaatggcgctgggcatgctgccgaaggcgcacccgctgtcgctggggatgctggggatgcacggcgcgcgcagcaccaacttcattctgcaggaggcggatttactgattgttttaggcgcccgttttgatgaccgggcgattggcaagaccgagcagttctgcccgaacgcgaagattatccacgtcgatatcgaccgcgccgaactgggcaaaattaagcaaccgcacgtggcgattcagggcgatgtggcggaagtcttagcccagctgaacccgcagattgaggcgcagccgcgcgaggaatggcgccagctggtggccgacttgcagcgcgaattcccctgcgccatcccgcaggaaagcgacccgctctcccattacggcctgattaacgccgtggccgcctgcgtggatgatgaagcgatcatcactaccgacgttggccagcaccagatgtggacggcgcaggcctacccgctcaatcgtccgcgccagtggctgacctccggcggcctcggcaccatgggcttcggcctgccggcggcgatcggcgcggcgctggcgaatccgcagcgtaaggttatttgtttctccggcgacggcagcctgatgatgaatattcaggagatggccaccgccgccgaaaatcagctggatgtaaaaattatcctgctgaacaacgaagcgctggggctggtgcaccagcagcagagcctgttctatcagcagggcgtttttgccgccacctatccggggatgattaactttatgcagattgccgccggtttcggcctgcaaacctgtgatttaaataatgaagtcgatccgcaggcggcgctgcaggcgatcatcgaccgtccgggtccggcgctgatccacgtgcgcatcgacgcacagcagaaagtgtatccgatggtaccgccgggtgcggccaatactgaaatggtgggggaataagccatgcaaaaacaatgtgataacgtcattctggaactcaccgtccgcaaccatcccggcgtcatgacccacgtgtgcgggctttttgcccgtcgcgcgtttaacgtcgaaggcattctctgtctgccaattcagggcagcgaacacagccgcatctggctgctggtaaatgatgaccagcgactggggcagatgattagccagattgaaaagctggaagatgtcaccaaagtggcgcgtaaccagtccgatcccaccatgtttaacaaaattgcggtgttcttcgaatagcgctcaaggcttgaacagccacgcgcttatcgctaaggtaagcgcctttgccggatgacgctgcgcttatccggcctacaagcagtgaatccgtaggccggataaggcgtttacgccgccatccggcgttttcaggcaccaggacacaccatgaccaccatcgcccttattgacgatcatttgattgtccgctccggctttgctcagctgctggggctggaagctgattttcaggttgtcgccgaatttggtagcggccgcgaggcgctgacggggctaccggggcgcggcgtgcaggtctgtatctgcgatatctccatgccggatatttccgggctggagctgctcagccagctgccgaaggggatggcgaccatcatgctgtcggtacacgatagcccggcgctgatcgagcaagcgttgaacgccggcgcgcgcggcttcctgtcgaaacgctgcagccccgatgaacttatcgccgcggtacgcacggtggcggcgggcggttgctatctcacgccggatatcgccatgaagctggccgccgggcgccaggatccgctcaccaaacgcgagcgtcaggtggcggaaaagctggcgcagggcatggcggtgaaagagattgccgccgagctcggtctgtcgccgaaaaccgtccacgtacaccgcgccaacctgctggaaaagctgggcgtcagcaacgacgttgagctggcgcgccgcatgttcgatagctggcaatgaaggccgtcgtctcacgattgctgtcggtcatcggctgcgcctttatcttcgcggccgcctggttctgcctgtggagcatcagtctgcatctggtggaacgcgcggatttagcggtgctgctgtttccctttggcctgcggctggggttaatgctgcaatgcccccgcggctactggccagtgctgctgggaaccgagtggctgcttatcttctggctggcgcaggaggtggcgctggcgcacccgataattttgatgaccggaagcctgctgactctgctgccggtggcgttgatctcgcgctaccggcagcagcgcgactggctgacgctgctgcgtcagggcggggcgttaatggccgccgcgctgctgcaatcgctgccgtggctggcggagggggacgaggggcttaacgccctgctgttgacgctgaccggcggcctgacgctggcgccgacctgcctggttttctggcactatcttaccagcaccgtctggcggccgctggggccggcgctggtggcgcagccggttaactggcgcgggcggcatctgatctggtatctgctgttattcaccattagcctgtggctgcagcttggcctgcccgccgagctctcccgctttaccccgttttgtctggcgctgccgattatcgccctcgcctggcactacggctggcagggagcgctgatcgccaccctgatgaacgctatcgccttgattgccagccagacctggcacgatcacccggtcgatttattgctttccctgctggcacagagcctcaccgggctgctgttgggggcggggatccagcggttacgcgagctgaatcagtcattacaaagcgagctggcgcgtaatcgtcggctggcggaacgcctgctggagaccgaagagagcgtgcggcgagacgtcgcccgcgagctccatgatgatatcggccagaccatcaccgcgatccgcacccaggccgggatcgtacagcggctggcgccggacaacgccagcgtgcgccagagcggtcagctgatagaacagctgtcgctgggagtttacgactcggtgcgtagactgctgggccgtctgcgtccgcgtcagctcgacgacctgccgctggagcaggcggtacgttcgttgatgcgcgagatggagctggaggaccgcggcattgtcagccatctcgactggcggattaacgaggcgggactgagcgagaaccagcgcgtgacgctgtttcgcgtttgccaggaggggctgaataatatcgtcaagcacgccagcgccagcgctgtcactctgcagggctggcagcaggatgagcgactaatgctggtgctggaagatgacggttgcggcctgccgccggggtcgaatctgcaggggttcggcctgaccggcatgcgcgagcgcgtgaccgccctgggcggcacactgacgatctcctgcacccacggtacccgggtgtgcgtcaatctaccgctgcgttacgcctgagaggatcgccgatgttcgcctttttaaaagccccgccggacgctgcgccgattagcgataaacgcgagcttgatgcgcgttatcgctactggcgtcgccatatcctgttgaccatctggctgggctacgcgctgttctatttcacccgcaaaagctttaacgccgcggtcccggaaattctcgccagcaacgtcctgacccgcagcgatattggcctgctggccacgctgttctatatcacctacggactgtcgaaatttttctctggtatcgtcagcgaccgctccgacgcccgctattttatggggctggggcttatcgccaccggggtggtgaatattctgttcggtttttcttcctcactatgggctttcgcgctgctgtgggcgctgaatgccttcttccagggctggggctcgccggtctgcgcccgactgctgacggcctggtattcgcggaccgagcgcggcggctggtgggcgctatggaatacggcgcataacgtcggcggcgcgctgatcccgatggtggtgggagcggcggcgttgcactacggctggcgtgccgggatgaccattgccggctgtctggcgatcctcgccggactgtatctgtgctggcggctgcgcgatcgcccgcaggcggtggggttacccgccgtgggcgactggcgtcacgatgcgctggaaatcgcccagcagcaggaaggcgctgggatgtctcgtaaagcgatcctcacccgctacgtgctggccaatccctacatctggctgctgtcgttgtgctatgtgctggtgtacgtggtgcgggcggcgattaacgactggggcaatctgtatatgtcggagacgctcggcgtcgatctggtgaccgctaactcggcggtgaccatgtttgagctgggcggttttatcggcgcgctggtggcggggtggggctcggataagctgtttaacggcaaccgtgggccgatgaacctgattttcgccgccggaattttgctgtcggttggcggcctgtggctgatgccgttcgccagctatgtcatgcaggcggcctgcttcttcactaccggtttcttcgttttcggcccgcagatgctgatcggcatggcggcggcggaatgttcgcataaagaagccgccggggcggcaaccgggtttgtcggcctgttcgcttatcttggcgcctcgctttccggctggccgctggcgcaggtgatggatatctggcactggaccggattcttcgtggtgattgcgattgccgccggcatttccgcgctgctgctgctgccgtttttaaacgcgcaggcgccgcgtaccgccagcgaagcgtgatgtagctcaccctttcgccgcgaacggggcaaaactaagaaattttcccggttttacctggacgccgtctcaggccagacggcgcgctggtttttacaatgcctggttattacgcaggcataaaaaatcagctcaggagatacccatgctggcctttctgaatcaggtgcgcaagccgaccctggatctgccgctcgatgtgcggcgcaaaatgtggttcaaacctttcatgcagtcctatctggtggtcttcatcggctacctgaccatgtacctgatccgcaagaactttaacatcgcgcagaacgacatgatctccacctacgggctgagcatgacccagctggggatgattggcctgggcttctccatcacctacggcgtgggcaagacgctggtctcttattatgccgacggcaaaaacaccaagcagttcctgccgtttatgctgatcctctccgccatctgtatgctgggctttagcgccagcatgggggcgggttctaccagcctgttcctgatgatcgccttctatgcgctgagcggtttcttccagagcaccggcggctcgtgcagctattccaccatcaccaagtggacgcccagacgcaaacgcggcactttcctcggcttctggaatatctcccacaacctcggcggcgcgggcgcggcgggcgtggcgctgtttggcgccaactatctgttcgacggccatgtgatcggcatgtttatcttcccgtcgattattgcgctgatcgttggctttatcggcctgcgctacggtagcgactctccggaatcctacggcctcggcacggcggaagagctgtttggcgaagcgatcagcgaagaggacaaagagaccgaagaaaatgcgatgaccaagtggcagatctttgttgagtacgtgctgaaaaacaaagtgatctggctgctgtgcttctccaacatcttcctctacgtggtgcgtatcggtatcgatcagtggtccaccgtgtacgccttccaggagctgaagctgtcgaaagaggtggcgattcagggctttaccctgtttgaggtcggcgcgctggtcggcacgctgctgtggggctggctgtcggatctggccaacggccgccgcgcgctggtggcctgcatcgcgctggcgctgattatcgccaccctcggggtttaccaacatgccagcaaccagtacgtctatctggcctcgttgtttgcgctgggcttcctggtgtttggtccgcagctgttgatcggcgtcgccgccgtcggtttcgtaccgaaaaaagcgatcggcgccgccgatggaatcaagggcaccttcgcctatctgatcggcgatagcttcgccaaactgggtcttgggatgatcgccgacggcaccccggtcttcggcctgaccggctgggccggcacctttgcggcgctggacgccgccgccgtcggctgtatctgcctgatggccatcgtggctatctttgaagagcgtaaaattcgccgcgagaaaaagaaccgtattttgcagaccgcctgattcaccaggtatttggtaaccttgcccggccttcgcgccgggcttttttatttcttgcgcattatgccaggtccgacagtcgacagcaggcaaattcccattatgatagtcaggctgcgattggatgagaggatgcatgatctggataggactggccaccctggtagtggtgtttgttgtgggatttcgggtgcttacctctgattcacgccgcgcgatccgccgcctgagcgaacgcctcggcatcacgcctgtcccgctggaatcgatgatcgatcagctgggaaaaaccgccggtaatgagtatttgcgttacctggagcggccgaatgaagcgcatctgcagaacgccgcccaggtgctgctcatctggcaggttgcaattgtcgacgctagcgaaaaaaacctgcattactggtatcgcctgatgcaaaaagcgcgtttagcggcgccgatcaccgaggcgcagatccgcctggcgcaagggtttctgcgcgagctggatccggatatgagcgatttacataaccttcagcagcgctataacgacctgtttctcccggaagacggcgtgcactggctgcactgatctcatagttattcggcctggggttcatcgctttttgtgccggatggcggctgcgccttatccggcctacggtttccgcactcgtcacttgtaggccggataagcgtaagcgccatccggcaggataactacagtaggattttcaggccgtgtttttgtacgacgctaagcaattttaatgacattccgctcggtcgcttagcgccagtctcccatttttgcacggtagacacgctggtattcagataacgagcgaacacgggttggctaacattgagttgttcacgtagcgctttaatttcaatgggttgaagtgcggctacgctaccgagacatgattcatcaaaatggcgcattgtttcctgtgggattgcgccaacgctgaatagccccgacgcagcgctatggatcgcttcgaaagccgggcttttgtatttattttttgctgtcatcgcaaatctccaccagttctttacttttaactaagaccgtcgttttctcttcagagagattggcatagtgttttgctaactcacgaaaacccattaactcgcgatggttgatattggccatatcctgtttggcatatagaaaggtataaaaccaatactctgcgcttttggtaagtatgattgcgcgatcgcgattcttgttgagtcgctttttataaacccctcctcctaaatcaaccactttgccctgaagcgcagattgaattgcctgatagagctcgtcgtcggcaatgccatgagagctagcctctctggcgaaccatttggttttaaagatacgcattgctgacatcctgtcgttaaaagtatagcacatggtgctatattaaattctcctgagatttgttaaagcgatagcaagcatcgtttttttaaacatgcgagcagctacgcatcctcttatgaaaagcgagaatagttgcgaaaacgttaaatgcgtcacaaacaaaatgttacactgcgcagctttccgccactttcttcgcaggtcactcatgagtcattcaaatgaaaccaaaccccatgcacgcgagctggcgcgaccaaactggtcggcggtcttcgcggtcgctttctgcgttgcctgcctgattaccgtcgaatttctaccggtcagtctgttgacgccgatggcgctggatttaggcatctccgaagggatggccgggcagtcggtgacgacgacggcattcgtcgcgatgttttccagcctgtttatcaccacggtgataggtaaaaccgatcgccgctacgtggttatcctgttttcgctgctgctgaccctttcctgcctgctggtatctttcgctgatagcttcaccctgctactactggggcgcgcctgtctgggcctggcgctcggcggtttctgggcgatgtcggcctcgcttaccatgcggctggtgccgatgcgcgtggtgccgaaagcgctatcgattattttcggcgcggtatcgatcgcgctggtaattgctgccccattgggcagtttccttggcgggcttatcggctggcgcaacgtctttaacggcgcggcggtgatgggcgtgctgtgtacgctctgggtgctgaaagcgctgccgtcgctgcccggtgaatcggcttctcagcagcaaaatatgtttggtctgctgaagcgtccgggggtgatggccgggatgtgcgccattttcatggcctttgccggacagttcgccttctttacctatattcgcccggtttacatgaccctcgccggttttgacgtcgacggcctgacgctggtgctgctgagctttggtatcgccagctttatcggcacctcgctctcctcggtgctgctcaagcgttcggtaaaagcggcgctggcgatcgcgccgctggtgctgaccgcctgcgcggtggcgctggtgctgtggggagagagcaaaatcatcgcctcgacggtggcgattatctggggcttcgcgtttgcgctgatcccggtggggtggtcaacgtggatcacccgttccctctccgatcaggcggaaaaagccgggtcgattcaggtggcggtgatccagcttgccaacacctgcggcgccgcggtcggcggcattgcgcttgaccacttagggctgctgtcgccgctggtgttgtcagggatattgatgctgtttaccggcctgctggtggcggccaaagtgaaggtgaattcacccgcttaaggccgctcgccttttgccagccgggcattgatgtcggcaatcacttccggcaggtccgccagggtatcaaccacataatgcgccccggcggcacacagtttgcctgccgcccgctcgcggcgggtggcgatttccgctttcgacatcgcctggtactcctcccaggttgcgccgaattcgttaccggacaccgccagcccgacgctccacatcccggcatgtaacccttcgctgatgcccggcgcggcgtcgtcgaccttcacgcagtgggccacatcgtctatgcccagggtaatcacgttctgcagcgccatccaggggcccggacgcccaccggcgggaaggtcatcggtggcgacccaatggtccggggcatagccctgcgcggcggcggctggaaccagcttttccatcaccggacgcggatagcccgagcaggagccgatcttcaggcccttggcgcgcagcgtggcgatggtgtcgaccacgccggctattggtgcggaaaaatcgacaaccttagcgatttgcagcggcataaacgcggcgtagatcgcatcgatatcggcggcagtcatcgcgcggccgaatttggcctgccagcggctatcgacagcagggagtttgcccagcgcctcaatgtgctgccatttgccaagccccatcggcacgcgggcctcttcaagggttatctcaatatcgaaggcctggcggaaggcctcgacgaagatttgcgtcggggcgaaagagccgaagtctacggtggtgcctgcccagtcaaggatcagtgcgctaatacggttcatggcggttccttattgtttccagtacatggcgttgtcgatagccgccagcagggcggtgatatcggcgtcgtagacttcgccaatgttgccgatgcggaagcagtcgctttgcgatactttgcccggatagataacgaagccctgatctttcagcttctggtagaaggtgtgaaagcgatactgcggcgcatccggtgaataaaaggcggtaatgatcggcgagtgcaggctatcgtcgagcagcggccggaagccgagcgcgcgcatcccggcgaccagccggcgctgattgttgcggtagcgctgatggcgagcgctgacgccgccctcctgcgccagctctttcagcgcctgggcaaaggccagcacggtatgggtcggcgaggtgaagcgccacttaccgtggttatcttccatgcagcgccactgggcgtacagatccagtgatagcgagcgcgaacggcctttgcacgcgcccagctccgcttcgcgggcaatcacgaaggcaaagcccggcacgccctgaatgcatttgttggcggagcttatcaggtaatcaatattcagcgcggcgatatccagtggaatgccgccgaagctgctcatcgcatcgacgatatagcgtttatcgtaccgtttcgccagttcggccacctctgcgatcggattcagcatgccggtggtggtttcgctgtgtaccatcgcgatatgggtgatcgccgggtcgttctgcaggatctgttcgatcgcggccgcgtccggacgggagacttcgccacagtcgtaagggtggcaggcaatgcccatcagttgcgccatctcaatcatacgcgcgccataggcgccattgctgacgattagcactttgccctgttcgccgatgacgctgccgagcaccgcttcgaccgcgtagctgccgctaccctgcagcagcactgcggtataaccgtcggccggggtagccaactgcaccagctgctggcgaatggtctgtaccacgccgagattgtaatcatcatcccaggtgcagctatcgaacaacatcgcctctttcaccgtacgggaggtggttaacgggccgggggtcagcagcaggtaatttcgtgaagtcatttgtctcaccatttggtctataccagatttatagttatcatggagacaaagccgggaaagggtcaaaggaaatgtggcgctgcaacaaaaaattcatctggctatgtataatgagcgcacgaaaagtggcagtgagtaaacatgaaatcaccctctggcgagatgccgcaatatctgatgattaaggcgcagctgcaggcgcgtattcaaaacggcgccctcaaaagcggcgacaagctgccttccgagcgcgagctgtgcgcgctgttcaacacgacgcggattacggtgcgtgagagcctggcgcagctggaggccagcggcgtgatttaccgcgccgaccgccgcggctggtttgtgacgccggagcgtctgtggctggatccgacgcaaaataccaacttccacaagctgtgtctcgaacaggggcgcgaaccgaaaacggtgctgcttgatggccgcctggctgccgtgccgctggatgtgatggcgccgctggcgctgcagcccttcgatcaggtctacctgctgacccggctgcgctatgccgacgggcggccggtatgctactgcgaaaatcactgtctgcccgcgcgggtgcctgagctgctgcgccacgatctcaacggcagtctgaccgagatttatcaaactcactacgacctgatctataccagtatgcatctgtcgttttatcccacctcaatgccgccgcaggccgccgaggcgctgggggtgatggaggggcgcccggcgctgctgttgcgccggctgaattacgatcagcatgggcgtattctcgattatgatatcgaatactggcggcatgatagcctgcggatcgaagtcgatacccattgatttattagttaaattttttgatctccccggtggcgctagcgcttaccggggctacgcatcccgctcgttttaactccttcgacacacttctttcatcgttttgtcataaaccatcggtagcgtgaaggcaaatctggtctacaccagaataactaactgcgatgaggcttacacgatgaaactctcccgacttgctctgctgtccctgttcgcgctgaccagctctccggtttgggcggacggcgtcgtcacggtttactccgccgacggcctgcatgacggcgataacagctggtatcagagccagttcgctgccttcaccaaagcgacgggcatcaaagtgcagtatgtggaaggcggctccggcgcgatcgtcgagcgtctggccaaggagcgcaccaatccgcaggctgacgtgctggtcacggtgccgccgtttatccagcgcgccgcgaaagagcaattgctggcaacctttaccccgcaaggtagcgcgcagatccccggcgctaacgaccgctacgcgccgctggtgaataactatctgaccttcatctataacggccagttgctgaaaaccgcgccggccagctggcaggatctgctggatagccgctttaagaacaagttgcagtactccacgccggggcaggcgggcgacggtaccgcggtgatgctgcaggcgttccacagcctcggcggtaaagacgccggttttgcgtatctgggtaagctgcaggccaataacgttggcccatcggcctcgaccggcaagctgactgcgctggtcaataaaggcgagctgtacgtcgccaacggcgatttgcagatgaacctgtcgcagatggcgcgtaacccgaacgttaaaattttttggccggcggatgataaaggcgagcgcagcgcgctggcgctgccctacaccatcgggttggtacagaacggaccgaacagcgaaaacggcaagaagctgatcaatttcctgctggataaaccggcgcaatccagcgtcagcgcgcgctcctggggcctgccggtacgcagcgatgtggcgccggatgacgctaactttaaggtggcgaaagcggcgctcgacggcgtgaagagctgggagccgaactgggatgatgtcgcggtatcgctgtcggctgacattgcccgctggcataaagtgaccgatagcgagtaagcctgatgttgatgaaaaccaccgtcacttcttccccgtcgctggcggggacttccgggatcaccctggactcgctgcgcgtttcataccacggcaacgtggtcttaaaaccgctgtcattgaccattgaacccggtgaggtgctggcgctgataggcccttccggttccggtaaaaccacggtgctgcgggcgattgccggttttgtgcaaccggctggcggtcggatcctgatcggcgatactgacgtcacccagctgccgccgtacaaacgcgggctggcgatggtggtgcagaactacgcgctgttcccgcatatgaaggtggaagataacgttgctttcggcctgcgggcgcagaagcagcccagggggcttatcgccgagcgggtgaccgaagccttaaaaatcgtcggtatggcggattacgccacccgctacccgcatcagctttccggcggccagcagcagcgcgtcgcgatagcccgcgcgattgccgtgcgtcctcgggtactgttgcttgatgaaccgctgtcggcgctggatgcgcaaattcgtcataacatggtggaagagattgcccgtctgcatcgcgaactgccggaactgaccattctctacgtcacccacgatcagaccgaagcgctgaccctggcggacaaaatcggcatcatgaaagacggttcgctgatcgcccacggcgaaacgcacgagctctatcactatccgccgaaccgctttagcgccgaattcctcggccgcgccaatatcctgcaggcgacggcgctgaaagacagccccgagccggggctggttagcgtgagctgtggcggcggcctgattaacgccttcagccggggcggcctgcatggcaacaacaagctgttatgcattcgcccgcagcacatgagcctggcgccgcgatcggcaaccagtaatcgtctcaacgccaccctgacgtcggtgcactggcagggcgatctgacgcatctgctgtgcgatgttgccggcgaagcggtgcggattgtgatgacccacgtgaacccgctgccgcgcgcgggggacaagctggcgctctacttcgaacctggcgatgcggttctgatcgaggtgcaatgatggcgcaaaccctcacgcttgcgcgtccggcgcgaaacttacgcccttacctgtggctggcgttgccgctgctggtgctggcgacgctgtttttctatccgctgctgctgatcgccgatcaggcgttacgcgacgccagcggcaatctgagccttgagaccttctggcaggtgattgactcaaaacgctttattggcgcgctgctcaataccttacagattgcggtgttcgccacccttggctgcctggtgctcggcagcgtcctggcgctgattctggtgtttattccgttccccggcagccaactggtgggccgggtcattgatacttttattgcgctgccgacctttcttattactctcgcgttcacctttatttacggctcggcggggctgctcaacggtgccctgatggcgctgtttgcttttgaactgccgccggtagacttcctctattcgattaacggcgtgattctggcggagattaccgtctttacgccgctggtgatgcgcccgctgatggcgggactgcggcagatagataagagccagctggaagcggcgagcattctcggcgctcacccgctgcgggtgattacccaggttatcttcccggcggcgctgccggcgctgatggctgggggcagcctgtgcctgctattgaccactaacgagttcggtatcgtgctgtttattggcgccaaaggggtcaataccctgccgatgatggtctacagcaaggcgattctggagtcggattacagcgtggcctgcatgattgcgctgatcaatattttgctgtcgctggggctgtttatgctctatcggctggcggcggtgcgcactggcgtaaggagttaacgatgttgatttggtcgcgtaaaggccgcgcggcggcgggcgcgctggcggtgacgctttttgccggcgttttcctgctgccgctggcggtgattttactctccagcctgagtaaacaatggaacggcctgctgcccaccggctttacctttgcccactttgttaacgcgtttcgcggggcggcgtgggattcgctgttttccagcctggtggtgggcttctgcgccagcctgctggcgctgctgtgcgggatgtgggcggcgctggcgctgcgccagactggcgcgaagctgcagaaatatcttgggctgatgttttatctgcccagcgccatcccctcggtttccgtgggactgggcattctggtggccttcagccaggggccactgcagatgaacggcaccttctttatcgtcctggcggcgcatttcgtgctgatctcggcctttaccttcagtaacgtcacgaccgggctggcgcggatttccgctgatattgaaaacgtcgcctccagcctgggcgcttcaccgtggtaccgcctgcgccatgtgacgctgccgctgatgacgccgtggatgatctcggcgctggcgttgagtttatcgctgtcgatgggggagttgggggcgacggtgatgatctatccgccgggctggacgacgctgccggtgaccattttcagcctgaccgatcgcggtaatatcgccgatggctcggcgctgaccatcgtgctggtgggcgtcacgctgctgttgatgatgaagctggagcgtatcgcccgccgattaagccagagataaagaattgatgacgccaccagggcacgggtctgactgcccggcggcgctgcgcttgccggtcctgggggggtagcccgcaggaaggaacgtaggccggataaggcatttatgccgccatccggcataaatggagcgcaccagtcatagcccggctaagcgtagcgccagccgggaacgctccttcgacaacgctatcgcattagaaccacgcctcaaacattccgccgacgttcagcgaatccagctgctggtctttggtgttgttgaccttcgcggtatgctcgttatccacctggccgccggtgacgtagaagcgcagcatcgggcggaactccggccccatgccgatggcgatgttctgcgacagcgtcagcttccagccgtggttatccccgccctggtcgtaatccacgcgctggt

SEQ ID NO: 5419 - DNA, 521 bp, Unknown
  gut microbiota DNA sequence
tcggacgatggcgccgtagtttttgcggttgtcggtattatccttgccgttgtcgtagtcgtggaaggccagcaggtattcgatctgcgcctgctgggtgaacttatggctgccctcgaagctggcgtagaccgtggtcaggtcgtcggttttgttatagacgctgttatccgagttgtcggagtagcgcaggatcaccttgttcaccccgctgtcgttggtgtggctcagcaccaggccgccctgccaggcttcgagacgcgcgtcgctgtccaccgcctttgagtcaaagccgtagttggcgtacacctcgacgtcgatcggcccggccttgatgttgtgggttttggtggtcagcgcgtagtggccgttgtcgccggtgtcggagctgccggtacaggtgatgcgcgatgggttggtctcgtcggccatcacttccggactacaggatttcacctgcgagaccgccgccacgtcgaactgcacgccgccgatatcaaagttcttcaccccggcgccct

SEQ ID NO: 5420 - DNA, 1162 bp, Unknown
  gut microbiota DNA sequence
aaggcgctggcggaacgctaagccttccccggtggcgctgcgcttaccggggcgatgtaacaccgccgaatagcaggtcgggtaaggcgtaagccgccacccgacaaaaaacggcaccgccggtagcccggataaggcgcgacgcgccgctatccgggttttaccacgatggctttttacttgctgtgccagtacgcctgggaacgcaccagctgctgatcgatgctctcgtcttcaaagcgcgccagcagcgatttcaccaccgcgccttcgccggtcagccagataaaataatcctccgccggcaccttcacctgcgccagacgctcggcgacgaaggccggattgtggcccaccacccactcgatgttaaagccgtcgagatccgccagataatctttatacgacgcatcggcgatagtaacgatggccgtcacctgcggcctcgccggcagctggcgtaatcccagcagacgacggcgcagcgccggcatgccggactcatcgcaaacatacagctgccaggcataatcttccggcaccaccagcgagccgcgcgggccgccgatcaccagcttatcgcccacttttgcttccagcgcccaacggctggcgataccgccatcgtggatatagaaatcgtaagccagctcgtgacgttcggcatcgtacagcggcgtatagtcgcgggtggcaggccgcacgccttccccccagtcaatcccctcctcggtcacctgcggcggggtaaatgccgcgcccggctcggggaaaaaaagcttggtatggtcgtcaaagccgtgagaggcgaagccttccagcgcctcgcctcccagcacgatacgctggaacgccgcgcctgcgcgctccacgcgcagcaccgtcagctcacggaaacgcagctcattgcggacacgctgcgggtacttgtctgctttggtttttgtcatcatcgattgccttcgtgaacggtaaatagatatatctaaacttgatgcaaatgataatgattgccaactaaaaagaatgcaagtctttttttgatatagtcaaaacaaaccgcatcaaaatccacatccagaaaacaatcacatatatatcaacaccttaaaaaataaatagcaaccagcattgcgaacattcattttttagatataaatta

SEQ ID NO: 5421 - DNA, 936 bp, Unknown
  gut microbiota DNA sequence
ccgccaccagcagccacgggatcatcccgctgtcgcagtaggcgaagtcgcggaagtaatggtgcgcgctcatctccccgccgtagatggcgtcctcctggcgcatccgctccttgatgaacgcatgccccgtcttcgacatcaccggctggccgccgctgcgggtcacgatgtccaccgtgttccacgtcagacgcgggtcgtgaatgattttcgcccccggctgcttctgcaggaacgcctccgccagcaggccgacaatgtagtacccctcgataaacgacgcctcgtcatcgaacaggaagcagcggtcgaaatcgccgtcaaaggcgatccccatgtccgcctgatgcgcacgcaccgcgtcggcggtgtcctggcggcactccggcagcagcgggttcgggataccgttcgggaaatgaccgtccggctggtgatgcaccttgataaaggtcaccggcgccccggccgccgcgaagcgtttctccacttcatcaatcacgtgccccgccgccccgttgccggagttcaccaccagcttcagcggacgggtaaagttcgccaggtccacgtagcccatcaggtggtcgacgtactccttcagcaccgatatctggcgcagggtcccgcgacgcgccgggtccaccggcgggaactggttctcctccgccaggcgctggatatcccgcaggccggtgtcgccgctgatgggcttcgcgttctcgcgcaccagcttcatgccgttgtagttcatcgggttgtggctcgccgtcacctcgataccgccatccaccccgaggtggaaggtggcgaagtaaatctcttccgtgccgctcagaccgatatccagcacgtcggtgccggcgtccatcagcccgcgggccagcgccagcttcagcgactcgctggtgaggcgcacatcgccccccacca

SEQ ID NO: 5422 - DNA, 2445 bp, Unknown
  gut microbiota DNA sequence
agcgaacccgcgttgcatattattcccgccgagcagatccccaccctctggcaaggcccgctggggggcagcgccaggctcctcgccggcaccgccgggccgaatatgattgagctgtggcgctgggagatgcagcccggcgaagcctttgcctcgcctggccacccggcaacaaccttcgagctgctgcacgtggaagccggcgcgctgacgctgacgcttggcgagacctgccgcacggtggcggccggggaatcggcggtggcccgcaccgaaatagagcacggttaccgcaatgagggtaccgcgccgctggtctttaccatgaccgtggctgaactgccctcctgacagacataatgataagacgatgacaaaactcatttatttacagggctatcctgaatcgctgctggcgcaggtgaccacgttaatcgagcaagaccgcctcggcgaggtgctgcaaaagcgctatccgcaagggcacgacgttaacagcgataaagcgctgtatcagtacacccaggacttgaaaaaccgctttctgcgcggcgcggcgccgatcaacaaagtgatgtatgacagtaagatccacgtgctgaacaatgcgctcggcctgcataccgccatttcccgcgtgcagggcggtaagctgaaagctaaagcggaaattcgcgtggcgacggtatttcgcgacgcgccggaagcctttctgcggatgatcgtggttcatgaactggcgcatctgaaagagaaggatcacaacaaggctttttatcagctgtgctgccatatggagccgcagtaccaccagctggagttcgacacccgcctgtggctgacgcacctttcgttaaatcgttctgcgtagtgacgcactggttttgtcatgacggcatgatagagtggcggcaggttccctttaacggagttcgtcaacgtttatgatacgtttcgcagttgttggcacaaactggatcaccaagcagtttgtcgatgccgcccatgaaaccggcaaatataaacttaccgccatctactcccgcagcctcgaacaggcgcaagccttcgccaaagactatcctgtcgagcatctgtttacctcgctcgatgaactggcacagagccctgacgttgacgcggtctatattgccagcccgaactcgctgcactttccgcagacccggctgttcctgagccataagaagcacgtcatttgcgaaaagccgctggcgtcgaacctgcaggaagtcgaggcggcgatagcgctggcgaaagaaaataacgtggtgctgtttgaagcctttaaaaccgccagtctgcctaactttctcctactgaaagaaacgctcgctaaagtgggcaaactacgcaaagcctttatcaactactgtcagtactcctcgcgctatcagcgctaccttgacggcgaaaaccccaacacctttaacccggcgttctctaacggttcgattatggatatcggcttctattgcctggcgtccgctgtggcgctgtggggcgagccgcaggccgttcttgccaccgccagcctgctggacagcggcgtagacgcccagggcaccgtggtgctgagctatggcgacttcgacgtgacgctgcatcactccaaagttagcgattccgcgatccccagtgaaattcagggcgaagacggcgcgttagtgatcgaaaaaatctccgaatgtcagaagctggcgtttgtgccgcgcggcggtaaagcccaggacctgacgcagccccagcacattaataccatgctgtatgaggcggagacctttgcgcggctggtggagacacaggatgtggatcacccgggcctggcggtgagccggatcaccgccaaactgtccagcgaaattcgtcgccagaccggggtgatcttcccggccgatacgcagccgctggcgtaaaagagtgtaaaggcctgaccggccgccattgacgaaaaccgccctgtgacatattttgttacgtgcaaaggggagtaacttccttgccggttgatcgtcattacgatgcgtgcaataccgcatccggtcgccgggcaataaccaaagcccatcgcgatgtactttggttgttgtaagtgagaccttgccggaaggcgaggtctatgcataaaagcgcagcggctgccgtcttccgacgtcagccgttttgtttttatgtaaggaatatcaaatgaatactgtcggcacgccgttgctatggggtggattcgctgtcgttgtcgcgatcatgttggcaatcgacctgctgcttcagggacgacgcggttcgcatagcatgaccatgaaacaggccgctggctggtcaatcctctgggtcacgctttctctgctgttcaacgccgccttctggtggtatctggtgcaaacccagggccgggccgtcgccgatccgcaggccttagccttcctc

SEQ ID NO: 5423 - DNA, 572 bp, Unknown
  gut microbiota DNA sequence
ttgaaaaagcgctggcggtcgataacgtcttcgtctggttgatgctgttcagctatttcgccgtaccgcctgctctgcagcgccgggtgttggtgtatggcgtactgggcgcgatcgttctgcgtaccattatgatcttcgccggcagctggctgatttcgcagttcgactggctgctgtacgtctttggcgccttcctgctgtttaccggcgtgaagatggcgctggcgaaagaggacgactccggcatcggcgataaaccgctggtgcgctggatccgcagccatctgcggatgaccgataaaatcgagagcgagcgcttcttcacccgtaaaaacggggtgctgttcgccaccccgctgctgctggtgctgattctggtggaactgagcgacgtgattttcgccgtcgacagtatcccggcaatcttcgcggtcaccaccgatccgtttatcgtgctgacctcgaacctgttcgccatcctcggcctgcgcgccatgtacttcctgctggcgggggtcgctgagcgcttctcgatgctcaaatacggtctgtcggtgatcctggtgttt

SEQ ID NO: 5424 - DNA, 2559 bp, Unknown
  gut microbiota DNA sequence
gctctcgcacacaaaaaagccccgaaaatcggggccttataagttattcgcttaattaactatttaatgccggtcgttcgctgatggcgatacgctgcggggcgatctgctcaggctcattgcgggtcagatcgatatgcagcaggccattggtgaaggtcgcgccagagacctccatgttgtcggcgagggtgaagctcaggctgaaggcctggctcaccaacccctggtgcagccatgtggtctctttttccggctgctgcggcgtgcctttcaccaccagacgggtgccttccagttgaatatccagatcttcctgacggaaaccggccagcgcaagggtaatgcggtagtggttatcgtcgcttttttcgatgttatagggcgggaagctttggctttcaccggcggtttgcagggcgctggccagtttgtcaaaaccgatccattgacgcagcaggggggataaatcgtagttacgcatactgttttctccttctaagaagcgagtgaatacctgcgaattctgtaaattcgcatctgctccctgacggcgagcaggttgttacatcaggccgccacgcggcctgaaacggacaattagttgatttcgatgcggcgcggcttgttcgcttccgggatcacccgttccagatcgatatacagcaggccgttcaccagattggcgccgcggacgtgaatgttttccgccagctggaatttgcgctcgaagttgcgctcggcgatcccctgatacaggtaggtccgctctttctgctcggcggcgtgggcgcctttgacgatcagcagattgtcctgggcagtgatctccagctcgctttcagcaaagccagccaccgcgatagcgatgcgatagtggttttcgtctaccagctcgacgttatacggagggtagccgccgttgctctggctttgattgttttccagcaggttgaacaggcggtcgaaaccaatggctgaacgatatagcggggaaagatcgaagttacgcatagtaaatagctcctgaaaatcagcgagaatcaaatgaccttccatcgtggacaggccgcggtaatccggaatacccctcaggcgtattctcagtgggttacacctataaaatgggtttctccccgtgcttttcaagggattgagggcaattttttttgcagtttatcgatgattgcttagactgggtggaggagcacaaaaagcaaagtgcgatgcccgccacagtgcggcgcaataacactatgcattcacgggatggcccgatataaccgctgaaaggttatctcaacgcccgaaacgacaatggaagaacaatgaaaagcagacgactgttaaagctggtcctgttcagcgggataataagcctgagcggttgctccagcgtaatgtcacataccggtggcaaagagggaacctatccgggcacgcgatccagtgcgcaaacgctgggggacagcgataccaactggggtgtgaaatcgctggtggcgctggacatgccgttcaccgccgtcatggataccctgctgctgccgtgggatatgttccgcaccgacagctcaatcaaatctcgggtcgaaaagagcgagaaggctacgctggcgaccaactcggtgatcccgccagcgccgatgcctgcccagtaagttatcgtccggtctgcgtaacccacagctgacgataaccgtccacctcctccatccaggcaatctgtttaccgtctggcgaaaagacgatcgcgtccgccgagggcgcatgcgcatgcgtatcggttaaaaaggtgatatctcccgtaccggcatggcagcaggcaattcgatcctccagcgcaaaacccagccactctcccgacggatgccagttaaacgccgactggatacccgacgcgtgatgcgtcaactgccgcggctcgcccccctgcggggaaataagccacagctgcactacgccggcgtcgtcgcgcatcagaaaggctatcgccgtcgcctggggattggcgcgcacccagtggcgcgggacgttcaccagtcccgggtagcggcgatggtgggtgaaggtcaaacgacgctggctgacgcccgccggcggcgccggcattgtggttgcggtaccggccagcggcgccccgccaggctgcttccagccggcttcatcctgcggcagatcgacaataaacagctcaggcactttatcgccattttccgccagcgtatcgccaataaacgccagagtatggttcccgacccagccctcctcataggcgcgattaatctcatcgctgcccggcgcgggtgccggcgtcgtgcggcttaccagcacgcaccagtggctgccgccatattcgcgcggatgctgtccctgcggcgtcaccggtccatagggcgccgccacgccgacgttgcgcagatccagcgccggatcgcgctcgtgcagcacgtgatcgttgtaggtaaaactgacaaactgaccgttggggctatagacatggacgtggctgccgccgcgcagtgcgccgggcgtgtaggggggggtaatgtccatggc

SEQ ID NO: 5425 - DNA, 2030 bp, Unknown
  gut microbiota DNA sequence
cggccattccggcggcgcaggtgcagaccgcgcgcgcggcgccgacgatcgtgcgccctggctgggataatgtcccggcgccggcggagccgacctaccgctctaacgttaacgtgaaacacacgtttgataacttcgtcgaaggtaaatctaaccagctggcccgcgcggcggcgcgtcaggtggcggataacccgggcggcgcctacaaccccctgttcctctatggcgggacgggtctgggtaaaactcacctgctgcacgcggtgggcaacggcattgtggcgcgtaagccgaacgcgaaagtggtctatatgcactctgagcgtttcgttcaggacatggttaaagcgctgcagaacaacgccatcgaagagtttaagcgttactaccgctccgttgacgccctgctgatcgatgacattcagttctttgccaataaagaacgatcccaggaagagtttttccacaccttcaatgcgcttctggaaggtaatcagcagatcatcctgacgtcggatcgttatccaaaagagatcaacggcgttgaggatcgtctaaaatcccgcttcggctgggggctgacggtggcgatcgagccgccggagctggaaacccgcgtcgcgatcctgatgaaaaaagccgacgagaacgacatccgcctgccgggcgaagtggcgttctttattgccaagcgtctgcgctcgaacgtgcgtgagctggagggggcgctgaaccgcgttatcgccaacgccaacttcaccggccgggcgatcaccatcgatttcgtgcgcgaagcgctgcgcgatctgctggcgctgcaggaaaaactggtcaccatcgacaatattcaaaagacggtggcggagtactacaagattaaggtagcggatctgctgtccaaacgccgctcccgttcggtggcgcgtcctcgccagatggcgatggcgctggccaaagagctgaccaaccacagcctgccggaaatcggcgatgcgtttggcggccgagaccataccaccgtgctgcacgcctgccgcaagattgagcagctgcgtgaagaaagccacgacattaaagaagatttttccaatttaatcagaacattatcctcgtgacgctatgaaatttaccgtagaacgtgaacatttattaaaaccgctgcaacaggtgagcggtccgttaggtggtcgtccgacgctgcccattctcggtaacctgctgcttcaggtcgcggacggcgcgctgtcgctgaccggtaccgatcttgaaatggagatggtggcgcgcgtggcgctggttcagccgcacgaagcgggcgcaacgaccgttccggcacggaaattctttgatatctgccgcggcctgccggaaggcgcggagatcgcggttcagttggaaggcgatcgcatgttggtgcgttccggccgcagccgcttctcgctgtcgaccctgcccgccgccgatttcccgaatctggatgactggcagagtgaagtggagtttaccctgccgcaggcgaccatgaagcgtctgatcgaagccacccagttctcgatggcgcaccaggatgttcgttactacttaaacggcatgctgtttgaaaccgaaggcagcgaactgcgcacggtggccaccgatggtcaccgcctggcggtctgttcgatgccgctggaagcgtcgctgccgaaccattcggtgatcgtgccgcgtaaaggggtgattgagctgatgcggatgctcgacggcggggatatcccgctgcgcgtgcagattggcagcaacaatatccgcgcccacgttggcgattttatcttcacctctaagctggttgatggccgtttcccggattatcgccgcgtattgccgaaaaatccggataaacacctcgaagcgggctgcgatattctgaagcaggcttttgcgcgcgcggcgattctctccaacgagaaattccgcggcgtgcggctgtacgttagcgaaaaccagctgaaaatcaccgccaataacccggaacaggaagaagcgga

SEQ ID NO: 5426 - DNA, 1119 bp, Unknown
  gut microbiota DNA sequence
gctttttggcctgggccggatcgtaagggtaagggtcgacgccttcagcgttaaaggcccaggagatcggcgcgatcggttcgatggcgactttgccgtatccctgatagaccacgtcgatcagcttctgcctatccaggccgtaaatcagcgcctggcgcacccgcttatcctgtagcgccgggcgatgcacgttgaattccacctggctgtagtcgctggagccgtaaagattaatattggcgaagccgagcatcttcagttgctcaatatcgtcggggcgcgaggtaaaggcgtcgtagtcggtctccccggtctggaacagctggaagttggtggacggattggtcacgcgatagataaagcgcggcgttggcggcgtcccacggtaaaaatggctattggcatggaagcgtatttcctgaccgggaatatatttgtcgtacacgtaagggccgttgcccagcggcttgccgtgcagtgagcgcagatagtcgagattcccccgctgataccctttgccgtaccaggctttcgacagtacaggcccgccaattttggccagcgtggtggcgcctggctgcgtggtggtcacctgcagggtgagcgggtcgatgaccttcaggccgctgacgctgtcagccttgccggctttgtagtccgccccgccggcgatattggccagggtgatgtcggtatcgccatcatagctggggtcgagcaggaccgtcagggtaaaggcgacatcttccgccgtcagcggtgagccgtcgctaaaggtgagaccagggcgcaatttgatggtatagactttgttatccgggctgaccgtccagctctccgccagtcccgggaccagcttgccctggctgtcccagtcgatcaggcgtgaaaaaatgacgttagtcacgttctcatcccagccgttgacgaaaaagtaggggttaaagatcccctgcggctcggagatcccggccaccaccgtgtctgtgcgcagtttggcgctggccgggatctggctggcgtcgctggccggggtgatgccttctttcagcatcacttccgcatgggcaatagaagaaaatgctaccacgccgccgagcagggccacttttagcg

SEQ ID NO: 5427 - DNA, 1093 bp, Unknown
  gut microbiota DNA sequence
accaacgatgattataataaatatctgcagataacaggaataaaaaaacctcccattaatattctggtaaaagagtacccatccttgcaaaaaggtgattactctgttggtgtgacctggcaacaggcaaaagactattgtcagtggttaggtaaggagtctggtaaaaaatttgatttaccaacagaggcgcaatgggaatatgcagcaagatccagagggcaatacattccgtttgcaacgaataatggtgagttcctgcccggtaaaaacatccccagccaggatgagctgagtgaatatactgatggagcaggtattcctatttatccagtggggaaatatcccccaaacctcctgggtctgtatgatatgggacttagtggctcagaatggaccaatgactggtatgcgtcagattattactctcattctccggtaaacgatcctcagggacccgtaaaggggaccgaaaaagtcctccgcgggaatgttggcggtgacagacaatacgctttaaccgtgttcagacaatcagatttgccagttccaaagatcaataaagacgatgattatgaaaaatatggtgttggtccgcagtatgttttccgttgcgtcatcaataaataatgtcgtttggtggtgacatatatcattttaaccggagcaacaacgttgaatgaatgttccaataaaccggagagactatttaaacctgtcccggatagcctgatgtcagaatatcttgccatgatcgacgaccagcacccgacgggtacaatgactgcctgatgcaatggctgaggtgataagatgagaaaattaatcgtagttgcttccgttgcagccggtttactgaccgggtgcgaccagaagagtactggcaagcgtgaaaccttgtctgaagcgcttgttgctaagtcgctttctaacatggttcccgttaagggcggcgagttcttaatgggggattttggcccattagtcggtcaaaaactacctttcagcataaaccaggatgataaggtattacataaggttgtattaagtgatttttcgatatcaaagtttaaagttaccaacgatgattata

SEQ ID NO: 5428 - DNA, 6240 bp, Unknown
  gut microbiota DNA sequence
atctgatagcgttgagttcttttcgacaaatcagctcctcgcagcgttgcgcaggcagcggttgcgcattctggcaagcatccagagctcgtttgctgttgtcgtcattccaagcattgatgtgtaaacagtcgcagcccggcgccacagctttttgtcttccagcgtcttcgccagggacagtgcgtcctggacttttttcacatcctcttcagataatggtgttgcaatctgcggcagggcaacatcgggaacctcaacgcctgcaaccactcgatatacatactggcagccgttatgggtacgatggagttttcccgcggcatggagctgccgcagcaagttacctgctgtactggcttgcaagtccagcgcatcgcagacatcctgcaggacgcattctggcgtccgactaacgatgacaagcaccatctgtgctttggttactttggtttttgattgtttggtcatggtcaaaactcgtttacttggttaaacctgccgcctttcggcgtttgtactcttccatcagaatctgtgctggcgtcggtcctgcaggatgtctcggtgctgccaactgctgacgaattggcggaatcgaaaacccgttagccaggtgtttggtccatttcgtgagtaagttttctgccagttttttcagctctccctccgtcaggttcctctccactccagttctgcgcatctcaatgcaaatgtgatagagaacatcctgtttccatggatatttgtcgctgcccgagtatcggtaagactcattcctccagcgcttgtattccgccattacagattcggatgtcagattgaacgggttagcaccgctggcagataccagagcaacgaattcagccagatccggtggccatgtgttacccgcggcgcagcgctccatgcactgactgcagaccagagtaatctgggcttcactcatcgatccaatctgggcaatccacatatccgagggcgccgccccgttcttatgggtccaccggttcgaaaatatttcccccatgactgtccatagccgccatgccgtatccgccgccagcaagtccgttttgcttttcccagcgttctctggctgcctgaatttcctgaacagcccgggatgcggtgttaactggttgaattcctgcatggtctttacctccggttgctggttgtggtttagatttggctctggcacttatcacgctgcgggcaaatttctgctcccactgaatctgagtgaacactttcccctcggatttccagtacgcgatgaactctgccagctctgtcggcaggtatgccggttcgggaagcgctataccccaggtagcagccagccgcggccagtcctgtgacggcagccaaaggtcgtgcatggcgaatttcccgatcggaatatccactccaggcagatactgaggttgctggggaaaatttctctcctgcgcatagagagtggggtttgatccttttcctttcccttcccttccttttccgtcagtgagtcctccatgaggattcactgagtcctcactgagccctccttgattaggagctctcttttcttcctttcctgccttagactcagtgaattctggcggaagaggtatttttgaggccgaaggcctgtttattttttgatgcttaaggaaacctttaatctgcaaatagcagacatcattcactgaatactcagtgagtaatccatgagtaatcagttcctgtattagtggttcgcaatcgagcgcgtccgcagggaagatttgcatcttcaaccgttttggcgaacgctcaaggcatcccatatcgttggcgaagttgaacaacccgataaacaggagacgcgctggaattgaacattccaccaccttctcatctgtccagaattcaggtttaactgttctgatgcgggccatctgaaacctcttattaaccagctggtgctggtggtcattgtcaaaactcgattagaaaaactgcggcgctacggcgctaatgctcgccagaagtggtcccgccgcatctgcaggaagcatgttaaaaagtgcaattgctgcctcccgaatttcacgctctaacttctgcaacggagcaccaagcaattttgcctggtgcgcttcgctacactctttgattgcttgagccaccagctcgctttcagtcaatccacgtttcaatccgtgtttgcgcgcaatctcaataggcatcgcatcagcgatcgctcctgaaagctgcatgacgtagctggtgtacttctctgatccggattcgtttttcaggtagcggtacagattctgtttattgacgtttattccgcgaccgttttgttttctccattgctcatccaccagctgcgcgatgtggtcctgtgcacgtccaggtaaagtcgactcccattcctgaacggcagcaaaaattgctctactcttcatccgagcccggcgtagaccggaaaactgattttctgagttcagttgcaggcccattaccgggttatgatttttaaaagagatggtttgcatgcttactccttcggtaatccatccgttgggtttgggtagagatctggtctgagttcatgcggagtaactttccactccaatgccttactgactttcagaaccaactcgccgggaactttatgtttgaaccaaccatttactgtttgtgctcgccgattaagccgccgtccgatttccgattggctacacacggcaagtaattttttttgaagtgatggcttcatacgttgctccactaaaaactgtaaatttgaattacagtttaatcagtttatttcgatagtgtcaaatcattcgatatgaggcctgaagaaaaaatctgtataatctttctcatgtgtttgtttgggtggatgaagatgaactttggtgttcgactgcaacgagtcttagatgagataggaatgtctcaatcagaactggggcggaggatcggtgcgacatcccaatcagtgaatggctggtgtcaggctggaatccttcccagaaaagaaatgcttgagcaacttcctgatataacaggaaaacctttgtattggtttttcatgacagatgaagacgaagagacgctgcagccgccaagatcggaagatatctatgtccttaccccggagaccaaaaagctcatagaaatttacgatcagcttcctcaagtggagcaagaacgattcgtcgggttaatgcagttaaggttggaagaactcgatgctttcatgaacgaatatttaatgaaacgaaagaaagactagaacagccttcccccccttcataagcgccgccttcgggcggtttttttgtgcctgctccccacctcacatccaattctgaaatttaaatcatcagttttaattgacatctgtagtttatatcgataatactatctccgtcctatgacgtcatcgaggcaggaagcccacgtagtagctgccggcggcatacgaaacaccggatgagatgacagcaatatcaatcgcagcaggttcaacgttcggctgcccggccttaagggaaggaaatgagtatggataaagcatatgaagactattttgaaaacctctctgaaggtgaagaggcattgagtttcagcgagtttaccgcagcactttcaggtaagccggcagactgcgcctcctctgaaatgtaatggaaatactgcgcgcttcgtggtggtgaattgcagggtgaaaaagctcactcgtgaagatcagcgtcacgacaccaccgacgaagcgcgtcgaagtggtgaaaataaaaaatctgggtttgcaatgcggtgaatgcggctatgcgcacgcgacacagttaaaaaagtaaacatggcggttattcacacgttgtggggaaaaagttgtcggcggtagttgttaactggctgccgtcaccgggaggcacccggcgccgcattgcaaaaccacatcctaatactgagttaactggagataactatgaaggattttgcccgagtacctaccgggaaccaggcgacccgcctgaactggttcgaggtgagacttcgccagctgtgttacttgctggcgcagaaaggaaaccctgaggctgaggcatgaataccctgtttgcccttgtcatcagcgtatgtgctctcactggtgaatgctctgatgttctgatcggtgtttatccatcagaggccagttgcaacagcaacgccgatgaacaaaaagtacagggccagtgcctcccctaccgaaatgcacaaaacatggctgacgaccaacagcctgcagtgagtttttgaatcgagttttgaccaatggccgttacggccggagaagtgattatggaatttggaatgaaacgcgttctggcatctgtccaggccgccgccactttgaataagctctatgacggctcgcccgtttcactgacggccatcagtaaagagtcaaagctgtctacttcataccttgagcagatcttcaaaaagctgcgggcgggtaacctggtaatttcacagcgtggcccaggtggtggttatagcccccgcggcgatgacatcaccgttacagaagtgatcactgcggtatctaaactgccagcccataaaacttttgagcctatcctgcgagcgcttgacgacgttcgcgtatcacagctgctgcggggcgattcgccagccccataaagcacaaaacccgcgcaaggcgggttaagtacccggtcagccgaccaaagctttccggaatcgagttttgaccaatgaccaccaccaaggcggctgccatcagctgccgggtatcttacaatccaaaggagcccaaacgcaatgaacaactacccgtatctcattaaagcgaaggcaaaagcaaacgaagcgaaaagtctcttctgctggttctctgctaaatccgattctcgcgccgagcgcaaaatcctggacatcctggaagacgctgaaattaacgttggccgcggcgccagccatcagctgccgatccgcaccaactggctcatcgttgatgacttaccggaagaaggtgtactggatgacacctggtgcgatcgctacgagcttggtggtgaagacgggctgacatggcaaaaaatcgttgcgccagcggctgctgaaccacagccctccagtaaaccagaaaacgatatctctcctgcaaatagcgatgaagaggactattcgaacaatgaagaagcactcttcaacctggcggaaatgtcattccgcacgcagctgcttgcccagtatatggccgacgagcgtcacgtgtatcacattagcattcctcatcgtaaccgcctttcagcgatggaaatggatacggataatcacggtgtgcagaatctgctgctgacggcagaaaatattccggagcttaaaaaatatgatatgcctggcctgtggaaatttaccagtgcatttaagagcgtatttcctgtggggaaacgccatgagctcggcaagcaaattcagttcgccaaattgtggcttgaaacgtcgcacattgaccgcgggatccttacaaaggaatgggctgctggaaactatatcacctcaataaacaaaaccgatgccggcgccaatgctggcggcggtaacaaaactgaccgcaatccggattatcagcattcgctggatactctggatatagagatcgctcttgcaacgatgcctatggattttgacatctataattttccggcatcagtccaccgccgcgcgaaggaaatagtacagaagaaagaaagtccatttaaagaatggtctgcagcattacggagcacaccaggcatccttgattattcccgtgcagcgatttttgcactgatcagggaagcatccagtggaataactccttttccagatcggttgcgtggctacatcaacgcgaatctgactgaacataagcatgataccccgagcgctgagacgcttaccaaggcgggacatattccatctgctgcagtcactctggatgcaacaaaccaagtaatcgccggagaggatagcagcgcaaaactggaaacactctcctccgacattaaagcagttggtgccgaactggtaaaagaggctcaaaagcaacgtccggacgctaatcaggttctggccgccgagcgcggcgaatatgttgaaggggttagcgaccctacggatccgaagtgggtaaccgaagaccttaccaagaccaggcagcctgaagtttcaaaaattggggacggagtattttcaatt

SEQ ID NO: 5429 - DNA, 771 bp, Unknown
  gut microbiota DNA sequence
tcttgttgacgttacgggcaaggttaaccaaaaagaaaaaacagatgaagttgttcatcaaacggattctgtagatattgaatccggtcatcataataaggaggaagatcagccaattgattatgttcacgttatggttgatctggaaaccatgggtaaaaaacataacgcccctatcgtcgctattggtgcggttgtttttgacccggcaaccggctctattggagaaagtttctataaagtcgtatgccttgaatcctccgtgaactggggcgccgtaatcgatccatctactgttatctggtggcttagacagtcctccgaagcacgctctgcgatcgtaaatgatgatgctatcccgttgcaggatgcattactccagttcagagaatttgtttctgataatgttgctggtgggagcaaaaaggcgcaggtatggggtaacggtgcgtcattcgacaactctattctgcgttcttcttacgattgcattgctgaagattatccgtgggaatactggaacgatcgggacgtacgaacaatggtagagctcggccaagccattagcttcgaccccaaaacaacgatcccgtttgaagggtctcgtcacaatgccctcgctgatgctattcatcaggcccgctatgtatcagcgatctggcagcgaataattgccggcaatcaggtgctgcaaaaattgatgcaaaactgattttgtattttcagatactggcccagcaatgggccatgatgaggtaaaacatatgctcc

SEQ ID NO: 5430 - DNA, 1041 bp, Unknown
  gut microbiota DNA sequence
tgtttggctcggtggcggtgatccgcgaatccggcgtcaacagtctgcgggtgggggatatttactacgtgggtcatctgccctggttcgagcgcatctggttcgcgctctctaaccacccgatactgctggcgatcttcgccgccatcagcattgtgctgctggcatgggtgctgtggcgcatgctgcgcatcatcagccgccgccgtcttagcctggatgatgagtaaaccatgatgaaagtactttgtggcgcggtgctctcggcgctgctgctggcggcgggccaggtgggcgccgcctgccagtggcccgcctgggagcagtttaaacaagcgtacgtcagccccgagggacgggtgattgaccccagcgatgcgcgcaaaatctccacctccgaagggcagagctatggcctgtttttcgccctggcggccaacgatcgcgcggggttcgacaaactgctgacctggacgcagaacaacctggcggaaggcgatctgaaacaacatttgccgggctggctgtggggcaaaaaggacgatgagcagtggaccctgctggacagcaactcggcgtccgactcggatctgtggatagcctgggcgctgctggaggcggggcgcctgtggcaacagccgcagtacaccgagaccggaaaagccctgctggcgcggattgtcgctgaagagacggtggcggtgccgggcctcggcacgatgctgctgccgggaaaagtcggttttgccgatgacagcggctggcggtttaaccccagctatcttccgccgcagctggccacctactttgtgcgttttggcgcgccgtggcccgctctgcgcgatagtaacctgcgcctgctgctggagaccgcgccgaaaggctttaccccggactgggtgcgctatgagaaagggaaaggctggcagctgaaaaccgaaaagccgccgatcggcagctatgacgcgattcgcgtctacctgtgggtgggcatgctccatgatggcgataagcagaaagcgcgtctgctgcaacgcttcg

SEQ ID NO: 5431 - DNA, 974 bp, Unknown
  gut microbiota DNA sequence
ccgctggcgctggcaacccgttcgctggtttatggggtccaggttagctgggaattcccgaccggctcgggggatacgctgcgcacggaacttcagtacagcaaaaatcaggacggtagtgcgccgatgctgttatcagacgtggcctatccggggaaaagctatcagcagatgggcctcagtatgggcgcagaattctggtatcgggcgcgccttgtggatcgtcttggcaatgaaagcccgtggaccggctgggtccaggggatggccagcgataactttgatgattactacgaaaacctgaccgacgcgatcaaggatatggctgcctgggaggaaacacagcgcactattagcgaaacacaggaaggtatccgcaatacgcagcaggaactggagcagaccgctgaagctctgcgtaaggaagccgaagaccaggcgaagcaggtcagccagaatattgatgcatcggcgaaaagcatcacggctgatgttgacgggaagatctccgccgtgaataaaaccatcacggatgagatcacctcggtcaatgaggctctcgattctggtctggctcaggcaaacaaaggtgttcaggaggcaaaatccgccgtcgcagatgcgaacaagcagatcgcaactgtgaacaagtcgctgaccgacagcatcacccaggtaagacagtcagtcaccgatacggctgcggaaatcaacgccaccatcgacctggagattgccagggtcagcaaaacgctggccgacggcgatgccgcattgaatgcgcagataaagactgccgaaaatggcctgaagcagtcgctgtctcaggtcaacaccacgctgaccaatgcggtgaagcaggagaccgcggatcgtatcgccgatgttaacgcgaaggcgtcacaggccgctgatgaactgctggcggcaacgcaggggattgaggcgagtatcgagagcctgactcaggtgat

SEQ ID NO: 5432 - DNA, 2476 bp, Unknown
  gut microbiota DNA sequence
caaaactttaataactgcagtcttgtgattcgtcgggccagctctgatgggttgaccgtgcttggtggaatggacggagataaaaaacgtgtagaggaaatcctgcaggacacctgggaaagcgctgatgactggttctgttaagttgaggtccagtggcttacctgctttattttgaggattttgctgtgggtaaaaaacaagaaacgccgaacaccggctatgcaattatcagatgcgacgatggggtgatcgttgcccgtctgacatcctttcctgtgtgtgagcgcgctctgatgtaccggcgcggcgacactgtttcgtttatgcctttgcagccggatgagatagtggggactctctctcttttttcacagatgattgaaaaggctaagtctggagttggttaccaggttccccctggttctgttacaatcccgtcataggcctgaacaacctatacctgctgcgtcgcggagagaaaccatgacgcaaacccccgaagtatcaaaatcccatcagactggtgctccttcatcgagcgccggtttgctttcgtcttcaaaactaacttttcgccagcaggaagttttcgatctgctggtggcctacatcaatcagcatggctacccacctacgctatctgagctggccgatatgctcggcgttagctcgtctaatgctgtcctgttgcatctgcgtgcgttagagagaaaaaattttataaaactctctcgccgtgtctccagaggaatttccatcgtcgggcgaaaggagcctgtgctcgccgtgcagctgctgcaggaaatgatcgctgaagaacccggcgcgcgtgaaagagcgattgagtttttgcgactgttcggtgatcagccatgaagaaaagttggtttttacacgagcaactttcagaggctgaggctacagagctggtggagcgataccgtaaaaataactgtgtggttgagaagagcttatccagagactttgcatcgtgggagatccgcgtgctgttgccggaattgaagaagccgccacggattgacaggacctacatacagaagatgtggagggactgatgcgagctttgcttaacgtggatattgcacgccatcttggaattgtgctgcttaagccaggtagtgaattaatgccgttattcggtgccggccgagttcttgtggaaataccgccggcaagcatgaaaaagatacccagcgggcgtcttcctgatgcccggcagccgttgcgggatgatatggggctcagaccatttttcatgaagaaagctgttatcactgctgctggtggtgttagtgctttagagtcatggttgcgccggcaggttaaaaactgtcagtggacacattccgattaccatcaccatgagctcgtcccgtttcgccattcgacgggtgtaataatcgcatgctggcactgtgataatgagctgaaaaaccaaacggaacacaccctcgatcaactggtaggtgttaataacgctgactgggtaatcgacactgcccgcatcgcgcttggtctggacgctcagcgatcattgtcactggcggagctatgctggtgggcggtaggcgccgggattggaaatgaaattacagaagaaatggcgcgccgatccctgcgtattaaagacgatggcattaaatcggtttacagggagagtgagattgttccgtcggtaccggccaccagcattctttctcctcgtatcgaaaaagcaatcaggccaacggcaatagcaacgccggacaaacctctgttacctgtgaacgtcgatcctgttgcaccggcgacactattcgccagacctaagcggattcgatggttatcagctgactttatctcatgggttaaaaaacagccgtgtatgtgctgcgggcagccggcagatgatgcacaccaccttattggctgggggcagggcggcgtaggcaccaaggcccacgatatttttacgatcccattatgccgcaagcaccatcgctctttgcaccatgacccagccgcttttgagcgtgaatacggcacccagccggtattgattattaaattgctggatcgggcttactcgctcggcgttctatcctgaggagctttaaaaatgagagatatgtacgaaataatggaccgttggggagcttgggcggcatccgataatagtggtgttgactggcaacccattgctgctggatttaaaggcttgttacctcatggaaagaaaacacgccagcaatgtgatgacgatgaggggatcatgattgacggttgtgtggcgcgtttgcggaagtataagccagaagaatatgagcttgttatagctcacttcgttataggtatctcgctgcgtactattgctaaaaaaaggaaatgttcagatggaacgattaggaaagagatgcaaacagcgttaggttttattgatgcagttatttgtatggtgaatgaatagaattaa

SEQ ID NO: 5433 - DNA, 2762 bp, Unknown
  gut microbiota DNA sequence
gatcccccacccgacgttgagggcgataacgttgggatccgagccaaaatagtcatggccaatcgcccggacgatgccgaccaccacccccagcgccagcaggcaggccaccaccaggtgcgggcgcaccacggtgaaatcgaagtagccgacgtccagcaggccgcccttatcggtgacgttgaacttgccgcgtttggggaaaatcatcgtcaccagggtcggcagcaccaggtggaaggccagcacaatatcgtaaatttccccccagaagctgtagcgatagcggccgttcattcgcgaaccgacgtaaatagcgaggaacaggtgcggcagggcataggagacgatcaggctcgccgacgagtaaataatattgaggttaaacagcaggtaagccagcggggcggtgacaaacaccaccctgggcagcgcgaactggtagtagagcatggcgctgagatagcacaagcgctgctgaaaagtcagcccgcggccaaacagcggattatcgacgcggaaaatctgcgtcatcccgcgcgcccagcgggtacgctggatgacgtgcaccaccaggcgttcagtagcgaggcctgcggccagtgggatatcgagaaaggccgacttccaccccagacgctgaaacttcagcgccgtatgagcatcttcggtcaccgtttcgacggcgaaaccgccgatctgcgccagcgcctcgcgacggatcaccgcgcaggagccgcagaaaaaggtggcgttccagttgtcgttcccctgctgaatcgggccatagaacaacatcccttcgttgggaatgttgcgtccgacggagaggttacgttcaaatggatccggggaatagaagtagtgcggcgtctgcaccagagccagcatcgggtctttcaggaagccgccgacggtggcctgcaggaagacgcgcgtggcgacgtggtcgcagtcgaaaacgcagataagctccccctgagtcagggtcagcgcatggttaaggttccccgctttggcgtgcttgttgtcattgcgggtgatatagcccaccccaacgtcggcggcgaagacggcaaactcgctgcgcttaccgtcatccagaagatagattttcattttatcttttggataatcaatgcattgtgccgccaggacggtatcgcgcaccacctccagcggttcgttatagctcggaatatagatatcgaccgtcggccacttactcatatcatccggcagcggaacaatgccgcgcttcagcggccagaccgtctgcagatagttaagcagtagcatcacccagatatagacttccgccagaaagagtcccatgccgagaatagcttcaatggacgagttgaagtgcagggtctgcgtgaggcgaaaatacatgtaacgggtggacatcagcagcgacgtgacgaccataatgaccgatacgctgcggcgcttgctgaagcccatcagaaagagaataccgatacttaacagaccaaaaatatactgcttttggctgtccatcggcgtgatcaccaccagcacggcgacgggtgacagcaccagcgccagcaaccaaaaaagagactttttcattcagcagccctgcaaaaagttaacgccctgacatgcgtggctggctgtgcaccgtgccatcgccaatatgaatacccaacagcgaagatatttttttagccatgatttcaatatcgaaggccgctgccgaggaagcgttaaagtccaggatcgacttctgcgaggcattggcctccaccacgctttcatcacgatggatcacgccaagcagtcgctcgcccagtttctcttccatcaggctggtgacgtcccggctgacctggcgacggctatcgctttggttaatgacgaaatagtgcccgtgcttatgattcagcgccgcgccggtcaggcgctgcttttctacgtgcgccagggtcgacatcgaggcggtatccgccagcagcgggataagatgcaggtccgccagccccgtcagcgcctttagcgcgggcgaaggtccagggggcatatcggcgatggtgataagcccgggataattaagcagcgcggacagaccgcgctggaggaaatggtcattatgggtcagttgctcatcaaacgcctgacgctgcgcctcgctcacttcgccatatggcaggacgaaaatattactgccggcgctcaacacgcactggctccagtcgtgcagctccagcgccttcgccacatagccccgctcatcgttcagcggtacgccaaaatgcaaacgcagcgcgttctggacatcaaaatccagcgccagaactttgctgcccgtccgcgccagcgaataggctaaattggctgccagggtcgttttccctacgccgcctttcggtgaacagacgcaaatcaacggcatgtcgcgatcctttccagaagtgatttcaaaggctggtctttatttttcgccaccggctccgcgcttttcgcggcgaacaggtgggcatagttctcggcggcgggcgcgggtcggggggccattctcggcggcggcgccatggccggttccgacgccggaattgaaggcgcaggggtcggcgcaggctcctgcctgaccggctccggtgcggctgcggcggtctccacgaccggctgggaagtagcaggcgcggccgaagcggcagacacaacaggatcagaggttggcgccgctgctacggccgcctctacctggcggaacagatccgcaggcaccgactgcg

SEQ ID NO: 5434 - DNA, 3623 bp, Unknown
  gut microbiota DNA sequence
gtatacgctgaaaatcaagtctggttactggacggcgacagaggcgcagattaccgcgggttatatgaatatcctcgataccgcctggccacgttaccgctacacgctacctgtattccccggactgcgttatatcagctaaggaatcccaatgttcaaccctgataaataccgttctgttaaatggcagaagggcggtcgctcttttccaaaacttgactgcttcggcattgtgaacgagatacgccgcgacctgaatttacccgtctggcccgattttgccggggtcatcaaagacgacggcggcctcgaccgggaagcgcgccggatgatgcttacccttgagcgctgcgaaccctgcgaaggggctggggtggcctgctattccgggtcgaccgtcacccacgtagggatcgtggtcagtatcggtggcctgctgcatgtggcggaatgcaacccaggcacgaacgtcacctttctgcccttgccgcggtttaagcgtcgatttgtcaaagtggagttctggcaatgaccattcgtttttacccgtcccggcttcccggtgaaccactcgaaacgcatgagcatggtgtaaccagtattcgcagctggctggtggcaaatgttgaaggctacgaggatcgggatgtcccaccgctgaccgttgaggttgaggggctgttaattccgccaggcgagtgggctaagtgtgtgattcgccctgatagtgatgtcaggctttatccggtgcctttcgggcttgaggccgcgacaattgcctggataggagtgggcattgccgtcgcatctgcggcttattcattgttcatgatgagtaacattgatgccggcggctatacgtcatccacaggtcgaagcctcgacctgaaccccgctaaagcaaacagcgcgaaactgggtgatgcgattcgtgaagtttttgggcgcgtgcgtatttatccggattatgtcgtgcagcccgttacccggtttgatgccgccgatcctacgaaaatgcgcgtccagatgctgctgtgtctcggtgtcggtgatttgatttataccaatggcgatatccgggttggcagtacgccagcttcaacgctaccgggattcagcagcacccattacccgccaggcgcggacgtttccggtgatgagcgcagcgaaaactgggtcaactccaccgaagtgggcgggacgtcatccggcaccgggctggatatggcccagacgtcgccggacgcagacgacattatcgcagacagcatgaccgtatccggttcgagcgtaacgtttaccgggctggatacggatgatgatgacgataatgacgagaacgataacgcactgccgcccagctgggtcgctggcgccgtggtcgaactgaaagccccggcgaactaccagatcaccacggcggctggatacagcgttatcgccagcccgctgctgacggagatcgcgccggtagtaggtatgccggtaaccctggggtttaactcagtcgattacgatctgtttatcgcgtcatatacccccggtcaggctgcagtgcccggcgccggggggagtgcggcaaaactccaggccagtgcggccccgaccacctacgacttttcgaccagctccagcacgttcacgatcacctggcagggggttacctacccggtgtcgctggtggctaactacgtctcgatgtcgggactgctggcggccattaccgagggactcaccggctccggccaggttgcgcaggacaacggcggcaccgtactgataaccgaggcggccagtccgttcgtgggcggggcgatcacgtcctcttcgctgcctgcagctgttttcggtgatgccccggtttacacctccggcacggcatcaaccggcggcagcccggcggtaacggcgaatgtgacgcttgcctataacagcgccacgggaacggccttttccggcatgccagagggggtgcaacggctttcacttgctcaccgcgggaatgagtaccggattgtctcggccgacggcacaacggcgacggtggcgcgcctggtttccggtgccgttgatgagtcatggccgggattcaccgccaggacgatgatcgactatgaggccactggtcttaacgacacgctgagctggctggggccgttcctggtttgccctgagaatgaagtggtggatgcattcgaggtgaatttctccttcccgaacggcatctgtggctttgacagcaaggggaaaaagcggcttcggcatgttgagtgggagattcagtatcgcgtctacggttccggatcggggtgggtgagtcaccagggcgagtatgcgcttaaaaacgtcaacgggctgggattcactgagcggatcaccctcagctctccggggctggtagaggttcgctgccgtcggcgcaatgagcagggctcaaacaacgcgcgagacagtatgtactggcaggcactgcgcgagcgactgctgacgcgcccttcatcctatcccggcgtgtcgctgatggcggtgaccgttgagacggggggcaaattggcggctcagtcggaccgccgcgtaaacgttgtggccactcgggcctatgaaaccggaacggccagaaccatttcgggagcgctgctgcatgtcgcaaactcgctggggctggagatggacgtcgacaccatcaatgtgctggagtctgcatactggacgccacgcggcgagtatttcgactttgctaccggcgacagtatctcagcgctggaaatgctgcagaagatagccaatgccgggaagtcacgttttctgctgagtgatggcctggcgacggtcaaccgtgaggggattaagccctggactggcgtgctcactccgcatgagatggtggaggagctgcagagcggatttaccgtaccgtccgacgatgattttgatggcgtcgacgtgacatacatcaacgggactacctgggcggaggagaccgttaaatgccggacgccggacaatcccacgccggtgaaaatcgagaattacaaactcgatggggtactgaatcaggatcacgcctaccagatcggcatgcgtcgcctgatgaaataccttcagcagcgggtgacgttccagaccactaccgagctggacgcgctgtgctacaacacgggcgatcgcattgtgctcacggatgatattccgggtaacaacacgatttcctgtctggtggaggcgatgacaacggctggtggcgtgacaacgtttaccgttacggagccgctggactggtctttcgaaaatccccgcgcgctgatccgctatcaggatggctctgcatccgggctgatggtggcgagcagggtgggagattttcagctgtcagtcccgcacctgagcgagtttgatgacccgatgaaggttgacctgtcgtcggcaaccatcgagccgatccgcctggtgttctgcggctcaacgcgccacgtctacgacgccattgtagaggagatagccccgcagtctgacggaacctgtcaggtcaccgctaaagaatacctcgaatcgttctaccagtacgacgacgccacataccccggtgacgtcgcgtaataccccataacaacccctaattaact

SEQ ID NO: 5435 - DNA, 414 bp, Unknown
  gut microbiota DNA sequence
ccgatatccagcacgtcggtgccggcgtccatcagcccgcgggccagcgccagcttcagcgactcgctggtgaggcgcacatcgccccccaccactatcttcccgggtttcagaaattcgccgtaggcgcggccgatacggtaggcgatgtcctcgttcagctcctcgcccagttcaccacggatgtcataagccttaaagcatgttaactgtgtcattctgcgttttgtcccgaaaaaattagcaacgaccatactggtctttaatacgaataatgtcgtcctcgccgaggtacgaccccgactggatctccagcacttccagcggaatgcggcccgggttttccaggctgtgctcggcgccaatcggaataaaggtggactggttctcggtcagcaggaactgcttgccgtt

SEQ ID NO: 5436 - DNA, 2585 bp, Unknown
  gut microbiota DNA sequence
atttccggtaccaagcgcgcgccgttgttacaaactcggccaggcgctgcgccgggcgattgaaagcttcccggaagatatcaatgtggcgattgtcgcgaccggcgggctctcgcatcaggttcatggcgagcgctgcggatttaataatcccgactgggatgcccagtttgttgatatgctggttaatgacccggaaaagcttaccgaaatgacccttggcgaatatgccgagctgggggggatggaggggtccgaagtaatcatgtggctggtgatgcgcggcgcgctatcagccaatgtcaccgaaatctggcgcgactattacctgccctcgatgaccggtatcgccacgctgatccttgagaacaatgcgcgcctgccccccgtcgataccctgacgcgccatcgccagcatatggcgcagcagctggccggggtggagaaactgccgggaacctatccttttacccacgagcgcagcctgaatggcttgcggcttaaccgtttcctgcatcggctgattgagcctgcctggcgtgaacgttttctgcagtcgcctcagtcgctttatgccgaagccggactgagtgaggaggaacagctgttgctcaacgcgcgcgactggcggggattaattcagtatggcgccagcttcttcctgctggagaaaatgggcgcggtggtcggcgtatccaacctgcatatttacgccgcgatgcgcgggcagacgctggaggcgtttcagcaaacgcgcaaccagcaggtaacctattcggtggcgggtaaacgttaaacggccccgtcctgaacctgctgataaataaaacgcaacagcgcctgcgtcgccggggagggcaggctgccggcgcgaaacgtcagcccgatacgccgggtggtatcgggcaggggaaccggcaacacgctgagcagcccattgtcagtttcaaaacgcatctggctggcggagaccgccgccagcatgtcggagccctgcagcaatcctcgcaccatcgccgcatccccggtctccaccgtcggctggggcagcggcagccccagggtgacaaacgccttatccagcaaattgcgcgccggcgcgttggcgcgcggcagcacccattgcgctgtcgccagctggctgcgcgggtccggatggcgcagcagcgggtggttattacgcagtaaaatcaacatatcctcttcgaataacgcttcgctacagaggtccgggagatcttcatcctggcgcagggcgccgataataaaatcgatattacctgcccgcatatcggcgaccagcgactcatacgggctttcattggtcatgagggtgatgcccgggtgctgggccagaaaggcggcgatggcggagggcagtagccgggtccggctcagcggcagggcgccaatgcgcacggtgccctccagcaccccgcgacgggcagcgagatcgctccagatgttttccagctcgttgagcgctctgctcaccgggggatagagtagctctgcggcaggcgtgggacgcaccccctctggcgtccggcgaaatagcgccgaatccgctcctttttccaggaccttcagcgcggcactgaccgccggctgagtgatccccaactgttgcgcgacggtttgggtatggttgacgtgatagagctgaataaaaatggctaagcggcgggtattgaacagccagccggcgtccgccagcgggccgctgctgcgggtatggtgcttctgcagcagcgccgggatggcctgcaggtcgtcaatcgcccgccgggcgcgcggcaggatgcacttgccatactcggtgggcaccatgccgctgtaatggcgttcgaacagcgtgacgttcaacgcggcttcaagatcgcgaatagcccgggttatcgctgactgcgtgcggaataagtcatcggccgcgcgtgagacgctaccgcgcagcgcgacctgacagaaaaagcgcagctgcatgatatttataattttatcgtgctttctctttagcattgttcgtcaggcctgaaaaagtgagtgagacgacaacataaataaaaatcatagccttcgcaagttaacgaattacctccccacgacgggacatgacaagctgaaaaaaacaacagaggaagccatcatgtctcatccggttagcgaaaaaagtgcccttgtcgtcagcgcccactcggccgatttcgtctggcgcgcgggcggtgcgatagcgctgcatgccctgcagggctatcaggtccatgtggtctgtttatcctttggcgagcgcggcgagtccgccaaactgtggcgtaaaggcaacatgaccgaggaggcggtgaagcaggtgcgtcgcgaagaggcgcaggccgccgccgcgatcctgggcgccagcgtcgaattctttgatatcggcgactatccgctgcgcgccgataaagagacgctatttcgtctggcggatgtgtatcgccgtatcaagccccactttgtcctgacgcactccctgcaggatccctataactacgatcaccccctggcctcccatctggcgcaggaagcgcggattatcgcccaggcagagg

SEQ ID NO: 5437 - DNA, 1114 bp, Unknown
  gut microbiota DNA sequence
cctttttatctacgaaactatttcggataaggttattatgaagattctcgtaacaggtggcgctggttttattggctctgctgtggttcgtcatatcattgaaaataccctggacgaagtccgtgtggtggactgcctgacctatgccggcaacctcgaatccctggcgccggtggccgggagcgaacgctactcgttttcccagactgatatcacggatgctgctgccgtggcggtccagttcagcgagttccgcccggatatcgtgatgcacctggcggcagaaagccatgtggaccgttccattgatggcccggccgcctttatccagaccaacgtgataggcaccttcactctgctggaggcggcccgtcactactggtccggccttggggaagcgcagaagcaggccttccgcttccaccacatctccaccgatgaggtgtacggcgacctgcacggcaccgatgacctgttcaccgaagaaaccccgtacgcgcccagcagcccgtactctgcctccaaagcgggcagcgaccatctggttcgcgcctggaaccgcacctacggcctgccggtggtggtgactaactgctccaacaactatggtccgtatcactttccggagaaactaatcccgctgactatcctcaacgccctggcgggtaaaccgctgccggtgtatggcaacggggagcagatccgtgactggctgtatgttgaggaccatgcccgtgcgctgtacaaagtggcgaccgaaggcaagagcggcgagacctacaatatcggcggtcataacgagcgtaaaaatatcgatgtggtgcgcaccatctgcgccattctcgacaaggtggtggcgcagaagccgggcaacataacccactttgctgacctgatcacttttgtcaccgaccgtccgggacacgacctccgctacgctattgatgccgcgaaaattcagcgcgatctgggctgggtaccacaggagacgttcgagagcgggattgaaaaaaccgtgcactggtatctgaacaaccagacctggtggcagcgcgtgctggacggctcctacgccggtgagcgtcttggcctcaataactgatatctgactgat

SEQ ID NO: 5438 - DNA, 5720 bp, Unknown
  gut microbiota DNA sequence
actcagggcgtctccaagcagctgctgccgatctatgacaagccgatgattttctacccggtgtccgtcctgatgctggcgggtattcgcgacatcctgatcatctccacaccggacgacatgccttccttccagcgcctgctgggtgacgggtcgcagttcggggtgaacttcagctacgccatccagccgtcgccggacggcctggcgcaggcctttatcattggcgagaagttcatcggcaacgatgcctgcgccctagtgctgggagataacatctactttggccagagcttcggtaaaaagctggaagcggcggcggcgaagacctccggcgccacggtgtttggttatcaggtgctggatccggagcgcttcggggtggtggagttcgacgagaactttaaggcgctgtccatcgaagagaaaccgctgaagccgaaatcggactgggcggtgaccgggctctacttctacgacaacaatgtggtggagatggcgaaggacgtcaagccttctgaacgcggagagctggagatcaccaccctgaaccagatgtatctggagcgcggcgatttgcaggtggaactgctggggcgcggatttgcctggctggatacgggtacccatgacagcctgattgaagcttctcagtttattcataccattgagaagcgccaggggatgaaagtagcctgcctggaagagattggttaccggaataaatggctgtcggcggaaggggtggcggctcaggcggagcgtctgaagaaaaccgagtacggtgcctacctgaaacgtctgctcagtgaagactgaacccgcacggccattaaaggaaaataacaagatgaagatattactgattggcaagaatggtcaggtgggctgggagctgcagcgttcactgtccacgctcggtgatgtggtcgcggtggattactttgataaagagctgtgcggtgatctgactaatctggacggtatcgcgcagaccgtgcgtattgtccgcccagacgtggtggtgaatgccgccgcacacacggcagtggacaaggccgaaagcgagcgggagctctccgatctgctgaacgacaaaggggtggcggtgctggcggcggagtcggcgaagctgggggccctgatggtgcactattccacggactatgtgttcgacggagccggtagccattatcgccgggaagatgaggcaaccggcccgctgaacgtctacggcgaaaccaagcgcgcaggtgaactggcgctggagcaaggcaacccgcgtcacctgattttccgtaccagctgggtgtatgccacccgcggtgccaactttgccaaaaccatgctccgcctggcgggtgagaaagagacgctctccatcattgacgaccagcacggggcgcccaccggcgcagagctgctggcagactgcacggcgacggcaatccgtgaaacgctgcgtgatccggcgctggccggtacctatcatctggtggccagcggcgagaccagctggtgtgactacgcccgctatgtgtttgaggtggcgagagcgcacggtgcagagctggcggttcaggaagtgaagggcatcccgacgacggcctatccgacgccggcgaagcgtccgctcaactctcgcctgtcgaatgaaaaattccagcaggcattcggggtgactctcccggactggcgtcagggtgtggctcgcgtggtaacagaagtcctgggtaaataaacggatagcaaaagatgaacattattaaaacagagattcctgaggtgctgatttttgaaccgcgcgtgtttggtgatgcgcggggtttcttctttgagagcttcagcagcaaggtgtttaatgaggctgtgggccgccaggtggaattcgtccaggacaaccactcacagtcccagaaaggcgtattgcgcgggctgcactatcagctggatccgcacgctcagggcaaactggtccgctgcgtggaaggtgaggtatttgacgtggcggtggatatccgtcgttcatcgccaacctttggcaaatgggtgggcgcggtgctcagcgcagagaataaacgtcagctgtggatcccggaagggttcgcccacgggtttatggcgctgagcgacacggtgcagtttgtctacaaggcgacgaactactacgcgccacagtcagagcggagcatcatctggaacgatccggagatagggattgactggccggcgctgagcgactgcgcgctgtcgctgtcggagaaagatctgcaggcacatactctggccactgcagaagtttataaataattaggttgttttttcctaaaatggcgggttccaaatggaactcgtcatgtttattcgtttacaagcttggtcaaccgaccgacttgacttaccttccttctcagcgtaaaaccgcccacagaattatttaatttcgtggctatccgccattatccagttaactgattaaagtgtaatctcatgaaaattactatttccggtacaggttatgttggtttatcgaacggtgtcctgattgcgcaaaaccacgaagtggtggccctggatatcgtgcaggccaaagtggatatgcttaaccagaagatctctccgattgtcgataaagagattcaggaatatctggcagaaaaaccgttaaatttccgtgccaccacggataagcacgacgcataccgcaatgccgactacgtgatcattgcgacgccgaccgattacgatcccaaaaccaactacttcaacacctctacagtggaagcggttatttgcgatgtcacagagatcaacccgaacgcggtgatgatcattaaatcgaccatcccggtggggttcacccgcgacatcaaagaacgtttagggattgataatgttattttctctccggagttcctgcgtgaaggacgtgcgctgtacgacaacctgcacccgtcgcgtattgtcatcggtgagcgctctgcgcgtgccgaacgttttgctgatctgctgaaagaaggcgcgatcaagcaggatatcccaaccctgtttaccgactccaccgaagcggaagcgatcaaactgttcgctaacacctatctggcgctgcgcgttgcctatttcaacgagctcgacagctatgctgaaagccaggggctgaacagcaaacagattatcgaaggggtatgcctggatccgcgtatcggcaaccattataacaacccgtcctttggctacggcggctactgcctgccgaaagataccaagcagctgttggcgaactacgaatcggtcccgaacaatatcatcgcggctatcgtcgatgccaaccgtacccgtaaagactttatcgcggattctattctcgctcgtaagccgaaagtggtgggtgtgtatcgcctgatcatgaagagtggttcggacaacttccgcgcctcttctattcagggcattatgaagcgcatcaaggcgaaaggtattccggttattatctatgaaccggtgatgcaggaagatgagttcttcaattcccgcgtcgtgcgcgacctgaatgccttcaaacaagaggcggatgtgatcatctctaaccgtatggcggaagagctggcggatgtggcggacaaggtttacacccgcgatctgtttggtaacgattaattctgcctgtctgacactggcggttccctgccgccagtgttcttctttctctcccccgttatatccctcactacgcgtatttctcgcacattcagattaacctcaataaattgtgatggacattacgatcctgctcaaaagccgttgcgggttgaaaacaggtccgataagttaaacttaccttgtgaagagctaccgtcactgtgatgtagatgccggagataagcgccgggaggtaaaacaaagcctgcaacgcaggcttttgttatttatgtcctatgaaaaaacgcgggacagggcgcgagtagcgttattttttcttgccttaacgccatgccaaaacgcagaatgaatagtcattctgtcatatcatttttttatctcttaatattatcttaatctaattgcaatatggagcaggccttaccacttgcgtttattaaacgtcagtttcgttttctttctgtcttttaaataagaaattaagaaataaacggaaacagcaagtagtatggcagcgaccactaagaaaaataggttttccataatatctaccacagggcgtatgttgattgaattattagtttgataagcaatacaccagttttgtgctgttgcatggcttgctctaacatatcctggatttaggaaaattcctacagagagtaatgttttttatcaatcagcatataatgctgtttccgctaaccaaattggtctggataccagaaaagtttcagtgcctggcgcgcggatagttgcttttctgaaaaaggctggatgaaactggtttcaggcgggcgagtaaaaaggcaaaaatagcgtctatagcacaaaatattatataaaaaataatgaatgtgcattccgtcgacatatagcccggataacggaggttccatagaaggggttgccgcaatcagacgattgcggcagggcagggggattagatctgatagtaatccttataccactcgacaaagttcttcacgccgtccttcactgacgtttgcggcttaaagcccaccaggtcatacagcggttgagtatctgcgctggtgtccagcacatcgcccggctgaatcggcatcatattcttctgcgcttccattcccagcgcctcttccagggcagtgatgtagtccatcagttccactggtgagctgttgccaatgttatataccctgtacggcgcggagctggtggccggggaaccgctctcaacggtccagtcggcattggcctgcgggatcacatcctgcacccgaaccaccgcctcgacgatgtcgtcgatataggtgaagtcgcgcttcattttgccgtagttgtaaacgtcgatactttttccttccagcatcgctttcgtgaacttgaacagcgccatatccgggcgaccccacggaccataaaccgtaaagaagcgcagcccggtggtcgggatgccgtacagatgggaataggtatgcgccatcagctcattggctttcttggtggcggcatacagggagaccggatgatcgacggaatcttcggtggagaacggcattttacggttaaggccgtaaaccgagctggaggaggcgtacaccaggtgtttcaccttggtatgacggcagccttccagaatgttcagataccccatcaggttagcgtctgcgtaggcatacgggttttccagcgagtagcgcacgccggcctgggcggccaggtggatcacgcggtcaaattgctctgtggcgaacagctttgccataccttcacggtcggccagatccagctgctggaaatggaatgccggagaagccaggcgatccagacgggcctgcttcaggctgacgtcataatagtcgttcatgttgtcgattccgacaacatcatgcccttcattcagcaggcgctgcgcgatatggaagccgataaaacctgcggcaccagtgaccaaaaacttcatatttttcctccggggtgtggatatcccgttctacataagtgccgattttacactggcttgcggttgggatcacttgctttgccgcgtcttacccgccaggcgcgaggtgaag

SEQ ID NO: 5439 - DNA, 1134 bp, Unknown
  gut microbiota DNA sequence
ggcgttctcttcggtacgttgctgatcagctttggctttcgccttactggccccgcgagcatgaccaatgccgaacgcgccagcaatagcacccaggatgacgaccaccagtcccgcgataatttcaaagctcattgctgctccttcagttcgtcggccttttctttcaatgctggctggcgtacgtattgcgatagtacggccagcaccaccagcgcagggctaatcaacgcaacgatgtttggcggcaggatgtttttgatatccggcggcagcaccgcccaggcgtgcagcgcagcatccgggaacgactgcgcccatacaccaaccagcgcgccgatagctcccagctttacagaccacgttttcagcagcaagctggcatgccctacgaactccagccgggtatatttgcgcagaagtaacagaacgagcacagccaccagcacaagcaaagcgaaaatgatcatcttcacaggacacgctccttaacccagccgtagagaaaatcctcgttggcttcgcggccctccgccagttcgaggtatctggcaccctggctgcagttcagcgcacgcaacagaacctgttcaccctctttcccgcgggcggaaaggtatcccttaagcgcggtgatggttcggggaccaatggcgccatccggaatcagatcgggatacagctttccgcgcatattcattgcggtcagccagcgctggaaaaacttactggctacagatggccccatgttcacgccagtgtcgcaaagctcatctgccagtaacgtagatagagctgccacctggtcaaaccgggggccggtccagtaatcgctcagcaggatttgctttgctgtttccctgggcaggttccgcatatcaccggtgtagccatgtgcacgggcggtggtctgcgtgatgccccagcgggtcggcccgcctttatccgacggatgatcgacataaccatcctccttgccgaggatcccctcgataatctggtctgctgtcattgtgctttcactccggtgattcgttcccagaaatacgtgagcgctacggagcccatcgcgccgcttatccccgcggttgccagaatcatgtaaatgctcagtccgctttcaatgctcaccag

SEQ ID NO: 5440 - DNA, 1287 bp, Unknown
  gut microbiota DNA sequence
gacaatcagcagcagtttataggccggattggcggggttggcgatgatgcgcagcagcggcttatcggtttccggcagcatcatgccgcccacctgctcccccggatggccaatcacgatgccgtggcgttccggcagacggtcgcgcagagcgctgaaggcgatgccgcgatagtccgcctggatacccagccaggaggagatcagcgccgcggcgctgaagacgtccgccgacggcttggccccataggcgaccgcaatgtccgccggggtcatctgcatgctgtcaaagaagggccgcgggaagtggctcaggtcgtcgctgatgttcagctgctggctttcccagctgaaatgcgacgtgggcagcaccgtcacccgcgacgtatcatgaatgtcacgctggcactgcagggtatcgccatcgttgatcttcacgctcaggttattgctggagaccatcagcgcgggcggaatatccagctgataatgggagacatcctcgccatcggcgcccagcggcagcgtgccgagcggttgaccgttgagcatcagctgcagggtggcgttgcggctcgccatctccggcgatacgcgaacggcaaggctgagctgcgaatggatcaccacctgatcggcaggcagggtaaagctgaccccaccctgtcgctggccgccgctgaggataatcccgtccggcatccccatctgcgccagattcagatcgcctccccagaccggagcgacaggaatgacctccggcgctgccgtgccgctcaccggcgggggtaagtccggcataaccggcgcaggggccgtcgccgccgcatcgccggcggtggcgggggctgccggagaggcgccctcctccggcgaggcagccggaggttcgtcgcctggctcgctgtccgccgcgtcgttgagctgcgggaagctcagcggggcagcggcgccggagcccggttcttcactgtgtagcgcaggcgcagagagcatccctgccagcagcgccagcgtggttaatcgcttcataacgtcccatcctcctgcgccgttttcgccactgttgcccgattgcgctggctgcgacgggttttccacgtcagccagaacagttcgaacacgcagcgtaaaatggtgaagaaggagcggaacgggttatcctgcgggcgcggcggattaatccacgcatccgcgcgggccagcaccacgcgcaccagttcacggcggcgcgaaagcggaatatcttcatcaaacttgaggcgcaggaagcgctcgtcagaggtg

SEQ ID NO: 5441 - DNA, 1941 bp, Unknown
  gut microbiota DNA sequence
gggcttttttgcccatcgcctctcgctccgggccattgagcttgcaatcccacatggtcaccgcatgctcacgggccagatccgccgccagaatgccacccgcctcgccaaaaccaataaacgcgattgtcatcatcactcctcacgcggccagacgcgggccggaataaaaacctcgccagcaaacagcagtcgcgccgtgcgtaacaggccgcagccagccagggcgccgtcagcatcaagctgaagcgtcacgctaaattcgcctgtcggatgctcgacgctgagcagcggcgtatcgcctggcgctacctgcgccaggccctgcgcgacagagccggggagcagacaagcgctggccacgctcaccgcgccaaatacgccgatcgacgcgtggcagcggtgggggataaaggtgcggctgctgatggcgccgccgtgtcgcggctcggcgatcagggtcatcttgggcaccgtgcgctggctgacgtcgccaagctgcatcagcggcccggcctgcaggcgaatcgactccaggcgacgtttaagcgcgtcgtcattatccagctgttcgcgcgtctcatagccggtgcaaccgaggtcgcacgcgcgcagcaggatcaccggcattccgttatcgatgcaggtcacctcgacgccgtcaaaacggtcacgaacccggccggtcggcagcagggccccgcagctggagcctgcgacatcaagaaaatggagcaggatcgggctggcgctgcccggcacgccatcgatacgactctcgccgacgtagtcaaccccgtcggcgtcacaggggatctctgccaccgccagttgccccgtgttctccataaaaatacgcacccgagtgagcggcgcatcgtggcgaaccagaccgcgctcgatggcgaaagggccaacggcggcgagaatattgccgcagttttggccgtaatccacggtagccgccgccacgttcacctgggcaaacagatagtccacatcggcgtcaggccgtgcggagcggcggataatcgccactttgctggtcagcggatcggcgccgccgatcccgtcaatttgccggggatcaggcgagcccatcaccgccagcagcaccgcatcacgtcgcaccggatcggcaggcagatcgtcggccagaaaacaggccgctttagaggtgccgccgcgcatccatagacaggggattccgcgttgcgccatttattcctccacctcgtctgcgcggtcgtaataccgcaggcccttttccgccagacgcggacgcatagcgtaaatatccagccccaactcgccattgcgcatccgctcacgtttcgcaagctcattgctcatgcgggcttccgctttatggagcacatcacggacccgggcgtgaggcagcaccacgacgccatcgtcgtcggccaccacgacatcgcccggctgtacaagctgacctgcgcatatcaccgggacgttaaccgaaccgaggctctctttcaccgtcccctgggcataaacctggcgggaccagacggcgaatcccatttcccgcaacgtttgcgaatcacgaatgccgatatcgcccaccagcccgaccacgccgcgcgattggagagacgtcgccagtagatcgccgaagaagccatcgccgcacggcgaggtcggggccaccaccagaatatcgccggcgcggcactgctcgaccgccacatgaaacatccagttgtcgccaggcgtcaccagcacggttaccgcgttgcccgcccggctaacgccctgctgaatcggacggattgccggccccatcagcccctgacgatcccaggcttcatggagcgtcgccaccccggccgcctcacagcggcgcaaaaccgcctcgtcatggcgcggcaggtggcggatcacaaggccttttttatttaacaggttcatgccagg

SEQ ID NO: 5442 - DNA, 686 bp, Unknown
  gut microbiota DNA sequence
cgtgttaagttccctggtgtcgttgaaataactgaagaatatcccctaagcgtcagcagcaagctacctcgactaaggacctcgaaatcacgccctttatgtcgtaaacgccgtaaagccagcgctccggggttaaagggattaccttaactttcttgattgctgttagtgggttcaggctaaccagggcagggcggaggcagaatttataggctggtaaccggctacgccgggctttcggcgccatttgactccacagacacatgtaaccttatctggcgcctccatgccgctgacgcggcattcagaagctttccgatgctgtaggttttaacgtctgctttgtgccaaatgctgacgctcaggaattgagtttcaggtactttaaaagcgaggctagcgactcgacaggtccagcgtgacaactaggtgagcgggtttcatcccagggcattgcatcatcagtgcagaagtctcctgcacattccatttcaagacgttcgtcaattaaaccaacaggaacccagacataaggtacgtctcgcagactgttaggcacagttgagccacatacattgcaaaaatctgtacggtaccccgttggcttagaccatgaagcaatgcagttttcccctttaatccagcgaaactcactgtctttgactagtgtggcgagattgtaaccc

SEQ ID NO: 5443 - DNA, 899 bp, Unknown
  gut microbiota DNA sequence
cgatagtcgtctgagtttttccagccgaatatcgagcctacaataaagcactgccacggcagcaggttaaagggtttgccctcatgctcaccgccgttgagcttcagtacttttgcaaaaaagtcgatggcacgctgcgccgctgcaacatcccataccaacccgcgagcatggcaggattccaaatccctgagatgtcgtttacaggagcttctaatatcaggaccggcgatttctttgccggagtctacatcccgcgcatattgcgtggcgggatcaaccgaagaactggttgagcgggtcttcttctttttctccaccatccactttcaccttcgttctggcggccggagtcagaccgaattcaaccaggtaacttttgaaacggcgatcagcgtcggccagcatggctacagccgggttagccttaatcaaaaacccgccatctgtctgcacggtgtaagttcgcccctcgtcagcaatagtcaggcgaagctgcagaatgtcggcgtaaatatcgcagagtcgttcgagcgccagcgtatcggcaatggttaaaatgcccatgccatccagcagcacggtcagcttcccccacgccacctttccccagtcagtgaggtgctctggagggcttgggatttctcgcgctggcgatggttctttgtcgttaagtttgcgtttgcccgggttgccggtaaccactttgaggtgggtcggtttcgggcgtcgtcctgccatcggaacctcccggaaaaaaacttttcatttcgcggttgtgcacaaaaaggactggcggcggtcatttaggttcgaggttttgaacttttgacccgcccctcccaatcagatgagaattgatatcatttcaatgctaattatttcaaatgacaataact

SEQ ID NO: 5444 - DNA, 374 bp, Unknown
  gut microbiota DNA sequence
gtcgtggtgctgcttgcacagcccttgccagttcttccggctccagaaaagcttttgcgccttcgcaattgcctggctgtcaccagagcgcagagcctctttcagtttgtgcgggatgatatggtctaccaccgttgccgctgccaccctgccttgctcctggcacatgacgcacaaggggtgcgcacgaaggaagataagacgctcacggtcccacttgctgccgtagatacggggctctttgttcacgtaatcgctccttgagcattatcacaggcgctcagcgagtgcctgctgtaatgccttagatcgcctgctctacgccggtatcaaaaagcgccagcgcttcggtcgcttcctggatggccttgcgg

SEQ ID NO: 5445 - DNA, 1196 bp, Unknown
  gut microbiota DNA sequence
agcccttattttgcttttctctgtcagtttttagcgctgaacttcaccgctaaaaccctgctgacccggcggcttgcttgccgttgttccgtgtcagtggaggcgcattatagggagttctgagacgttgacaagccctgttttcaaaaaattattcaaccgtctcttttttgtgcaaaacgcccttagagcggtaatttttccagcgtcgagaagccatagcgacgcagaacgggtaaaagctgttctgtttctgccgtcagcgccatgcagaatgctttattctcgtcgctggacttcgcatccggcgcttcatgctctaacagccaggcggtgcgacgggcaatcgccgcgccggaatcgatcagccgtgtgccttccggcagaacgcgctgcagctcctcctgtaaaagaggaaagtgggtgcagcccagcaccaccgtatccggcggctcctgcatccgcagccatgggcgcaggatacggcgcagctcttctaacggcacaggctcgccgtgcagcttcgcttccgccagctccaccagctccgccgaccccagcatttcaatccgacattcattggcaaagcggtcgatcagctcacgggtataaggacgctttacggtaccgcgcgtcgccagcaggccaacaatgccgttcgccgttaaacgggcggcgggcttgatcgccggcaccacgccaacgacggggaaagcgaacttttcacgcagggcaggcagggagacggtactggcggtattgcaggcgatcaccgccagcgccaagggataacgctgctggacagcggtgacgatttccacaacgcgctcaacgataaactcctcgctcttctcgccataggggaaggcaacgttatcgaaagtatagatgtaatgcagattcggcagcagctgccgaatctcattataaaccgacaacccaccgacgccggaatcaaacaccagcacggtgggacgtggatcagaaggtgtagctgccagacaaggtgtattcccgtcctgcagattggtagccataaactgtctcgtaatctttatcgaacaggttggctattttaccacgaactgtcaggtgtgaggtgacgggatacgataaaccgacatcccagaggctcagaccgcccattttgacatcgcgcccattgtcatagtcatcatcgtaacgcttgccgaggt

SEQ ID NO: 5446 - DNA, 1959 bp, Unknown
  gut microbiota DNA sequence
aactactctgcttcgccgctgtcaagcaatgcgctggacaaaaaataaaactttaatatcaaacgattaataaaaatatgcgctcaggcaatcgtcgctatgccaataattcattgtctattttttaatttgtatgacaaatatagccgccagcagtaatttccccaggatgacgacgatggcaaaaacagatgaggtggtgagcgcgaaaatgatcccggtggtgcaggggattgttgactggatcgaagcacatattttcgacaccctgtcggtgagcgcgattgcgaaaaagtccggctactcacactggtacttccagcgacaattcgccatggtaacgggctgcacgctggcgagctacgtcagccgacgaaagatgacgattgcgacaatctatttaacgcagacgcaggcgtcgatacagagtatttctcagtgcctgggatacgagggacaagccgctttctgccggacctttcaccgtcactttggcatgtcgccgacccgctatcgtcgtgatacgccgggcaaagagagcaatctgcaatatcccttgcgggtggggatggagatcgagcaggagaggcggtctgccgccgcagcggcagaccgggatcagcgaatggttttcggcgtcatgacgcgacgagcgccgacataatggcgaacccagtaatcctcgctcagggaggtgatttgaatatcacgacctgtgcgcggcgactgaatgaattttccgttgccgacgtagacgccgacatggtcggcagcgccccgtccgcgggtgcggaagaagactaaatcgccgctctgcagttcatcacgatccaccggacgcgcatcgcgcaggtggtacatttcgttggccgtacgcgggatgtggatcttgaccaggtccttataggcgtaatagaccagcccgctgcagtcaaacccggtgcgcggcgaggtgccgccccagcgatagggtttacccaactggcccatcagtttattcatcgcggtactttgcgctttttgcacccggaccttgtgggcgtcggcgatcgttaaattcgcttcgctggcctcgggcttacagcgttttttatagcccttgcgcaccacgcatttgcttttgacgctgtttagcgccagggtcggctcggcgctggcggcgaccgttttcgcgcactgctttttataacctttacgcagcacgcattttttcgtcgcgccggcggcctgacgatgaagtgcggtttggcttgctgcggtagtgcgggtagggagccgggtgcgcgaggactttttactggtggttttagcggtggttttagttttttgactggttgcttttttcttgcgctctgagccacttttcgcgggcaacgcttttggcgaagcggaggcgtgcgtatgccctgatgcctgagccagtggcgtgaatgagatagacgtgaacagtaatgcacagagcgatatcgcgattttgtttagccgcgccactgagcaatcccctgattaattacagacatgtacaaatgcctgacgatgaatgacaaaccggaatgattctaaagcataaaaagccggaaagttaatattcttttgtatcaaaaatgtcgattggttaacgattgcaagaaaacgcgtcagacattgaccgcctcgcacagaaaatgcgcaatgagcgcccgcctgtgaccgcaaaatgatatttttaaggcaacttcgcgcaacagaagataaaatatgaatagtgaaaaaaatgttattatccgtcctgcctacaggacgctacaatgacaagttactgccgtagaaagaagtttaaggaagcacgacaatgagctcgactttagaaaagatccaacgccaaatcgctgaaaacccgatcctgttgtacatgaaagggtcgccgaagctgccaagctgcggtttctctgcccaggccgttcaggcgctgtccgcctg

SEQ ID NO: 5447 - DNA, 2319 bp, Unknown
  gut microbiota DNA sequence
gttttgcttacgttgatatcctgcagaacccggatatccgcgccgagctgcctaaatacgccaactggccgactttcccgcagctgtgggtagacggtgaactggtgggcggctgcgatatcgtcatcgaaatgtaccagcgcggtgaactgcagcagctgatcaaagagacggcggcaaagtaccataccgacgagccaaaagcggagtaattcccgccatcagtaaaaaagcgacttcctggaagtcgctttttttatcactccggggtggctacgggcagcggccagccgcccagacgcttccagcggttcacgatctcgcaaaacagctgcgccgtctgctcggtatcatacagggcggagtgagcctgcgcgccgtcgaacggcatacccgcggcaatacaggctttcgacagcaccgtctggcccagcgccagcccgcttagcgcggcggtgtcgaaggtaacaaacggatggaaagggttgcgtttaagtcccgcgcgttcggcggcggtcatggtgaagctgtggtcaaaggtggcattgtgcgccaccatgattgcccggctgcagtcgctctctttcatccctttgcgcaccattttgaagatggcatgcagggcatcgtattcgctgacggccccgcgctgcgggtcatgcgggttaatcccgttaaaagccagcgcttcgggctgcagattggcgccctcgaaaggttcaacatggaaatgcagcgtttcatcgggcatcagccagccgtgctcatccatcttcaacgtaatggcggcgatctccagcagggcgtcggttttggcgttaaatcctgcggtttcaacatcgatcaccaccggataaaaaccgcggaaacggtcgcacagaccattcagttgagcgttctcggacatcagattctcttagctggaaaaaagtagcgcgcattatggcaaattttgccgcggcttgcagcaggcaggggtgaaaacaacgggcgccgtagcgcccgggcgagccatggcattaaatatgccagcgtggggaagcgttagttgcccagacctttgccggcatctttctcttcaatgagctcgattttgtaaccgtccggatcttccacgaaggcgatgacggtggtgccgccttttaccggcccggcttcacgggtgacgttgcccccgttctgacggatccgttcgcaggcttcggcggcgttatcgacgctcagcgcgatatggccgtaggcggtgcccagctcatagctgtccacgccccagttgtaggtcagttcgatcaccgcggtttcgctctcttcgccgtagccgacaaaggcgagggagtacttgtactccgggttttcgctggtgcgcagcagcttcatgcccaacacgttggtatagaagtcgatagaacgttgcaggtcgccaacgcgcagcatggtgtggagtaagcgcataatgtcccctatgcagtttatttgatagatcagaacgttgagtatagcggcgatacgtcgccgctatcaatggagggattacagagtcgggtaatcggtgtagccttccgcgccgccgccgtagaaggattccgggcgttgcgggttaagcggcgcttttttctgcaggcgagccaccagatccgggttggcgatgtaatcgcggccaaaggccacggcatcaatcagccctttattgataagatcgttggctttttctactgtgtaagcgccagcgccaatgatcacccccgggaagcggtcgcggactttctgacggaaagcttcactgtaaggtttgccgcccgcccagtccggctcggacatgtgcagataggcgataccgcgtttcgccagctcgctaatcagatacagcgcgtcttcttcttcgttcgggccattatccacattctggaagctgccaatcggcgacacgcggatgccaatgcgctcggcgctccactcttgactcacggcgtcaaccacttccagcaccagacgggcacggttctccacgctgccgccgtactgatcggtacgctggttcgccgatggcgagaggaactggtgcagcagatagccgtgggctgagtgcagctcaaccagatcgaagccggcgtcacgggcattgccgaccgcctgacggaaatcgttgacgatccctgggatctctgcggtttccagggcgcggggcattgaggtgtcgacgcgaatggcgtggccgttttcgtcacgcagtgaggtacgggtgcccgcgctcagcgcggaaggcgctaccggggcagcgccgccaggctgcaggctgctatgggaaatacgcccggtgtg

SEQ ID NO: 5448 - DNA, 275808 bp, Unknown
  gut microbiota DNA sequence
tttgagataataagtactttcagttttgaaaacagtttggtttgttcgtgaacggtaagaaaacaataagttttgaacaatttttaactattaacagcaatcttgtttccatctcagatacatgggctgacttgtgggcgttaatttttcacacgggtttaagcgctggaaggctgctgagtattcgatatgatgatattgatggtgacttgatactgatacgaaaacagggtcacctgaaggagctacgtgttaaatcaacccctccagtggaggcgatgattgctcgtagaagagaacgctatccagaagatgtttatttatttcagagtcattctaaccgtgtgaagtaccatcgccggccggtcactataattgctttcaatgccgctttacgtcgcgccgctagatcattaccagacgttaacgtaagcagtagtagcgcgagaaacataccggactaaccgcctgtccagtcgcgtgtggccgatgtgacaggcgtgggggtgaagactatttacaaatatttgccagtacaatacggcgataaaaaatccccttgagcaggcacactcaaggggaaaatactacataacatcattgctgtgtgcgtctttgcgctcatctatcttccaagaagatgcccaaagcttccagatatttctggtctgagcagttaaaacattggatcggcggcctatgtgataggagggggtgaagacgatttataaatatttccctgctcaatgttgccagtcgaattgaggcatcaatgcgttacgtcagcgctgatcattgatagccactgccaatattgatctgctgcgcacatgcatttactgtatttatatacagtaagtttgacagggggaagtatgccgcgtttatacgaaatcgagacggcctgccgtaaggcaatagatatcctgcctaacggaaagcgcatcctcactaccaggcgatttctgcaggaactggagagatataactggcactggtcgccacggcaggctaaccagtggatagagcactatgtgacgacattccgggatgtctcaacgcaggaaggtgacgatcgcacgttccagctttacaacccgaatggagggctgtaatcgtgggatttccatcgccagcatcagactatgtggaggggcggttaaccgtcgataagctatgcagcatcggccctaatactagggtcgtacagactgaaactggttatgccgtaattgatttctcctctaaaccaaagcagcaggacacggtattgatccagtactcaggcggtgcagattttgcgaaagttatggggaaggcgtttattactcgggatggtgaggcgctggaaggcgaggcattggacgatgtggtagtgttaggaatagtgacattcgtcatcaaccgtactagccgtaatgatgacgaatgcccggttatataaagccttcaaaatatgtgtacatatataagtacataaaaaggcgttgttttgctttattgtccaacaaatacagtaagttatatcatatattaaccatatccatttaactaaggggacaaggcggcacgagtatagcgttttttgcccgcctgagtaagagccataccgtctgactgcttaaaccctcgccactcagggcgctttttttatgcccggtcggcctttttccctttctccgccgcctgggcgcgggcttccgcttttcgcttgctgctcatatcgttacggatctgcgcatggctcagcagtgcgaagatgaaggtcccgccacagatatttcccgccagggtcggcagggcgaacggccagataaagtggctccagggcagatttccattaaacaccagataaaggatctcgaccgagcccaccacaatatgggtggtatccgccagggcgataagccaggtcatgagaataatcaccacgattttggcggcgccggcgacaggaaacatccagaccatggtggcgaccagccagccggaaataatcgcattggcgaacatctctgtcggactgtttttcattacgtcttcggcaatgctgacaaaggcctgacgggttggctcatcaaaaataggcatataattgaaggcccatgcggccaccgcggtaccgatgagattgcccgccagcaccaccgaccatagccgcatcagcaaaccgacgttaccgagggtgggattatgcatcactggcagaacggcggtgaccgtattttcagtgaacagctgctgacgggccataattacgataataaagccgaaggtgtagccgaggttttccagcaaaaaacctcccgggatcccctccagtttgacgtgaaaaattcccttcgccagcagggaggcccccatcgacaggccggccgcaatcgctgaccatagcagggccagcgcatcgcgctccatctctttttccccttcctggcgaatatgttcatggatcgccatcgcccgcgagggaaggcgatcttcatttacttcgatctcttcaccacgctgattttcctcactttccacttctctttcgtcatcctctgcctttaatttgttattgtctagttcatccatttcgtggccctcgctatcaatctgtatagttatagcgtagcggctttccctgccgtctggctgggcatactctgaaatcgcaaaaatggtaacgtcagatttttgtcgctccggtagaataggagccccgcgatttcgttattcccaggctaagatcaaatcaacaacttgggtgatatagacatcgttcaacgtgctgttacaatcgctaacatctttacgggcggaagcgttgtctttccgtcatggatggcaactcgcgatagccataaaaaccagggagacatctatgaattatcgcctgtcggcgcttgcgcttggcgccacattgctggtgggatgtgccagttccagctctggcgatcggccgcaggggcgctcagacccgttagaagggtttaaccgcacgatgtttaacttcaactttaacgtggttgatccttacgtacttcgccccgtcgcggtggcatggcgcgactacgtcccacagccggcgcgcaacgggttaagcaattttaccagtaacctggaagagccggcagtgatggtgaactacttcctgcagggcgacccctataaaggtatggtgcattttacccgcttcttcctgaacaccattctcggtatgggtgggcttatcgatgtggccgggatggcgaatccgcagctacagcgggttgagccacatcgtttcggcagtacgcttgggcattatggcgttggctatggcccgtatgttcagttgccgttctatggaagctttaccttgcgcgacgaaggcggcgatatggccgatggcttgtatccggtgctctcctggctgacctggccgatgtcgatcggtaaatgggcggtggaagggattgagacacgtgctcagctgctggattccgacggcctgctgcgccagtcttccgacccttacattctgatgcgtgaagcctacttccagcgtcatgactttatcgccaacggcggtaagctgaccccggcggacaacccgaatgctcaggctattcaggatgagctgaaggatatcgattcacagtgatcggcgaatgataaaaaaagggtgaacataatgttcacccttttttgtggcgcgctgcttatcagaagcggtagttgaagttagcgccgtacagccaggcggttccttcggaacggaaggtatacgggccttccttaatttcaacatgctgcccgtgcatgtatgaaacgccgacgtcaaccgaggcatctttattgaacgcgtaggtggtacccgcgctcagccacaggcgatcctggtccggaatagagatagagcggttattagccggcaccgggctgtcatcgaaggcgataccggtacggaaggtccagttatcgtcataataataggtggtccccagcgcaagacgataggcgtccttgaagccttcctctttatagaacagcgtctggccgttgctgccggtggctttcagctcctggaactgactccagctggtgtaggtcaggctatagtggaccgcccactgcggcgccacgcggttatagccggacagctcccacatttccggcaggttaagggttagcgaaccatttgtcgtctggccgctggtgcccgccggcaggccgaagttgccgaggatctggttataggccgccggcaggctgctgcggtagttaccgtcgaagtcgatcttgacctcagaacggtaggttaaaccgtagcggttattcttatccagctcatagaggatcccggcgttccagccgaagccccacgcgttgccattaagatgggcgatctgcgtgtcggccgggatcttcgctacctggcccgccagcgccggcggcagcgcgccagagcctgcgacaatctgccccagatcgcctgcatagcgctcgatcttcgccttggcgtagaccgcgtcaaagcctaagccgaagctccagttgctgtcgaggcggtaggcgccgctcaggttgaagttcgcggtggtcaggtcggttttaccgcccatgctgccggccgcataatcatcgttatactctgttgccagaccatagttagaggtgatagacgccccccaaccaaattggtcgttaatcggcgcgacaaagtggaagttgggcacccacgccgtcggggcgatattgtctgctttcaggctcttgccggtgggagaggtgcccgaaacattaacgcccgggtcgacaaacacggcgcccgccgacatggtcgggcggtcgaacatcataattaatgccgggttacgactggcattaccagcatcgtcagcgatcgccccttcaccggaataggcacgacccagccccgatgcagagaattcgttgagctggaagcctgctgaccaggcctgggtggaaacaagtgcgacagccactgcaagggcagattgggtaaagcgggttttctggctcatgcccataacctcattgagttatttttttttaaactatgttacatgccgtaacagaagcgcgggagtgtagggtctgcggtacaaccaagaaatcagaccagtgcgctgagtataggtctgaccagatgatttgttgcaagtatgtttatgaagtttttcaattgtgataacagaaacgcgatccagctggcaaaaatctcggagagagcaagggggacagaaggggatttttgttttagatcatttttaagtgtgatttctgtcacttaacgccggcagagcgattctcggctggaggctcaccggggacagggcgtaaaataggcacatcatttttctggcaccgaaggtgcatctccagaggaaatctacgatgagtaaatgtagcgctgatgaaaccccggtttgctgctgtatggatgttggcacgattgttgacaacaccgactgcaccgcctcctacagccgcgtattcgccaaccgcgctgaagccgagcaaacgctcgccgcgttaagcgaaaaagcccgcaatgtcgaatctgagccgtgccaaattaacccaaccttcactgacgttgacggcggtgtgcagctggatatcgattttgttttcagctgcgaagcagaatccctgatcttccagctgggcttacgttaatccttccccctcgacgcccctgattaggggcgtttccttttcttttcactgtgttttggctcgcaattttgcgcttctccgattggcttaatgtaaaaaattagttaagaatgttatcaggtcagaccacttggttgtcttggttaacaggggagtgttatgagtcaggcattaccgcttatcacccgtcagggcgatcgcattgccattgtcacggggctacgcacgccatttgctcgtcaggctacggcttttcatggcgttccggccattgatttaggaaaaatggtggttggcgagatgctggcgcgcagcgacattcctgccgaagtcatcgagcaactggtctttggccaggtggtgcagatgccggaagcgccgaacatcgcccgggaaattgtgctgggtaccggcatgagcgtacataccgacgcctatagcgtcagccgcgcctgcgccaccagtttccaggccgtggcgaacgtcgctgaaagcctgatggccggtaccatccgcgccggtattgccggcggcgccgactcctcctctgtcctgcccattggggtcagtaaaacgctggcccgcacgctagtggatgccaataaggcacgcacgctgagccaaaagctgaagctgttttcccgtctgcggccacgcgacctgctgccggtccccccggcggtggctgaatattcaaccggattgcggatgggcgataccgccgagcagatggcgaaaagctgggggatctcccgcgagcaacaggatgccctggcgcatcgttcgcaccagctggcagcgaaagcctgggaagagggtaaactgtccgcagaggtgatgaccgcctatgctccccctttccgcgaaccgctcgagcaggacaacaatattcgtaaaaattcaacgctcgcagattatcagaagttacgcccggcctttgaccgcaaacatggcaccgtcaccgccgccaacagtacgccgctgacggacggcgcggcagcggtgatcctgatgaccgagtcgcgggctaaagagctggggctgaggccgctgggctatctgcgcagctacgcctttaccgccatcgacgtctggcaggatatgctgctggggcccgcgtggtccacgccgctggcgctggagcgcgctggcctgacgctggcggatctcacgcttatcgatatgcacgaagctttcgccgcgcagacgctggccaatctccagtgtctggcaagcgaccgctttgcccgcgaggtgctgggccgctcgcaggccaccggtgaggtagatgaaagcaagtttaacgtcctcggcggctctatcgcctacggtcaccccttcgccgccaccggcgcgcggatgatcacccagacgctgcatgagctgcggcgacggggcgggggatttggtttggtgacggcctgcgcggcaggtggtctgggtgcggcgatgatcgtggaggctgaataatggatactgtttccgcttttaagcttgaggtccgtgcggacaaaatcgcggtgatcaccattgatgccccgggtgaaaaaatgaataccctgaaagccgaatttggcagtcaggtacggggattgatacgccagttacgtgacgataagtcagtgcgcggcgtagtatttatctccgccaaagcggataactttatcgccggcgctgatatcaacatgattgcccgctgccgcagcgcgcaggaggcggaagcgctggcgcgccagggacagcagattatggctgagatccatggcctgtcgatcccggtgattgccgctatccacggcgcctgccttggcggcggtctggagctggcgctggcctgtcatggccgtatctgtagcgatgacgaaaaaacccgactcggcttgccggaggtacagcttggcctgctgccgggttccggcgggacgcagcgtttaccgcggctgatcggggtcagcaccgcgctggatatgatgctcaccggcaagcagctgcggccgcggcaggcgctgaaggccggtctggtggacgaggtggtgccgcaggcgattttactgcaggcggcggtggagttggcgctgaagggacgaccgaccagccgggaggtgcctgttcgtgaacgcgtactggcagggcccctggggcgccatctgttattccagtttgtcggtaaacaaacgcagcgcaaaacgcagggaaattacccggcggtgaagcgaatcttgcaggtcgtcgagaatggtctggcccatggctgcagcagcggatacgctgaagaggcgcgcgcatttggcgaactggcaatgagcccgcagtcgcaggcgctgcgatcgatcttctttgccagtaccgatctgaaaaaagaccctggcgccgaggcgggccccggtccgctgagaagcgttgcagtactgggcggtggcttgatgggcggggggatcgcctatgtgaccgcctgtaagggggggctgccggtgcggattaaagatatccagccgcgtggcatcaaccacgccttaaagtacagctgggatctgctgaataaacaggttcgtcagcgtcgactgcgcccagtggagcgcgatcgtcagatggcgctgatctccggcactaccgactatcagggctttgctcatcgcgatgtggtgatcgaggcggtatttgaagacctggctctcaaacagcggatggtcagcgaagtggaacaatacggcgggccgcagaccatctttgcgtcgaatacctcatcgttgccaatcggcgatattgccgctcacgccagccgcccggggcaggtaatcggcctgcattttttcagtccggtggaaaaaatgccgctggttgaggtgatcccgcacaagggaaccgacccgcagactatcgccaccgtggtgcagctggctaaacggcaggggaaaacgccgattgttgtcgcagataaagcggggttctatgtgaaccgtatcctcgcgccgtatatcaatgaagcgatgcgcctgctggtggaaggcgaaccgattgaagtcattgataacgcgttggttaaattcggtttcccggtggggccgattcaactgctggatgaggtgggtatcgataccggcaccaaaattatccccgtgctggagagcgcgtttggagaacgttttagcccgcctgcaaacatcattgacgcgattttgaaggacgatcgcaaaggcagaaaaaataatcgtggtttctatctttatgagacaaaagggcgtaaaagcaaaaaacggcccgacccggcagtctatccgctgctcggcatcggccgcccgcagtcgcggctctacgcgcagcaggtggcggagcgctgtgtgatgatgatgcttaacgaagcggcgcgctgctttgatgagcagattatccggagcgcgcgcgatggcgatatcggcgccgtctttggtatagggtttccgccatttcttggcggcccgttccggtatatggatactatcggcgcgggtgaagttgccgcgatcctgcagcgcctggccgcccagttcggcccacgttttacaccctgtgacactttattacgcatggctgaacaggggaccaccttttggccagcggatgaacggctgacctaagttgtggtcaaagaaggtaaatccggctgcggacgacgctgttgattggctgttttgtaaacaatgattgactatacttacgccattgaggtaaaaaacagcgtttcattcgtggaatggatcaggcacaatgcccggccaccgggtcacctgcgtattgtcttcgcaggccaaactacggtgcttctggttaacaaaagcggtgcaatatgcaagtttttattatgcgtcacggcgacgctgccctcgatgcagccagtgactcggttcgtccattaaccgtatgcggttgtgatgagtctcgtcagatggcaacctggctgaaaggtcaaaaagtggatattgagcgcgttcttgtcagtccctatctgcgtgcggaacagacgctggatattgttggggagtgcatgaacctgccgaaacatgtcgacgtgatgccggagctcacgccgtgcggtgatgtgggaatggtgagcgcctatctgcaggcgctggcgaatgaaggcgtggcgacggcgctggttgtctcccacctgccgctggtggggtatctggtctcagagctgtgtccgggggaaacgcccccgatgttcaccacctcggctatcgcctgcgtgacgctggatgccgacggcaaaggtgagttcctctggcagaaaagcccctgcaacctcaagatggccaacgccatctgacggccccccggagcccgccgttacggcagctccggcggttgccactcctcgacctcaatcaatatcagcagtgcggcgtcaccgccgtactcttttggtgcctggtgaaacgccataatatgcggatgttgcgccagccacagcggggtttgctgtttgaggatgtgtttcccgtgcccgtgcatcacgcaggcgcaaaacacatgctcgcggcggcaggcggcaattagcgcgcccagctcctgtttggcctgctgctgggtaagcccatgcagatcgaggaacagctccggcgaataatctccacggcgcagctttttcagctcgaaatggctgacgtcggggcggacatatttcgtcgagccttcggtattcagtagcggttgaaactcatcggaaaaatagtggctgttatcgacctgttcctgcagcaaacgcttaggagcaacctcggtaattttcttgcgctgcgggcggtgaacaatagtgtcctgtttgatcttccgcgtgccggtcatcagctgacggaacagcgcctgatcctcctcgctaagcgatgtcttctttttcattgtccgctctcattcatactttgcgctagtttacccgactcaatatcccttcgggcaaggaaaacctgttttttcccccgccccttatcgcaagaatgctgatttatcgccgtcttcatggcacactagccgccgaatttatagcagagtgtgccctggaggatgtcgtggataaaatttttgttgatgaggcagtcaatgagctgcataccattcaggacatgctgcgctgggcggtaagccgtttcagcgctgctaatatctggtacggtcacgggactgataacccgtgggacgaggcggtacagctggtgctgccttcactgtatctgccgctggatatcccggaagacatgcgcactgcgcgcctgacctccagcgagaaacatcgcattgtagagcgggtgattcgccgcgtgaacgagcgtattcccgtcgcctatctgaccaacaaagcgtggttctgcggccatgagttttacgttgatgagcgggtgctggtgccgcgctccccgattggcgaactgatcaataaccagtttgccggactgattaaccataagccgcagcacatccttgatatgtgcaccggtagcggctgcatcgccatcgcctgcgcctatgccttcccggaggcggaagtcgatgcggtagatatctccccggacgcgctggccgtcgccgagcacaacgttgagtcccacggcctgatccatcacgtgacgccgatccgttccgacctgttccgcgatctgccgaagctgcagtacgatctgatcgtcaccaatccgccgtatgtcgatgaagaggacatggccgatctgccggaagagtatgagcatgagccggtgctggggctggcctccggaagcgacggcctgaagctaacgcgccgtatcctcggcaacgcgccggattatctcagcgacgacgggattctgatttgtgaagtcggtaacagcatggtacatctgatggagcagtatccggatgtgccgtttacctggcttgagtttgataacggcggcgacggggtctttatgctgaccaaacagcagctgattgacgcccgtgcgcacttcggtatttataaagactaaaaaaacaacacgccaacataacgaaaaagattggagccgtgatggcaggaaatacaattggacaactctttcgcgtcactaccttcggcgaatcgcacggtctggcgctgggctgcatcgttgacggcgtgccgccgggcatcccgctgaccgaagccgacctgcagcacgacctcgatcgtcgtcgcccgggtacctcgcgttacaccacgcagcgtcgcgagccggatcaggtcaaaatcctctccggcgtcttcgaaggcgttaccaccgggaccagtatcggtctgctgattgagaacaccgatcagcgttcgcaggattacggcgcgatcaaagatctgttccgtccgggccacgccgattacacctacgagcaaaagtatggtctgcgcgactatcgcggcggcggtcgttcttctgcgcgcgaaaccgcgatgcgcgtagcggccggggcgattgccaaaaaataccttgccgcgaagttcggcatcgtcattcgcggctgcctgacgcagatgggcgatattccgctggccatcaaagattgggatcaggttgagcagaaccccttcttctgtccggacccggataaaatcgacgccctggatgaactgatgcgcggcctgaaaaaagagggcgactccattggcgcgaaagtgacggtagtggctgacggcgtaccgccaggcctcggtgagccggtcttcgaccgcctggatgccgatatcgcccacgcgctgatgagcatcaacgccgtgaaaggggtggaaattggcgacggcttcgaggtggtgaagctgcgcggcagcgaaaaccgcgatgagatcaccaaagccgggttccagagcaaccacgccggcggcattcttggcggcatcagcagcggccagcagatcgttgccaacatcgcgctgaagcctacctccagtattaccgttcccggtcatacgattaaccgctttggcgaagaagtggagatgatcaccaaagggcgtcacgatccgtgcgtcggcatccgcgccgtaccgatcgctgaggcgatgctggcgatcgttctgatggatcactttatgcgtcagcgcgcgcagaatggcgacgtgacgacgacaattccacgctggtaaccatgaaaaacaccgttatcgcactgcttgcgctgttggctagcgccggtagcctggccgccacgccatggcagaaaataacccaaccgatcggcggcagcgcccagtcaatcggcgcgttttccaatggctgtatcgttggcgccgaggcgctccccctgagtgcccccggctatcaggtgatgcgtaccgatcagcgtcgctacttcggtcatccggatctggttcagtttattcagcgcctgagtaatcaggtgcacaataaaggaatgggaaccgtgctgattggcgacatggggatgccggcgggcgggcgctttaacggcgggcacgccagccaccagacgggcctcgatgtcgatatcttccttcagctgccgcaaacgcgctggacatcgtcccagctgttgaagccgcaggcgctggacctggtcgccagcgatggcaagcatgtggtgccgtcgctatggagcccgcaaatcagccagcttatcaagctggcggcggaagatagcgaagttacccgcatcttcgtcaacccggcgattaaacagcagctgtgcctggacgcgggcagcgaccgccagtggctgcgtaaagtccgtccctggttccagcatcgcgctcatatgcacgtccgactgcgttgcccggcgggaagtctggagtgcgaggatcaggcgccgccgccgcccggcgatggctgcggagcggagctgcagagctggttcgaaccacctaaacccgggtctaccccccctgtgaagaagacgccgccgctgccgccttcctgccaggcgctactggatgagcatgtgctgtaatggatagttttatcgagttgtttgccgtatcgccgctggtgctggtggtactcttctttgtcgccatcctggccggttttattgactcactggcgggaggcgggggcttattgactgtccctgcgctgatggcggccggcatgccgccagcccaggcgctggcgaccaataagctgcaggcctgcggcgggtcgctatcggcgaccctctattttgtccgccgcaaggtggttaatctggccgatcagaagctgaatattctgatgacctttatcggctcaaccgccggagcgctgctggtgcagcacgtgcaatccgatattctgaagcagatcctgccgttgctggtgattggcatcggcctttatttcctgctgatgccgaaactgggcgaagccgaccggcagcgtcggctttacggtctgccgtttgcgctggtcgccggcggtagcgtagggttttacgatggctttttcggccccggcgccggttcgttttacgccctggcttttgtcactctggccgggtttaaccttgccaagtcgacggcccatgccaagctgctgaacgccacctcaaacgtcggcggcctgctgctgtttatcatcggtggaaaggttatctgggccaccggctttgtgatgatggccggccagtttattggcgcccgtgccgggtcccggctggtgctgagtaaagggcagtcgctgatccggccgatgatcgttatcgtctcggcggtgatgagcgcgaaacttctttatgacagccacggggctgagattttgcagtggttgggaattcattaatgcaacagcaacaccattatcagcagctgatagaccttttcgacagctgctttgccgaagaatttaatacccgcctgattaaaggcgacgatgagccgatctaccttccggctgacgatgaaacgccctatcaccgtatcgtgtttgcgcacggattttttgccagcgccctgcacgagatctctcactggtgtgtcgccggcaaggcgcgtcgcgaacaagtagattttggctactggtactgcccggacggccgcgatgcgatgacccaaagccagtttgaggatgtcgaggtgaaaccgcaggcctttgagtggctgttctgcgtggcggcgggatttccgtttaacgtcagctgtgacaatctggaaggggacgttgagcccgatcgcatcgccttccagcgccgggtgcatgctcgggtgatgactttacttgaacaagggatccccgaacgtccggcgcgctttattcgcgcgttacaacactattatcaaacgccgccattgacggcgaaacactttccgtggccggaagacctgcactaaggccgcacattacatgacaagaggtaagatgatgatcgcggagtttgaatcacgcattctggcgctgattgacaacatggtagaccacgccagtgatgatgaactgtttgccggcggttatctgcgcggccacctgacgctggcggtggctgagctggaaggtgagggcgagcattctgctgacgcggtacacagcagagttagccagagcctggagaaagccatcagcgctggcgaactgtcgccgccggaccaaattctggtgcaggggatgtggcataacctgtatcaacaggcgaaaaatcaggcctgagccatgttgtagcccgggtcaggcgtcagccgtacccgggaaattgcctgccctcatggttttatttcaccgcttttcccttcagcagttttctcacccacagccgattcggattcagcgccgccagggtgtcgctatccagcggcagcggttccgtgctcatttgcgccgccagcagctcagcgcttaacggcgcggtgcaaagtccgcgcgacccgagcgcgccaagcataaacaggttacgacagaccggcgcgctatcggcgatatccggttgttcgtggaggctggcgtattgcgtcaatgttgccgcgtagtccggcacgttgccgaccatcggtagatgatcgcgggtggcgcagcgcacgccgcagcgagcgtcgttggcgctgatatccacgtcctgtggccactccgcgcccgggaagcagtcgatcagccgttgccggttgtgctgctgatcttcttcgctgaaggtggtgtcggttttcccgcggtggtagctggcgccaatgcagtgctgctgattttgcggattctgtggcgtcaggtagccgtcgtagcacagcacctggcgcagggcggcaagccgcggggtggtgggaatatggctgacctggccgccaaccgggtagaccggcagttgggctgtttgcgcaaaaccagtgatgcggtggccgttcgccagaaccaccgcctgatgatagcgctgctgattgagcagccagccatcgccctccgcgctgagcgtttcgacgggataaccatagtgcacgtgcagtccgcgcgtggccgccagcgccagcagctcggcggtgagctgctgcgggcacagccagccgccggccggataggtgatgccgccgcagccggtatcgacgccggtcagcccggcaacctgttccgccgtcaccgcgcaggcgatgtccgggggtaaattcagcgccagcatctgggcgattttatgcgtgcttttctcatcccagccgagctgggtaacaccgcaccattggtgatcgaacatcaccggcagcgcgtcatacattcggcgggcgaaggtaaaggcggccggaaaaaagcgtgccagcgccggatcgtgctgacttaacagcggatacagcgcgccctggcgattgccggaggcgccctgcgctggagcctcatcggcgcagtaaagggtcacctgccagccgcggcgcagcagcgccagggagagcagggcgctggcgatcccgccgccgatgatggccgcctcgcgggcatcgctgctactgcgagcgaaccaggggacgcgcgcaggaaagctcagcgtttgcgccatctcgccggtcagcatctcccgcttgcggccgaagcctttgcttttacgcatggtaaagccggcctcctgcaggccacggcggacaaaaccggcggaggtaaaggtggccagcgtcccgccgggtcgcgccaggcgcgccatggcgctgaacagatcctgagtccacatgtcgggatttttcgccggggcaaagccgtcaagaaaccaggcgtccacctgctggttcagcgaatcatccagctccctggtcagctcattgatatcgccaaaccacagatcgagcgtcacccgcccgccgtcgagcagcagacgatggcacccgccgaaggccgacggccattgcgcctgcagctgctgcgcccacggagccagctctggccagcgctggtgcgccaggcggagatcctcagccttcagcggatatttttcaaaactgatgaaatgtaacctttgcaaggtaacgtccgggttatcacgaacaaaaacgtcaaacgcctgccagagggtgaggaaattgagcccggtgccgaagccgctctccgcgacgatcatcagcgggcgagggtggctggggaagcgctccggcaggcgatttccgccgagaaaaacgtagcgagtctcttccagaccgttgtcattggaaaagtaaacatcgtcgaaatctcgggaaacaggtgtaccctcagcgttgaattccaggttggcgggttgtatggcgttttgtttcacgtaagttactcgaatcacaaggcgtagcacgatcttaacgatgtgtgcctgagggcgcaaatttatacacaaaatgtctgatcggacttgttcggcgtacaagtgtacgctattgtgcgacacgaaacttaaaatagtgcgacttacagaggtatttaatgaaacgtgcagtgattactggcttgggcatcgtttccagcatcggtaataaccagcaggaagtcctggcatctctgcgtgaaggacgttcagggatcactttctctcaggagcttaaagattcagggatgcgcagccacgtatggggcaacgtcaaactggataccactggcctcattgaccgcaaagtagtgcgctttatgagcgacgcctccatctatgcttacctgtccatggaacaggctgttgccgacgcaggtctggcgcctgaagcatatcagaataacccgcgtgtcggcctgatcgcaggctccggcggcggttccccgaaattccaggtcttcggcgccgatgccatgcgtagcccgcgtggtctgaaagccgtgggcccgtatgtggtcaccaaagcgatggcttccggcgtttccgcctgcctcgctacgccgttcaaaattcacggcgttaactactccatcagctcggcctgcgccacttccgcccactgtattggtaacgcggtagagcagatccagctgggcaaacaggacatcgtctttgccggcggcggcgaagagctgtgctgggaaatggcctgcgaattcgacgccatgggcgcgctgtccactaaatacaacgacaccccggaaaaagcgtcccgtacctatgatgctaaccgtgacggcttcgttatcgccggcggcggcggtatggtcgtggtggaagagctggaacacgccctggcgcgtggcgcgcacatctacgccgaaatcgtcggctatggcgcgacctccgatggcgcggacatggtcgccccgtctggtgaaggcgcagtgcgctgcatgcagatggcgatgcatggcgttgatacgccgatcgactatctgaactcccacggtacctccactccggtcggcgacgtgaaagagctgggcgccatccgcgaagtattcggcgacaacagcccggctatttcggcaactaaagcgatgaccggccactcgctgggcgcggcgggcgtacaggaagccatctactccctgctgatgctggagcacggctttatcgcgccgagcatcaacgttgaagagctcgacgagcaggctgccggcctgaacatcgtcaccaaaccgacggacgctaagctgaccaccgtaatgtccaacagcttcggcttcggcggcaccaacgccacgctggtgatgcgtaaatacaacgcctaatcagcatgtgatgcgcaaaggggagccaccggctccccttttttgtcatcttgacagggtaagagcccgcaggcacactgctcgcggatccattagtctctccactaatgcgtaagcgtttaacgtcaaccaacgcgccttaaccctgataatcaggtggagggggcgtgtcgctttgctcgccttactctgcgaatctggagtaatgcatgtccgcagttactgaaacaacatccaattcttcggcgaatttttcgcttttccgtattacgtttgccgtctttttgacctatatgaccgttggtttgccgctgccggtgatcccactctttgtccatcaggagctgggatttggcaacaccgtggttggcgtggcggtagggatccagttcctcgccaccgttctgacccgggggtacgccggacgtctggcagaccagtacggcgctaaacgctctgtcctgcaggggatgctggcctgcgccctggcgggcgcggcatggctggccgctgcgctgctgccgctgccggtgctcgccaggctcggcctgctgctgctgggccgcttgatcctcgggtttggcgaaagccagctgctgaccggaaacctgagctgggggatgggcctggtgggaccggcccgttccggcaaagtgatgtcatggaacggcatggcgatgtacggctcgctggcggtgggcgccccgctgggattattgatctatagccattttggcgtggcggtgctggcctgtgtcaccatgggactaccgctcgtcgcctggcttattaacggtaccgtgcgcaaagtggcggcccacggaggcgagcggccttcactctggagcgtcatcggcatgatctggcggccgggcattggcctgggcctgcagggtgtcggctttgcggtgatcggcaccttcgtctccctctatttcgccagccatagctggccaatggccggctttaccctgacggcgtttggtggcgcctttgtgctgatgcgagtgctgttcggctggatgccggatcggtttggcggcgttaaggtggcgatggtctcgctgctgatagaggcggttggtctgacgctgctgggactggcgccgaatgcctggctggcgctggccggtgcggcgctgaccgggtgcggctgttcgcttattttcccctcacttggcgtggaagtagtgaagcgcgtcccggcgcaggtgcgcggcaccgcgctcggcggctatgcggcctttcaggacatctcctatggcctgaccgggccgctgaccggcctgctggcgacctcgctgggctactcgtcggtgttccttgccggcgccctctgcgcggcgctggggatcctcgtcacccttatctcatttcgccgctaggttattgtccggcctgaaatcgctgtaggaaacaccgcagcgtttggcatgaaggggagccgtaaacgccgccggtggctgctgggctacagcaggagccacagcacaaggagcaggacaaccgcgcccagcgccagctgccacggcttagcgctccacgtccgcctggcgacaggctcctcctgcgggatggccagcgtctcctgggcgcgggccacccgcagcacaaacaccttgttcagcagcgccaggatctgcgccgggctcagcgtggtccgcggcgtgacctgccagctgcgactggcgaagtcgacaattgtctgccactccgcggcctccagcggctgcttgagcgctccctgcagcgaggtgagcgtcggcacgctttgcgcactcagcgtttgccgcgcctgcagccagtacgaaagcggcaggaagtgcgtcgccgggatcagctccccggacttgacgccgcaaagctccagcatggattgccaaatcagcttgcttggttcgccggtagcggccgccagcttagtcaccagctgattgagcgtattatgctcggctggcaacagcgggcgcagggtcggcgggcgctgctgcggctgcgggatcgacagctggccatgctgcagcagatgcagaatggtctccagctgcgtctggctaagggcatgcagcgccgtttgcccataatgctgacgaatataatcgctcaccgcctggcggttattgccctgaccgagcagatcgctgagctgcgctaaggtctggcgatgatgatgattatcctgagcggcggctaagcgctggttgagactggcctccgcggcgctgaaatggcaggccagcaggggcgagtcgcctttcagtccgaggtcatgtttgacgcaggcccacacttccgcgttctgctgcgaggtcagcgccaccaggcgcgtgatcagtcgctccagaacggtgcgttgctgcatggaaagcgaaggttcgccggtggcggcagtgcctgatgggcctcgccctggaggacggtctggcatatcagcaagggggtgcgtcatgattcatcctttcgatatcgcggtgctggaaccaggtgatgagtatgcctggcggccagattatggcacacttccccagttaactctcgttctcagacaggtactgaactgtgaaaatcctcgttgatgaaaatatgccctatgcccgtgagctttttagccgtttaggcgacgtgcaggcgatcccaggccgtccggtcccggccgatgccctgaccgatgcggatgccctaatggtgcgctcggtcacccgggtcaatgaagcattgctcgccggcaaggccattaagttcgtcggcaccgctaccgccggcaccgatcacgtcgatcaggcgtggctgcagcaggcggggattggtttctctgcggcgccaggctgtaacgccattgcggtggtagagtacgtcttttcatcgctgctgatgctggctgaacgcgacggctttgcgctgcgcgatcgcaccgtcgggatcgtcggcgtcggtaacgttggcgggcgactgcaaaagcgcctggaagcgttggggatcaaaactctgctctgcgacccaccgcgcgccgatcgcggcgacgaaggtgacttccgctccctcgaggcgctggtccaggaagccgatgtcatcaccttccatacgccgctgtataaagaagggcaatataaaaccctgcatctggcggatgaggcgctgataagccgcctgaagcctggaacgattttgatcaacgcctgccgcgggccggtggtcgataacgccgcactgctaaagcggctggaagctggtcagccgctgagtgtggtattggacgtctgggagccggagccggatctaaacgttgagcttctcaagcgagtggatatcggtaccgcgcatatcgccggctacaccctcgaagggaaagcgcgcgggacgacgcaggtttttgaagcctacagcgcctttatcggccatccgcagcaggtagcgctggacactctgctgccggcgccggaatttggccgcattaccctgcatggaccgctcgatcagccgacgctgaaaagactggtccacttggtgtatgatgtgcgccgcgatgatgcgccgctgcggaaggtggccggcgtcgccggtgaattcgacaagctgcgtaaaaattatcaggaacgtcgcgaatggtcttcgctgtatgtgcagtgcagcgatgagcaggcggcgacgctgttgcgccagctcggttttaacgccgtgcatcatcctgttcgttaatgtcttcttaatgcccctgccggatactccggcggggccgctttatttctggagttaaccaccatgtctgaaggctggaatattgccgtactgggcgcaacgggcgccgtaggcgaagccctgctcgaaactcttgctgaacgccagttcccggtaggagagatttttgctctggcgcgcaacgacagcgcgggcgaacatctgcgttttggtggcaagtcggtgatcgtcaaagacgccgccgaatttgactggacccaggcccagctggctttcttcgccgccggcgtcgaagccagtgcagcgtatgtcgaagaagcgaccaacgccgggtgtctggttatcgatctcagcggcctgtttgcgctggagccggacgtaccgctggtggtgccggacgtgaacccgttcgtattaggcgattaccgcaaccgcaacctgattgcggtgcctaatagcctgaccagtcagctgttgacggcgctcaaaccgctgatcgatcagggcgggttgtcgcgcattagcgtcactaacctgctctccgcctcggggcaggggaaaaaagcggtggatgcgctggcgggtcagagcgctaagctgctgaacggcatccctatcgatgaagacgatttctttggtcgccagctggcgttcaacatgctgccgctgctgccggatcgtgaaggtagcgtgcgcgaagagcgccggatcgtcgatgaagcgcgcaaaattcttcaggatgacgggctgatgatctccgccagcgtcgttcagtcgccggtcttctacggccatgcgcagatggtgagcttcgaagcgatgcgcccgctggcggcggaggaggcgcgcgacgcttttacccgcggcgaggatatcgaactttctgaagagggcgaattcccgactcaggttggtgatgcctcaggcaatgcccgcctctccatcggctgcgtgcataacgattacggtatgccggagcagatccagttctggtcggtagcggataacgtgcgcttcggcggcgcgctgatggcggtgaagatcgccgagaagctgattgaggagtacctgtactgatgtctgagatggagcaacagccgatctgtaaaatcgcgctgggcatcgagtacgacggcagcaaatattacggctggcagcggcaaaacgaagtgcgcagcgtgcaggagaagctggaaaaggcgctctcgcaggtggcgaacgaaccgattaccgtcttttgcgccggccgcaccgacgccggcgtccatggcaccggccaggtggtgcatttcgaaacccgggcgcagcggaaagatgccgcctggacgctgggggtaaatgcgaatttacctggtgacatcgcggtgcgttgggtcaaacatgtaccggcggattttcacgcccggttcagcgccacggcgcgccgctatcgctacgtcatctataatcatcgcctgcgtccggcggtgttaagtcatggcgtgacgcattttcaccagccgctcgacgccgagcgtatgcagcgcgccgcgcagtgtctgctgggagagaatgactttacctcgtttcgcgcggtacagtgccagtcgcgtaccccgtggcgcaacgtgatgcatattaacgttacccgctacggcgcgtatgtggtggtggatatcaaagcgaatgcctttgtacatcatatggtcaggaatattgtaggcagcctgatggaggtcggggccggaaaccagccggagagctggatggcagaactgctggcagcaaaagacaggacgctcgctgcggcaacggcaaaagcggaagggttgtatctggtgtcggtggattacccggcccactatgatttaccggtgctgccaatgggcccgctgtttctggcggactaatagggtcattaagggtaaagacaaacatggacttgattcactttttaattgatttcatcctgcatattgatgtgcaccttgccgaactggttgcccagtatggcgtctgggtttatgccattctgtttttgattctgttctgcgaaaccgggctggtggtgacgccattcctgccgggcgattccctgctgttcgtcgcgggcgcgctctcggccttgccaaccaacgatctcaatgtccacctgatggtactgctgatggtcatcgcggccatcgtcggcgatgcggtcaactacaccattggccggctgttcggcgaaaagctgttcagcaatccgaactcaaagatattccgtcgcagctatctggataaaacccacagcttttacgaacgtcacggcgggaaaaccattatcctggcgcgctttgtgccgatagtccgaaccttcgcgccgtttgtggcgggaatggggcatatgtcctatcgtcattttgcagcctataacgtggttggggcgctgctgtgggtgctgctgttcacctatgccggctatctgtttggcgatttgccggtggtgcaggagaacctgaagctgctgatcgtggcgatcatcgtgctttccgtcctgccgggcgtgattgagattattcgccacaagcgggcggcggcgaagcaggcgaagtagtttagcctgtgttgcgcgtggcggtgcagagcgtcacgcgcagcggtttgaccacttttttatcccatgttccgggatgatatgatttaatgtgcaacattcatggtctgtaagaggcaaaaatggcattatgcgccccttacgacaaaactggcatcgaccaggttcaggcagaaaggttatcaatgagctggattgaacgaattaaaagcaacatcactcccacccgcaaggcgagcattcctgagggtgtatggaccaagtgcgacagctgcggtcaggtactctaccgcgccgagctggagcgcaacctggaggtttgtcctaagtgcgatcaccatatgcgcatgtcggcgcgtaatcgcctgcatagcctgttggatgaaggttctctggtagaactgggtagcgaacttgagccaaaagatgtgctgaagttccgcgattcaaaaaaatacaaagaccgcctggcgtccgctcagaaagagacgggcgagaaagacgcgctggtggtgatgaaaggtacgctctacgcgatgccggtggttgccgccgcctttgagttctcctttatggggggctcgatgggttccgtcgtcggcgcacgctttgtgcgcgcggtggagcaggcgctggaagataactgcccgctgatctgcttctccgcctccggtggcgcccgtatgcaggaagcgctgatgtcgctgatgcagatggcgaaaacctccgcggcgctggcgaaaatgcaggagcgcggactgccgtacatctccgtgctgaccgacccgaccatgggcggcgtatcggcgagctttgcgatgctgggcgatctgaacattgccgagccgaaagcgctgatcggctttgccggtcctcgcgttatcgagcagaccgtacgcgagaagctgccgccgggattccagcgcagtgagttcctgattgaaaaaggggcgatcgatatgatcgttcgccgtccggaaatgcgtctcaagctggccagcattctggcgaagctgatgaacctgccggcgccggttgccgtttcggaagcgcctcatgaaggcgtggtggtgccgccggcaccggatcaggaacctgaggcctgataaagcagagggcagggcctggcggcgctgcccttttttattcatacgcgttaaccgtcaattcttacgggcatcatggaaaaagatcctattcctcaggccacgtcgcccctggctacgtggctttcttatctggaacatctgcacagtaaaaccatcgaccttgggctggcgcgcgtcagcgaggtcgccgggcagatggatatcgttaaaccggcgccgttcgtttttaccgttgcgggcaccaatggcaaaggcaccacctgccgcacgctggaaaccatcctgatggcggccggttataaagtgggggtctacagctctccgcatctggtgcgctacaccgaacgcgtgcgcattcagggggctgaactgccggaggcggcgcatacagcttcgtttgctgaaatcgaagcggcgcggggtgacatctcgctgacctattttgaatacggcacgctctcggcgctgtggctgtttaagcaggcgcagctggatgtggtgatccttgaggtcgggctcggcgggcgtctcgacgccaccaacatcgtggatgccgacgtcgcggtggtcaccagcatcgccctcgatcataccgactggctgggcccggatcgcgaaagtatcggccgggaaaaagcgggcatctttcgcgccggtaaaccggcggtggtgggggagccggatatgccgctcaccatcgcggaagtggctagcgagaagggcgcgctgctccagcgccgcggcgtcgactggcgctatgaggtggagggcgaaacgtggtccttccgcgatacggcaggggcgttaagccacctgcctctgcctcaggtgccgttgccgaatgcggcgacggccgtggcggcgctgcgcgccagcgggcttgccgtggatgacgctatcctgcgcgcagggatccgcgatgcgatgctcccgggacgctttcagataatcagcgacgccccgcgagtgatcctcgatgtggcgcacaacccgcacgcggcggcctatctcgccgggcgtctcaaaacgttagcgaaaacgggacgcgtgctggcggttattggtatgctgcatgataaggatatcgccggcacgttggccaatctggccccggaagtcgatgcctggtactgcgcgccgctggaaggcccgcgcggcgcgacggcagagcagctggtggaacatttgcgctgcggtacagtctatagcagcgtggcgcaggcgtggcgtgcggccatggctgacgctaaagtggaagataccgtgctggtgtgtggttcgtttcacaccgtagcgcaggttatggaagagatagacgcggggagaatcggtggcgagtaagtttcagaaccgtttagtcgggacaatcgtgctggtggcgctgggggtgattatcctgccagggctgctggacgggcagaaaaagcattaccaggatgagtttgccgcgatcccgctggtaccgaaaccaggcgatcgcgatgaaccggatatgttgccggcggcaacccaggcgttgccttcgcaaccgccggaaggggcggcggaagaggtgcgggcgggcgatgccgccgcgccatcgttagatccatcgcgtattccggtgaacagcaacagcttcgatgacgttcaggagccggtggtggccgcgaaaccgcagcccaagccgcagccgcaacagcaggccgcgacgccaacgccgccgccggctaagccacagcagcaacagccatcgcagcagcaggcggccctgccggcgccgaccggcaaagcctatgtggttcagctgggcgcgttgaagaacgccgataaggtgaatgagattgtcggtaaactgcgggcctcgggtttcaaagtctatacgtcgccttcgacgccggtacagggtaaaattacccgcatcctcgtcggcccggatgcgtcaaaagacaagctgaaaggccagctgggcgatctgcagcagatttccgggcttagcggggtggtgatgggtttcaccccgaactgattgttttttccgccatgcggagagaacgtggcggggagaaacgccccgcaaaccctgtctcagccgccctgaagaggcgaaaggcagtctggcgttgaatgttttttcagcgccatttttatttctgtagggcatggaaatccctacgcaaacgttttctttttctgttagaatgcgccccgaactggacgacagggcgtaaatcgtgggacgtatatggtctggattgattacgccattatggcggtgctgggtctttcttgcctggtcagcctgatccgcggctttgttcgcgaagctttatcgttagtcacgtggggttgcgcgttttatgtcgccagccattactacgctgacctgtctgtctggtttacgggctttgaggatgaacgggttcgaaatgggattgctattgcggcgctgtttatcgtgacgctcatcgttggcgctatcgtgaactatgtgataggccagctggtggagaagaccggtttgtcaggaaccgacagggtattggggatctgcttcggcgcgctacgtggggtgctgatcatcgccgctatcctgttcttcctggacacctttaccgggatggcgaagagcgatgactggcatcagtcgcagtttattccctattttacccccgtcatcagatggttttttgaatacctgcaaagctcgtcaagtttcttgcctaaagtatagactttgggtcgttgctgaacgaggaaaagacgtatgtgcggtattgtcggtatcgccggtgttatgccggttaaccagtcgatttatgatgcgctaacggtgctccagcaccgtggacaggatgccgctggcatcatcaccattgatgccaacaactgcttccggttgcgtaaggctaacgggctggtaagcgacgtattcgaggcccgccacatgcagcgtatgcagggcaatatgggtattggccacgtgcgttatcctacggcgggcagctccagcgcctccgaggcgcagccgttttacgttaactcgccgtatggcatcacattggcgcataacggcaacctgaccaatgcgcacgagctgcgtaaaaagctgtttgaagaaaaacgccgccatatcaataccacctctgattccgaaatcctcctcaatattttcgccagtgagctggataacttccgtcactacccgctggaagcggacaacatcttcgcggcgattgcggcgaccaaccgcctgatccgcggcgcgtacgcgtgcgtggcgatgatcatcgggcatggcatggtggccttccgcgaccctaacggcattcgtccgctggtgctgggtaaacgtgacgttggcgacggtcgcaccgagtatatggtggcctcggagagcgtggcccttgatacgcttggttttgaattcctgcgcgatgtggcgccgggcgaagcggtctatattaccgagaagggccagctctatacccgtcagtgtgccgataatccggtcagcaacccgtgcctgttcgagtacgtctattttgcccgtccggactcgtttattgacaaaatttccgtctacagcgcccgcgtcaacatggggactaagctgggcgaaaagattgcccgcgagtgggaagatctggatattgacgtcgttattccgatcccggagacctcctgcgacatcgcgctggaaatcgcccgcattctcgacaaaccttatcgtcagggcttcgtgaagaaccgctacgtcggccggacgtttatcatgcccggtcagcagctgcgtcgtaaatctgttcgccgtaagctcaacgccaaccgtgcggaattccgcgataagaacgtgctgctggtcgatgattccattgtacgcggcaccacctcggagcagatcattgagatggcgcgtgaagcaggggcgaaaaaagtgtatctcgcctccgctgcgccggaaattcgtttcccgaacgtgtacggtatcgatatgccgaccgccaacgaactgatcgcccatggccgcgaagtggatgagatccgccagatcattggcgccgacggcctgattttccaggatctcaacgatctgatcgacgcggtgcgcgcggagaacccggatattcagcagtttgaatgctcggtgttcaacggcgtatatgtgacccgggatgtcgaccagcagtacctcgactatcttgactccctgcgtaacgatgatgccaaagcggtccagctgcaaaacgaagtcgaaaacctcgagatgcacaacgagggttaagccgttcacgcgtcgcgggcctgccgtacctaaaggacggcgggctttttttcgccccttaactgtgcgtcaatagttgcgccagaggctataatccggcaaagtctgcggcacacgcgcaaggggtaacagaacgtgaaacgactgattattggcatttccggcgccagcggcgccatttacggcgtgcggatgctgcaggtgctaagagatgtgccggatattgaaactcatctcatcctcagccaggcggcgcgccagacgttggccatggagaccgactactccgtacgtgaggtgcaggcgctagccgatgtggtgcatgacgcccgcgatatcgccgccagtatctcttccggttcttttaaaaccgccgggatggtgattttaccctgctcaatgaagacgctctcgggcattgtccatagctatacggatggcctgctgacccgggcggcggatgtcgtgctgaaagagcgtcgtccgctggtgctctgcgtgcgggaaacgccgttccatttgggccatctgcgtctgctggttcaggctgcagagctgggggcggtgataatgccgccggtaccggctttttaccaccggccacaaagcctggacgatgtcatcaaccagaccgtcaatcgggtactcgatcaatttgatattagtctggagcacgacttgtttacccgctggcagggggcctagtgtcgcactatagtggtgcatgaaatgtacgcttgcgctccggtggtgcaaatttgttgccgcgatcaaatcctcgacatttatttcgtctttttgcgctcaggcgctgcggtttcgccagtaatgctggtatcttcccttttaagacaatcctgcaactttattttaacaaatttaaccctgttcccggcacgcaccgggaagatggcacaaaaactgcaggattgatcggcaatcaccataacaagcaacgcaccacatcacgacacttaagggtactgtatgaagaagacgattctggctctctctttactcgtgggaatgagcagcacggccagcgtgtttgctgctctgccgcagagcattcgcattggcactgacgcgacctatgcgccattttcgtcgaaagacgcgaaaggggactttgttggttttgatatcgatttaggcaatgagttgtgctcccgaattaaggtgaaatgtacctgggtcggcagtgattttgactccctgatcccctccctcaaagcgaagaaaatcgacgccatcatctcttccctctctattaccgagaagcgccagcaagagatcgccttctctgacaagctatatgccgctgactcgcgtctgatcgccgccaaagggtcgccgatccagccgacgctggaggcgctgaaaggcaagcacgtcggcgtgctgcagggttctactcaggaagcctatgctaacgaccgctggcgcagccagggcgttgacgtggtggcttaccagaaccaggatctgatctattcagacctcgcagctggccgtctggatgcggcgctgcaggatgaagtcgccgccagcgaaggcttcctgaaacagcctgccgggaaagatttcgccttcgccggcccgtccgttaaagacaaaaagtactttggcgacggcaccggtatcggcctgcgtaaggacgacgccgagctgaaagccgcgtttgataaagcgctgggcgagatgcgtaaagacggcacctacgacaaaatggcgaagaaatacttcgattttaacgtgtacggcgactaagactgctgcaggcccgcacaatggggtgggcctgccgccaggttcgtatccatgccccaaaagggtgcatctaaacgcgctgtggatcatttcagtgcaaaagcagccagttttttggctaaaaaatgcatagttaagcgtttctgatgcaaaaaatcggcctttctggtgcataaatctttgcccttaaggggcgaataatggcacgataactggcgtaaatagttctaataaacccgttagaatgacagtctgtcgaggatagttatgaaaaaactggcgttgtctctctctttagcgctggccctttccagcgtttccacggtctttgccgccatcccgcaaaaaattcgtatcggtaccgatccgacttatgctcccttcgaatcgaagaatgcgcagggagaattggtcggttttgatatcgatctggcaaaagagctgtgtaagcgtattaatacgcaatgtacctttgttgaaaacccgctggatgcgctgatcccctccttaaaagcgaagaaaatcgacgcgattatgtcttcgctgtcgattactgaaaagcgccagcaggaaattgccttcactgacaagctgtatgcggcagattcgcgtctggtggtgaaaaagggcagcccggtaacgccggatctcgccaccctcaagggtaagcgcgtgggcgtgctgcaggggacgactcaggaaacctatggcaatgagcactgggcgccgaaaggtatcgaaattgtctcctatcaggggcaggacaatatctattccgacctgaccgccggccggatcgacgccgcgttccaggatgaggtcgcggccagcgaagggttcctgaaacagcctattggtaaagattaccagtttggtggcccgtcaatcaaagacgagaaactgtttggtgttggcaccggtatggggctgcgtaaggaagacaacgaactgcgtgaagcgctgaataaggcgtttgcggagatgcgtaaggacggcacctacgacaagctggcgaaaaaatatttcgattttaacgtatacggcgaataattctcacgcctcgccattgcgtgcgtttcgcgcgcaatggtgaatgacagacagggtaggcagcatgctgtatgggttttcacaggttattttgcagggtgcgctcgtcaccctggagcttgcgctcagctcggtcgttctcgccgtcctgattgggctggcgggcgctggcgcaaagttatcgagcaaccgtccactggcgctggtgtttgaaggctataccactctgatccgcggcgtgcccgatctggtgctgatgctgctgattttctacggcctgcagattgcgctaaacagcgttaccgacgcgctgggcatggcccagtttgatatcgatccgatgatcgccgggattattaccctcggctttatctatggcgcctattttacggaaaccttccgcggcgcctaccttgcggtgccgaaggggcatatcgaagcggccaccgcctttggctttagcggcgggcagacgttccggcgtattctcttcccggcgatgatgcgctacgcgctgccggggataggcaacaactggcaggttatcctcaaggcgacggcgctggtctcgttgctagggctggaggatgtggtcaaagccacgcagctggccgggaaaagcacctggcagccgttttacttcgccatcgtctgcggcctgatttatctggtgtttaccaccgtttctaatggcgtactgctgctgctcgaacgccgctataccgttggcgtgaagagggctgacctgtgattgaaattattcaggagtactggaaatcactactgtggaccgacggctatcgctttaccggcgtggcgattaccttatggttgctgatctcttcagtggtaatggggggcatcctggcggtgtttctggccatcggccgcgtctcgagcaataagtttatccagttccccatctggctgttcacttacatatttcgcggcacgccgctgtatgtgcaactgctggttttttactccggcatgtataccctggaaatcgtcaaaggcacggagctgttgaacgcttttttccgcagcgggctaaactgcacggttctggcgttaaccctgaatacctgcgcctataccactgaaattttcgccggcgcgatccgctcagtacccgccggagaaattgaagcggcgcgggcctacggcttctcgtcagtcaaactgtatcgctgcattattctgccttccgcgctgcggattgcactgccggcctacagtaacgaagtgatcctcatgctgcactctaccgcgctggcgtttaccgctacggtaccggatctgctgaaaatcgcccgcgatatcaactcggccacctatcagccgttcaccgcgtttggcatcgccgcggtgctttatttaattatctcgtatgtgctgattagcttgttccgtaaagcggaaaagcgctggttgcagcatatcaaaccttcttcgacgcattgagaacgccatgtccgacaataaattaaacgttatcgatctgcataaacgctatggggaacacgaggtgctgaagggcgtctcgctgcaggcgaaagccggggacgttatcagcatcatcggttcatcgggctccggaaaaagtacctttttgcgctgtattaacttccttgaaaaaccgagcgaaggcacgatcgtcgtcagcggccaaaatattggtctggtacgggataaagacggccagctgaaggtggccgacaagaaccagttgcgcctgctgcgcacccggttgaccatggtgtttcagcatttcaatctgtggagccatatgacggtgctggagaacgtcatggaagcaccgattcaggtgctgggcttaagcaaacaggaagcgcgcgaacgggcggtaaaatatctggccaaggtcgggatagacgaacgtcagcaggcgaagtatccggtgcatctttccggtggccagcagcagcgtgtctctattgcccgcgcgctggcgatggaaccggaagtgctgctgtttgatgagccgacctccgcgctggatccggaactggtgggcgaagtgttacgcattatgcagcagctggcggaagagggaaaaaccatggtggtggtgacccatgaaatgggctttgcccgccacgtctcttcacatgtcatttttctgcatcagggtaaaattgaagaagaagggcatccggatgcgctgtttggcgcgccgaaaagcccgcgcctgcagcagtttctgaaaggttcgctgaaataatcggctcatccggcgtctgcggacgccggatgagcttcccgctccagccgatagatccagtcatcgtaatcgacgccgttcagatgataggctttctccagcacctgggtgcgcacaaagccttgcttctccagcaggcgcgatgagccacggttttcacccagcacccaggcattgatggcctgcacccccagggtggtgaaaccatactcgcagaccgcccgcagcgcttcgctggcatagccttttccctgagcctgaggcagcagcgcgtagccgacgtcagcttcgtgcggatttttcggactgatgcggagcccaatatcgcccagcgcctcgccgaatttatcgcgcaatacaaacaccccgggatcggcacagcgactgacgaagacgctgcgcagcacctcctcgcttaacacctcccccataaaacgcatcacctgcggatcctggcgcaggcgcagaaaaaagggccagtcatcggtaacaaagcgggtaagcgaaaggcgtggtgtggtgatggtcgtcataaagcagtcaatacgcagaaagaaaagcctaccttagcactttgctttgccaggtaacaccggcgaaccggccggctggcggtgaattcaggcgattaagggcgctggttgtcctgaatatggcgatgctgcagcgccagggtgaggccatccaggcgtggagcatgagccagcagaatggaatcaggggagccaatgctcccctgtgtcagccattaactcagcacatcctttagcgcttcgtccagatcgtaccagcggaaggcaaagccggcggcctccagacgctttggcagcgcgcgctggccgccgagcaccaggacggcggattcccccatcaacaggcggatagcggcggcgggaacgcggaaaatcgccggtcgatggagcgcatgacccagcgcatgggcgaactgctcgttatgcaccgggtagggagaaaccatattgaacggaccgcgcagatcgttatccagcagccacagaatgccgttaaccatatcgtcgatatggatccaggccaggtactgtctgccattgccgataggcccgccgaggccgagcttaaaggcgggtgtcattttgccgagaataccgccccgcggagccagtaccacgccggtgcgcagcaggcagacgcgggtgcgctcgctttgcgcttcgcaggcaatttgctcccagcgggcgcacagcttatgggtaaactcattgtgcggtggctcttcttcggtcaccaccacttcgccgaggtcgccatagtagccgatggcagacccgctgatcagcacggagggaggggtgtcgctggcgtggatcaggcccaccagccgctgcgtgagatcccagcggctatggcacaagcgttgtttctgctcggccgtccagcgtttatcagcgatgggttcacccgccagattgatgacggcatcaatatcattgaggtggtgatggccctcgaaatcgcgccacagggtgacgcgcggatcgagacgggcgcgggcggtatccggatgtcgcgtggagaccgtgacgctatgcccgagctccagcaatctgggtatcagatgtcggccaatcaggccggtaccaccagtaagcaggatcttcataccacctccctgacatggttagcgacgccagctcatggtcatggacaccgagtcggcatagcgcagcgcatgaagtttatcaatctccacttcagcatatgtgacccagtgatgttcgcatgcgatattcagcacatcctgagttaatttttccagcagcgaaaaacggccattctcaagatggctgattatgcgcttggtaatggtgcgatagttcagcgcatcattgatgtcctcgctgtcgcgcgctttatcggcagggtagtgaatggctacattcactaccacgtcctggcggttggcgatctcttcctctttaataccaataaaagtccgcaggcgcaggttcttaatacgaataatggcgtctggttgagacattgcaggcttcctccgtggtgtaagtcctgcaatcatacaacaaagcgcgacgggcgagcagggggttaataaagctgaatttttaacatcgcttccgacgttgccggccgctgcttaatgcgctcataccagttgtgcaccgccggatagttcgccagatcgatacgctgtcggacatggcagttcacccagggccaggcggcgatgtcagcgatactgtagtggtcgccgccaagccacgggctgcatcccagacgctgatttagcaccccatacagtcgttgggtttccacctgaaaacgttcaatagcgtagggcacggtttgcggcgcggagtgggaaaaatgttgattttgccccagcatcggccccagcccgccgacctgccagaacagccactgcagcgtgacgtagcgttcccgcagctcgccgctcagcagcttaccgcttttttccgccagatagagcaggatggcgcctgactcgaaaacgctcaacggcgccccgccgtcagcaggcatgtggtcgacgatagccggaactttattattcggcgaaatcgccagaaactgcggatgaaattgttcccctttgccgatatcgacccgaattagccgataggctagctccgcctcttcgaggaacagggtgattttgtggccgtttggggtgggtgcatagtaaagatcgatcataatatttcccgccgtcgtgggtcgcaaactgttcgagtataggtgaagctgcgccacccgggagaaattccgcaagcgacccggcagccaggcgacgagtcgtccgcgctcgagcagtgacatcgcctgtaagacaggctatgttggcttattgtcctgtctaccacccttgaggaagctatgagtcagcctgtcattaccctgtggtccgatgccgattttttctcaccgtacgtgatgtctgtctatgtcgctctgcaggaaaaaagcctgccttttacccttaaaaccgtcgacctgaaccgcggcgaacatctgcaggcgggctggacaggctatgccgccacccgtcgcgtaccgctgctggaggttgatgatttcgcgctaagtgagtcttcggcgattaccgagtatctggatgagcgtttcgcgccgccggagtgggagcgcatctacccgcatgatctgcaaaaacgagcccgcgcccggcagatccaggcctggctgcgcagcgatctgatgccaattcgtgaagagcgatccaccgccgtggtgtttgacggggcgaaaatgccggacctcagcgaggccggcaggcaatctgcggaaaagctgtttgccaccgccaccatgctactggcccacggcgggcaaaatttatttggcgaatggtctattgccgacgcagacctggcgctgatgctcaatcgcctggttctcaatggcgataaggtaccggaggcgctggctgattatgcgtctttccagtggcagcgggcctcaatccagcgttacgtggcgctttccgccaaacgctgaggctgataacccgccgcgcttccgctatcatagaggcatcgtaaccagtggagatggaacctatgaagctgatgtttgcctccgatattcatggttcgctgcccgccacggaacgcgtgcttgaacggttcgcgcaaagcggcgccaggtggctgatcatactcggcgatgtgctcaatcacggtccgcgcaacgcgctgcctgaggggtatgcgccgggtaaggtggcggagcggttgaacagcgtggcggaacgcattgttgccgttcgcggcaactgcgacagcgaagtggatcagatgctgcttcgttttccaatgaccgcgccctggcagcaggtgcttagcgaacgctatcgcctgtttctgacccacgggcatctctatagtccggataatctgccgccgctggccgctggcgatgtcctggcatatggccatactcatataccggtcgcggaaaaacgcggcgcaatttacctctttaatcccggctcagtgagtatcccgaaagggggatattccgccagctatgggctgctggatcaggggcggctgcaggttttagcactcaatgataatcaggttattgcagaggttgcaatttacccgtaatttagccctcaatcataaagacgcgccgcgagagcgcatttaaagtaaggtttcctgatggcggaacagaatcatttggcaagcacagaatgggtcgatattgttaatgaaaacaatgaggtgatagcacagtccagccgcgagcaaatgcgcgcgcagtgcctgcgccaccgggcgacctatatcgtcgttcatgacggaatggggaaaattctggtgcagcgacgcaccgagacaaaagactttcatccgggcatgctggatgccaccgctggcggcgtcgtgcaggctgatgagcagctgctggaatcggcccgtcgcgaggcggaagaggagttaggcatcgccggggtgccgtttgccgatcacggccagttttattacgaagacaaattctgccgcgtctggggaagcctgttcagctgcgtctcccacgggccgttcgccctgcaggaagaagaggtcagcgaggtgtgctggttaacgccggaagagatcaccgcccgctgcgatgagttcacgccggactccctgaaagcgctggcgctgtggatgacccgcaacgccggtaatgagtatgatgatgcggaagagagcgagcgcgaataaagatcgcaaacgcgcggcagcaatcgtcgctcgcctcctgacgacaaaaaggcagccattcggctgccttttgctttgactacagcggcagattacttctgctgctgagccgattggatcgcggtcagtgcgatggtatagacgatatcgtctaccagcgcgccacgggacaggtcgttgaccggcttgcgcataccctgcagcatcggcccgatggagatcaggtcggcagagcgctgtaccgctttgtacgtggtgttaccggtgttcagatccgggaagatgaacacggtcgcgcggccagctaccggtgagttcggcgctttggacttcgctacgtcagccatcaccgcggcgtcatactgcagcgggccgtcgatcatcaggtcaggacgtttttcctgcgccagacgggtcgcttcgcggactttctcgacatcgctacccgcgccggaggtaccggtggagtaggagagcatcgccacgcgcggttcgatgccgaaggcaatcgcggattcagcggactgaatagcgatttccgccagctgctcggcggtcgggtccgggttgatcgcgcagtcgccgtaaacgtaaacctgttccggcagcagcatgaagaacacggaggagaccagcgagctgcccggcgcggttttgatcagctgcagcggcggacgaatggtgttggcagtggtgtgaaccgcgccggataccagaccgtcgacttcgtcctgttccagcatcagggtgccgagaaccacgttgtcttccagctgctcacgcgcgaccgcttcggtcatgcctttgttcttacgcagttcgaccaggcgacccacatagctttcgcgaaccacttccggatcgacgatttcaatgccggcgccaagctccacgccctgggccgcggctacgcggttgatctcatccgggttacccagcaggacgcaggtggcgatcccgcgttcggcgcaaatcgccgccgctttcacggtacgcggttcgtcgccttccggcagaacgacacgtttgccggctttgcgcgccagctcggtcagctggtagcggaaggctggcggagagagacggcggctgcgctcggaggtcgcggtcagcgattcgatccagtcggcgttgatgtagttggccacgtattcctgaactttctcgatacgctcgtgatcgtcaaccggtacttcgaggttaaagctctgcaggctcagggaggtctgccaggtgttggtgttgaccataaataccggcaggccggtcgcgaaagcgcgttcacacagcttgctgatgcgcgcgtccatttcatagccgccggtcagcagaatggcgccgatttccacgccgttcattgccgccaggcaggccgcaaccagcacgtcaggacggtctgcggaggtaaccagcagagaaccagggcggaagtgttccagcatgtgcgggatgctgcgcgcgcagaaagtcacggatttcacgcggcgggtattgatatcgccttcgttgatgatggtcgcattcagatggtgcgccatgtcgatcgcgcgggtcgcgatcagatcgaagctccatggcactgcgcccagcaccggcagcgtgctgcctttctgcagctgagccgggtcaatcttcacgatttttgctttcgacgagtcgtcgaaaatttccgacaggtcaggacgggtacggccctgatcgtcgacaggggcattcagtttgttgacgataacgccggtgatgctggtatttttggcgccgccaaagctgttacgggtcagttcgatacgctcgttcagctgttctggcgtgtcggtgccctgagacatcacgaagacgatttcagcgttcagcgttttggcgatttcaaagttcagcgcctgggcgaactgatgcttacgggtcggtaccaggccttccaccagcaccacttccgcgtcctgagtattcgcgtggtagttggcaatgatctcttccatcagcacatctttctgattgctggagagcagagactcaacatggctcatcttcagcggttcagcggcggtggtggtggaggagctggcgcgaacgatggtggtggtctggtctggggcatcgccaccggaacgcggctgggcgataggtttaaagacgctcagacgaacgcctttgcgttccatagcgcggatcacaccgaggctgacgctggtcagacctacgctggtaccggtaggaattaacatgatagtacgggacacggtatatcctctttcgttaccgccagtatcaggcgggatacaaaacagcaccgccagctatccgtcatatttcaagttgcacgtgcgttggctctacttgctcaccccggtggcgtacgcgctgtacgcggccggggttttgctgtgtcgccgccttcctgcagctcgaattattgcgggtcagggctggcgatgtggaattatgcggtcagacggctggcgtcttgcgcgatgaccagctcttcgttggtcgggataaccacggcaggacgggtgccttctttgttgatgaagccagacttgccgaagcgggcagcaaggttacgctcatggtcaacttcaaagcccagtacgcccagtttgcccagcgacagctcacgcaccatcgcggcgttttcaccgataccaccggtgaaaataacggcgtcaagacggccgtccatcagcgcggtgtaggaaccgatgtatttcgccaggcggtggcagtaaacgtccattgcgcgtttagcgtcggctttttcctgatagttgtcttccacgtagcggcagtcgctggtgacttcggtcagacccagcaggccggactctttggtcagcattttgttgatcgcgtcaacgctcatgcccagggtgtcgtgcagatggaagatgatggccggatcgatgtcaccggagcgggtacccatcaccaggccttccagcggggtcagacccatggaggtgtcaacgcatttaccgttacggatagcggaaacagaaccaccgttgccgaggtggcaggtgatgatgttcagctcttccaccggcttgttgaggatcttagcggcttcctgagtcacgtagaagtggctggtgccgtgcgcgccgtaacgacgaacgccgtgctctttgtacaggctgtacggcagggcgtagagataggattcttccggcatggtctgatggaacgccgtatcgaatacagccacgtttttgtctttcaggtgcgggaaggatttcagcgcttcagcgatgccgatcaggtgtgccgggttgtgcagcggtgcgaaagacgcggcgtctttaataccctgaattacggactcgtcgatcaccacggagctggtgtatttttcaccgccgtgtacgatacggtggccgattgcggtcagctgagcagacagttctggtttttgtgccagaatagtgttaacgataaagttcagcgcttcactgtgcgcggcgcccgcgcctaactcggcttcttgtttgctgccgtccattttccatttgatacgggcttccggcaggtggaagcattccgctaaaccggacagatattcgtcgccgttcacggcgtcaaggatagcaaatttcagagaggagctaccgcagttcagaaccagtactaacttactcgacatggaagtacctttttatgatacgtggctaaaaaaacgtcagtgtgtcattagcgtagcgcaggatgacctcgacatttatgattaacatcatgccttgttctgttttcgggcacgatgagagaagtacatttgattttatgccattttgcataattttcagccaatggcagaatatgcgataatttgactagcctggcaaagagtctaaccgccctttcaggcgggcacaggatacctgattgcggcatcctttgccaaaatcttttgaacgatgtcatgcatagttggtgttttgcacgaattttttaagttttatatgtaaagttgaggtaaagccatgtcgacccctgagaaacgccccgttagcttctttagcttgttcaaccgcgggcagcattacgcaaagacctggcctctcgacaagcgcctcgcgccggtgtttattgaaaaccgcattattcgtgccacccgctatgccatccgcatcatgccgccaatcgccatttttaccctctgctggcagatagctcttggcggccagctgggccccgccgtcgctaccgcgctgtttgcgctgagcctgccgatgcagggactctggtggttgggtaagcgttcggtgacgccgctgccgccctccattcttaactggttctatgaagtgcgcggtaaactgcaggaggcggggcaggcgctggcaccggtcgaaggcaagcccgattatcaggcgctggctgacacgcttaagcgcgccttcaaacaactggataaaactttccttgatgatttgtaattcactacggaaaacgcatataaaagaaggcgcatgatttatgcgccttctttatttcacgccctaccgtgctacaggagtcacaacatggaaatgaccaatgcgcagcgtctgattttatccaatcagtacaaaatgatgacgatgctcgacccggataatgcggaacgctaccgtcgtctgcaaaccatcatagagcgtgggtatgggctacagatgcgtgaactggaccgcgagtttggccagttgacggaagaaacctgccgtaccgttattgatatcatggagatgtaccacgcgctgcacgtctcctggaccaacctgaaagacgcggcgggtatcgatgaacgccgggtcaccttcctcggatttgatgccgccaccgaagcgcgttatctcggctatgtgcgttttatggtcaacgttgaaggccgctacagccattttgacgccggtacccatggctttaactcgcagaccccgatgtgggagaaatatcagcggatgctgagcgtctggcacgcttgcccgcgccagtatcatctgagcagtaatgaaattaatcaaattatcaacgcctgagggaggtgcccgtgcagtgtaaaggtttcctgttcgatttagacgggacgctggtggattccttgccggtggtggagcgttcatggtgcaagtggggggatcgtttcgccattgaccatgatgaaattctcagttttattcacggcaagcaggccattacctccattcgccattttatgccggggcgcagcgaggaggatatccaggccgaatttcgctacctcgagcagatagaagccactgatattgagggtatcgtcgcgctgccggaggcattagccctgctgaatacgctcaatgaggccgggatcccgtgggcgattgtcacctccggctcgattccggttgcccacgcgcgtcaccgcgcggcgggcctgccgatgcctgaggtgttcgtcaccgccgagcaggtgaaacacggcaaaccggcgccggacgcctatctgctgggcgccgagcggctgggtctgcctgccggggagtgcgcggtggtggaagatgcgccggcggggctcctctccggactggcggccggctgtcgcactatcgcggtcaacgtgcccgccgatgcccctcgcctggatgaagccgacctcgttctgagcagcctggaagatctggtggttgaacgccagactgacggcgtggtaaatgtgcgtcttaaagcgtaaacccatgatttcgccccgcgtcgtcggggcttttttatgccactatgtcgactcccacttgtgacaaggaaacgttgtgaacggtgaattgatttgggttttatccctcctggccatcgcggttgtgctgtttgctaccggcaaggtgcgcatggatgctatcgccctgatggtcattgtcgcctttgtcctcagcggaacgctgacgttaaatgaagctttttccggattcagcgatcctaacgtgatcctgattgccgccctgtttattatcggcgatggcctggtgcgcaccggagtcgccaccaaaatgggggcatggctggtgagcgtggcggggaacagcgaaaccaaaatgctgatctacctgatgctcaccgtcgccggtctgggcgcgtttatgagctccaccggggtggtcgccattttcatcccggtggtacttagcgtctcggcgcggatgaatacctcgccatcgcggctgatgatgccgctgagcttcgccgggcttatcagcgggatgatgaccctggtggcgacgccgcccaacctggtggtcaacagtgaattgctgcgcgagggactgcacggcttcagctttttcagcgtcacgccgattggcctggtggtgctgatcctgggcatcgtctatatgctggcggtgcgctttatgctgaagacggataatggcgactccgcacgcgatgggcgaaaaagaagcaccttccgcgatttgatccgcgagtatcacctcaccggccgcgctcgccggctggccatccgcccgggttcgccgatgatcggtcagcggctggatgatttaaagctgcgtgagcgctactgcgccaacgtgatcggcgttgaacgctggcggcggttccgccgggtaattgtcaacgtcaacggggtatcggaatttcgcgcccgcgacgtcctgctgatcgatatgtccgcctccgatgtcgatttacgccagttctgcggcgagcaaatgcttgagccgatggtattgcgcggcgagtattttgccgatcaggcgctggatgtggggatggcggaggtggcgctgatcccggattcagagatgattggcaaaacggtgcgtgagatagccttccgcacccggtttggtctcaatatcgtcggcatgaagcgcgatggcaaagcgatggatggttcggtggtcgatgagccgctgcagctcggcgatatcctgctggtggtcggcaactggcggcaaattgccctgctggcgaagcgcggccgggatttcgtggtactcaatatgccggttgaggtcgatgacgcttcgccggcccacagccaggctccgcatgcgattttctgcctggtgctgatggtagccctgatgctcaccgatgaaattcccaacccgattgccgcgattatcgcctgtctgctgatgggcaaattccgctgcatcaatgccgaaagcgcctacaaggcgatccactggccgagcattattttgattgttgggatgatgccgtttgccctggcgctgcaaaaaaccggcggggtggatctggtggtgaagggactgatggatgtcgccggaggcgaggggccttatctgatgctcggctgcctgttcatgatgtgcgcggcgattgggctgtttatctcaaacaccgccacggcggtgctgatggcgcctattgccttagcggcggcgaagtcaatgggcgtctctccctatccttttgccatggtggtggcgatggcggcttcggcggcgtttatgaccccggtctcctcgccggttaacaccctggtgcttggccctggcaagtactcatttagcgattttgtcaaaataggcgtgccctttaccatactggtgatggtggtctgcgtcctgctgatcccggtactgtttccgttttaagatattctggccgggtagagcacaaccgccgcccggccagaaccttacagcggcgaatcctggctaatttcgtccagcgacagctggaagcttgggacgaacacttgcataaagtaatccatctccgcgctgcgccgcgatgccagggtcttttccagccgacctttggccagcagaaattcgttattgcctgcagatagctcttcgaggcacttcaggtaagcgcagagggcgtcagcctgtttaacgatcgactgctcttcctcactgtagtgatgctcatcaatcagcggctcgaaaatatcgcgcagctcgtcagggaccatatccaccagcttttgctgagcaattttttcaatcgccttatattcctgggcaatctgcgaattgaaatatttcaccggagtagggagatcgccagttagtacttccgaggcgtcatggtacatcgccagcagggcgatacgctcggcgttgacctggccgccaaatttgcggtttttaatcgccgccagcgcatgggcgaccatcgccacctgcagactgtgttcggagacattttcggtgcgcacgttgcgcatcagcggccagcggttaatcagtttcaggcgggagaggtgggcaaagaaatgactctgactcatagggacccttaatcagtgacaacatcgggttccattgtgcgcagggatcgccgccggatgcaaatgccggcggcggcgcgattaaagctgatggtagccggagaggaagcggccaaagcgggagatagccatctccaggtcgtcttcgcgcggcagggtcacgatgcgtacgtgatccggccacggccagttaaaggcggtgccctgcaccagcaggactttctcctgcagcaggaagtcgagcaccattttctggtcgtcatgaatattgaagcgtttggcatcgattttcgggaacatatacagcgcgccttttggcttcacgcaggagacgcccggaatatcgttgataagctcccaggcgcggttgcgttgttcatacaggcgtccgccggggatgatgaattcgctgatgctctgatagccgcccagcgccgtctggatagcatgctgggccggcacgttggcgcacagacgcattgaagccagcatctccagcccttcgatatagcccttcgcgtgttttttcgggccattcaacaccatccagccctgacggaagccggcaacgcggtaggttttcgacaatccgttaaaggtcaccgtcagcaggtccggcgccagggcggcaatagagtgatgctgggcttcgtcgtagaggatcttgtcgtaaatttcatcggcgaaaatgatcagattatgctgacgagcgatctccacgatctcctgcagcaattctttggaatagaccgcgccggtggggttgttagggttaatgatcacgatcccgcgggtgcgcggtgtgatttttgcgcggatgtcgtccagatccgggaaccagtcagaggattcgtcacacagatagtgcaccgctttgccgctggaaagcgacaccgccgccgtccacagcgggtagtccggggcgggaaccagcatctcatcgccgctgtttaacagcgcctgcatcgcctgcacaatcagctcggacacgccgttgccgatatagatgtcttccaccgtgacatcgcgcataccccgggcctggtaatgctgcatgatagctttacgcgccgagtacaatcctttcgaatcgcagtaaccctgggcggtaggcaaattgcggatgacgtcgacgaggatctcgtcaggggcctcgaagccgaatggcgccgggttgccgatgttcagtttcagaaccttattgccttcttcttcaagacgtttggcttctttcagaaccgggccgcggatgtcataacagacgttctctaacttgctggatttttcgatgggggacatgaatcttgaccttttagctgttatcgccactccctgccgtggaagtcagcacggaacaatgtactccccctccccgctgttttgaaggctttgcaggagaagattttgctaacgccggattttaagcgcaattgatttatctaccgattgcggatttggtctgtggcttatgcctttttatgtcgattttttggtcgtaaatatagatttagtagcgattttgccatcatttatctcgtttgtttgcccggtaatatggggagtgagaagggggagtcgctaaaaaacgctatcctgcatacaagcgcgattggcttgtaattttgatgttaaataattttaataaaaaacagcgtgcgaccacattattattatttttagcgggtaataatctgaggtttgttaattaatataaaatgttgaaaaaaatttaaaattgtctcagttaatccttattaaggcttataaaaaggagggggataggttagaatatcaccgttaatatccgtgttaaccgccaagaactgcggttgcattgagatttaatatattgttattacaggattttattgttccttttctgccggaaagttacgccagaagagcgattttctcagcatcactgaccgggttcccgcggcgacgtatggcgcctggctggtcgtggtaataaataataatgagaaatacgaacaatatattactccgcagttctgcgcatttgcccagacgagtactttggcatgtaataacgttcgtccagttgtttatccgccgttagacggtgagcacgaggctcagggaatagccggaaacctggcgtaaagcatcaacaaggcaggtcagcgttagccacctgtaagtgaagaaagatgattaatacaactcgtcccatactcaacctcgatctcgatctgctgcgtacctttgtcgcggtcgctgatttgaacacttttgccgccgccgccgccgcagtgtgtcgtactcagtccgcggtcagtcagcaaatgcaacgcctggaacagctggtgggcaaagagcttttcgcccgccacggccgcaataagctgctgaccgagcaggggatccagctgctgggctatgcccgcaaaattctccgttttaacgatgaagcctgtatgtcgctgatgtatggcagcctgcagggggctctgagcatcggcgcgtcagaagaaacggctgacaccatcctgccgtttttgttaaaccgcatcggctgtttctatcccagaatgacgttggagatcaaagttcacccccatgccgccatcatggagatgttggccgaggggctggtcgatctggcgttgaccacccatcagcctcccggctttacctcttttaccctgagaacatcacctactctctggtattgtgcagcggaatatgtgctggcgaagggggaatctatccccctgatcctgctcgaagagccaagcccattccgccaggatattatcgccgcgctggaaactgctcgcgtcagttggcatctggcccacggagcttcctcgctatcgggcgtgaaagcggcggtgaaggccgggctgggcgtgacggcgcgcccggtcgaaatgatgagcccggatctacgcgtggctggcatcagtgaggggttaccggcgttgccggacacccggtacgtcgtcagctgcaatccgcggacggtgagcgaactgccgcaggcgatttttcagtctctgagtcaggagatccatccctgggaaacgggcacagcacttactccggaagagggagggaataccttggttttgtaagggtattcttgctaacaaagatcacaaaaactggtaacagaatgtaagtgcccaaaaagagcctcaggagttggtttcccgcctggcggctcttttttttgcactcttattgatgttttgaatcttttttgtatttctttgcagaaaaatcagcgtattggcgtgacaaggcgctcagcttgtcgacttttccctgcactttcaacacttcctgctaatgttaaaaaaccggatggattgttgccgatttcctggggtaattaacaaaaccgtgtcgcagatcaagaaaatacccctctttggggggaggaatcgaggctaaatcctgtcaaaatagaagggatttttgatttacgacggaaacggacacgattcaacaacactaaaaccgaacagtatgcaaggttatttcgcagaaaagggcatttaatgttaatgaaaagattccaatgtaaattaatgttatgaaaacttttgttaaagttgacaaaaggttaaagaaaggggtaaaaagccacggcatctgggcttctcacatcgaccagggacgcttttttgcacggttattttttattcctcccgtgaaacgctgtggcgttcatctgccagtaagagcagagggttttggcgctacacttttttggttaagcaatgcgtatgtcaacatccactgaagtcatcgctcatcattgggcattcgctatatttctcatcatcgctatcggcctgtgctgcctcatgctcgtcggcggctggtaccttggcggtcgcgcgcgcgcgcgtagtaaaaacacgccgtttgaatcggggatcgactccgtcggttcggcccgcttacgtctttctgcgaagttttatctggttgccatgttcttcgttatcttcgacgtggaagccctgtatctctacgcatggtcgacctctatccgcgagagcggctgggtcggctttgtggaagccgcaattttcattttagtgctactggctggtctggtttatctcgttcgcatcggcgcactggactggacgcccgcgcgttcccgtcgcacgctggttaacccggaaacagacagtcccactaaccgtcatatgcagtaaaagcgaggcaataagatggattatacgctcacccgcatagatcctaacggtgagaacgaccgttaccccctgcagaaacaggagatcgttaccgatcctctggagcaggaagtcaataaaagcgtgtatatggggaaactcgaacacgcgctgcatgacatggtgaactggggccgtaagaactcaatttggccgtacaacttcggcctttcttgctgttatgtggaaatggtgacgtcattcactgcggtgcatgacgttgcgcgttttggggcagaagttctgcgcgcctctccgcgtcaggcggacctgatggtggtcgcgggaacctgctttaccaaaatggcgccggttattcagcgtctctacgatcagatgctggagccgaagtgggtgatctccatgggcgcctgcgccaactcaggcgggatgtacgacatctattccgtcgtccagggcgtggataaattcattccggtcgatgtgtacatcccgggctgcccgccgcgtccggaggcctatatgcaggcgctgatgctgctgcaggagtccattggtaaagaacgtcgtccgctctcatgggtggttggcgatcagggcgtttatcgcgccaatatgcagtcggaacgcgagcgtaaacgcggcgaacgtattgcagtgaccaatctgcggacgccggacgagatttaatttgcgcctgcgggcgggagaaccacttcgcaaatcaatctacaacagcgcgaagtctcgccggcagtcaccacggaccttttgcaatggtgaacaatatgaccgatttaaccgcgcatgacgccgcaccagcctggcaaacccgcgatcaccttgatgacccggtgattggcgaactgcgcaaccgctttgggccggatgcctttaccgttcagccaacccgtaccggcgtaccggtggtatgggtgaagcgtgaacagctgctggaggtgggtgatttcctgaagaaattgccgaagccttacgtgatgctgtttgacctgcacggcatggacgaacgtctgcgcacgcaccgcgatggcctgcccgccgcggatttttccgttttctatcacctgatctccatcgatcgcaaccgcgacatcatgctcaaggtggcgctgtcggaaaacgatctgcatctgccgaccttcaccaaactgttccccaacgccaactggtatgagcgtgaaacctgggaaatgtttggcattaccttcgatggtcacccgaacctgcgtcgcatcatgatgccgccgacctgggaaggtcacccgctgcgtaaagattatccggcgcgtgccaccgagttcgacccgtttgagctgaccaaagccaaacaggatctggagatggaggcgctgacctttaaaccggaagagtggggcatgaagcgcggcaccgacaacgaggacttcatgttcctcaacctcggtccgaaccacccatcggcgcatggtgcgttccgcattattctgcaactggacggcgaagagatcgtcgactgcgtaccggatatcggttatcaccaccgcggcgccgagaagatgggcgagcgtcagtcctggcacagctacatcccgtataccgaccgtattgaatatctcggcggctgcgtcaacgagatgccgtacgtgctggcggtggaaaaactggctgggatcaccgtaccggatcgcgtgaacgtgatccgcgtgatgctctccgagctgttccgcatcaacagccacctgctgtatatctcgacctttattcaggacgtcggcgcgatgacgccggtcttcttcgcctttaccgatcggcagaaaatttacgatctggtggaagcgattaccgggttccgtatgcacccggcgtggttccgcatcggcggcgtcgcgcacgatctgccgcgtggctgggatcgcctgctgcgtgagttcctcgagtggatgccgaagcgtctggactcctatgagaaggccgccctgcgcaacaccattctgaaaggccgttccgtcggcgtggcagcctataccgccaaagaggcgctggagtggggcaccaccggcgcaggcctgcgcgccaccggtatcgacttcgacgtgcgtaaatggcgtccttactctggctatgaaaacttcgacttcgaagtcccgaccggggggggcgtctcagactgctacacccgcgtgatgctgaaagtagaagagctgcgccagagtctgcgcattcttcagcagtgcctcgataacatgccggaaggcccgttcaaagcggatcacccgctgaccacgccgccgccgaaagagcgcacgctgcagcatatcgaaaccctgatcacccacttcctgcaggtatcgtggggcccggtgatgccggccaacgaatctttccagatgattgaggcgaccaaagggatcaacagttactacctgaccagcgacggcagcaccatgagctaccgtacccgcgtgcgtacgccgagctttgcgcacctgcagcagatcccgtcggcgatccgcggcagcctggtatccgacctgatcgtctatctgggtagtatcgattttgttatgtcagacgtggaccgctaattatgcacgagaatcaacaaccacaaaccgaggcttttgagctgagtgcggcagagcgtgaggctattgagcacgagaagcaccactacgaagacccgcgtgcggcgtccatcgaagcgctgaaaatcgttcagaaacagcgcggctgggtgccggatggcgcgatctacgccatcgccgatgtgctggggatcccggccagcgacgtggaaggcgtggcgacgttctacagccagattttccgccagccggttggccgtcacgtgatccgctactgcgacagcgtggtatgccacatcaccggctatcagggtattcaggccgccattgagaagaaactgaatatcaagccggggcagaccacctttgatggccgctttaccctgctgccgacctgctgcctgggtaactgcgacaagggaccgaccatgatgattgatgaggatactcacagccatctgacgccggaggcaattcctgacctgctggagcagtacaaatgaaaaccgtaattcgtactgcggaaacgcatccgctcacctggcgcctgcgcgacgacaagcagccggtgtggctggacgagtatcgcagtaaaaatggctatgaaggggcgcgtaaagccctgaccgggatggccccggatgagattgtcacggcggtaaaagacgctggcctgaaagggcgcggcggcgcgggcttctccactggtctgaagtggagcctgatgccgaaagacgaatccatgaacatccgttacctgctgtgtaacgccgatgaaatggagccgggcacctataaagaccgcctgctgatggagcagctgccgcacctgctggtggaaggcatgctgatctccgcgtttgcgctgaaagcgtaccgcggctacatcttcctgcgcggggaatatattgaagcggcccagcatctgcgtcgcgcgattgctgaagccaccgaagcgggtctgttggggaaaaacatcctcggcaccgggtttgacttcgagctgttcgtgcacaccggggcagggcgctatatctgcggcgaagagacggcgctgatcaactctctggaaggccgccgcgccaacccgcgatccaagccgccgttcccggcgagctccggcgtctggggcaagccgacctgcgtcaacaacgtagaaaccctgtgcaacgtgccagcgatcctcgccaacggcgtcgagtggtaccagaacatttccaccagcaaagatgctggcaccaagctgatgggcttctccggccgggtgaagaatccgggcgtctgggagctgccgttcggcaccactgcccgcgagatcctcgaagattacgccggcggtatgcgcgatggcctgaagtttaaagcctggcaaccgggcggagcagggaccgacttcctcaccgaagcgcacctcgatctgccgatggaattcgaaagcattggtaaagcgggcagccgtctgggcacctcgctggcgatggccgttgaccacgagatcaacatggtctcgctggtgcgtaaccttgaagagttctttgcccgcgagtcctgcggctggtgtacgccgtgccgcgatggtctgccgtggagcgtgaagatcctgcgcgccctggagcgcggcgaaggccagcctggcgatatcgaaacccttgagcaactgtgtcgattcctgggcccgggtaaaaccttctgcgcgcacgcgccgggcgcggtcgagccgctacagagcgcgattaaatatttccgcgaagaattcgaggctggcattaagcagcagttcagcaatacccatgcaatcaacgggattcagccgaacctgcttaagacgcgctggtaatctaaaggttttttatttttggaagcacgcaaatggctacgattcatgtagacggcaaagaatacgaggtcaacggggcggacaacctgctagaggcttgtctctctcttggtcttgatattccctacttttgctggcacccggcgctagggagcgtcggtgcttgccgccagtgtgcggtgaagcaatatcagaacgcggaagacacgcgtggtcgcctggtgatgtcctgtatgactccggcatccgacggcacctttatttctatcgacgacagcgaagcgaagcagttccgcgaaagcgtggtggagtggttgatgactaaccacccgcacgactgcccggtctgcgaagagggcggcaactgccacctgcaggatatgacggtgatgaccggtcatagcttccgccgctatcgtttcaccaagcgtacccaccgcaatcaggatctggggccgtttatttcgcacgaaatgaaccgctgcatcgcctgctaccgctgcgtgcgctactacaaagattatgccgacggcaccgatctgggcgtctatggcgcgcacgacaacgtctacttcggccgcccggaagatggcaccctggagagcgagttctccggcaacctggtggaagtctgcccgaccggcgttttcaccgacaaaacccactccgagcgctataaccgtaagtgggacatgcagtttgcgccgagcatctgccagcagtgttccatcggctgtaacatcagcccgggcgaacgctatggcgagttgcgtcgtatcgaaaaccgctataacggcaccgtgaaccgctacttcctctgcgaccgcggtcgtttcggctatggctacgtgaacctgaaagaccgtccgcgtcagccggtgcagcgccgcggcgacgatctgatcacccttaacgccgagcaggcgatgcagggggcggcggatatcctgcgccagtcgaagaaagtgatcggcatcggttccccgcgcgccagcattgaaagcaacttcgcgctgcgcgagctggtgggcgccgacaacttctataccggcatcgccaaaggcgaacaagcgcgcctgcagatgatgctgaaagtgctgcgcgagggcgggatccacacgccaagcctgcgcgatatcgaatcctacgatgcggtactggtgctgggcgaagacattacccagaccggcgcgcgcgtggccctggcggtacgccaggcagtgaaagggaaagcacgcgaaatggcggcggcgcagaaagtggccgactggcagatcgccgcgatcctcaacatcggccagcgcgccaagcacccgctattcgtcaccaacgtcgatgacacccgcctggatgacatcgcggcgtggacctaccgtgcgccggtagaagatcaggcgcgtctcggctttgctattgcccatgcgctggacgacagcgcgccggcggttgacggcctgagccaggacctgcagggtaaagtcgacgttatcgttcaggcgctggccggggcgaaaaaaccgctgatcatctccgggaccaacgccggcagcatggagatcatccaggccgccgctaacgtggcgaaagctctgaaaggccgcggcgccgatgtcggggtgaccatggtcgcccgggcggttaacagcgtcggactgggcatgatcggcggcggctcgcttgaagaggcgctggacgaactggaaagcggcgccgcagacgcggttatcgtgctggaaaacgaccttcaccgtcatgcttccgccgcgcgcgttgacgctgcgctggcgaaagcgccgctggtgatggtggtggatcatcagcgcaccgcgattatggacaaagcgcacctggtgctctccgcggcaagctttgcggaaagcgacggtaccgtggtgaacaacgaaggtcgcgcccagcgtttcttccaggtttacgatccggcttactacgacgcgaaaaccgtaatgctggaaagctggcgctggctgcattcgctgcacagcaccgtcaacaaccgtcaggttgactggactcagctggaccacgtcattgatgcggcgattgccgcgctgccgcagctggcgggcattaaagacgccgcgccggatgcgaccttccgcatccgcggccagaagctggcgcgtgaaccgcaccgctacagcggccgcacggcgatgcgcgctaacatcagcgtgcacgagccgcgtcagccgcaggataaagacacgatgttcgccttctccatggaagggaacaaccagccgtccgccccgcgttcgcagatcccgttcgcctgggcgccgggctggaactccccgcaggcatggaacaagttccaggatgaagtgggcgggaaactgcgccacggcgatccgggcgttcgtctgtttgaagcgtccgccagcggactggagtacttcacggcggtgccggccagcttccaggcggaagagggcaaatggcgaattgcgccgtactaccatctgttcggcagcgatgagctgtctcagcgcgcgccggtgttccagagccggatgcctgagccgtacatcaagctgaacccggcggatgccgcgaagcttggcgtcaacccaggcgcaatgctctcctttagcgtggaaggccagaccctgcgtctgccgctggttatctctgaaggcctgaccgcgggacaggttggcttaccgatgggcatgccgggcattgcgccggtgctgaccggatcgcgtattgattcactgcaggaggcgaaagcatgagctggttaacgccggatcttatcgacattctgttaagcatcctgaaggccgtggtcattctgctggtggttgtcacctgcggcgcgttcatgagcttcggcgagcgtcgtctgctcggcttgttccagaaccgctacggacctaaccgcgtcggctggggcggttcgctgcagctggtcgccgacatgatcaagatgttctttaaagaggactggatcccgcgcttctccgatcgcgtgatctttactctggcgccggttatcgcctttacctcgctgctgctggccttcgctatcgtgccggttagcccgacgtgggtggtggccgacctgaacatcggcatcctcttcttcctgatgatggcaggcctggcggtctacgcggtgctgttcgccggttggtcgagcaataacaaatactcgctgctgggggcgatgcgtgcttccgcgcagaccctgagctacgaggtatttctcggtctctccctgatgggcgtggtggcgcaggcggggtcattcaatatgaccgatatcgtcaacaaccaggcgcatctgtggaacgttatcccgcagttcttcggcttcgtgactttcgccatcgccggcgtggcggtgtgtcaccgtcacccgttcgaccagccggaagcggagcaggaactggccgatggttaccacattgaatattccggcatgaaattcggtctgttcttcgtcggggaatacatcggtatcgtcaccgtttcagcgctgatcgtcacgctgttcttcggcggctggaatggcccgtggttacctcctttcatctggttcgcgctgaaaaccgcgttcttcatgatgatgttcattttgatccgcgcatcattaccgcgtccgcgctatgaccaggtaatgtcctttggctggaaggtatgcctgccgttaacgctggtcaacttgttggtaacggcggctgtcattctctggcaggcgcaataaggggtgaattgaacatgaccttaaaagaattattggtggggttcggcacccaggtccgtagtatctggatgattggcctgcatgccttcgccaaacgtgaaacccggatgtatccggaagagccggtctacctgccgccgcgctatcgcggccgcatcgtgctgacccgcgatccggacggtgcagagcgctgcgtcgcctgtaacctgtgtgcggtagcctgcccggtgggctgtatctcgctgcagaaagcagagacggtagacggccgctggtatccggagttcttccgcatcaacttctcacgctgcatcttctgcggcctgtgcgaagaagcgtgcccgaccacggcgatccagttgaccccggacttcgagctgggtgaatacaagcgtcaggatctggtgtacgaaaaagaggatctgctgatttccggtccgggcaaatacccggaatataacttctaccggatggcgggtatggcaatcgacggcaaagataagggcgaagcggaaaatgaagctaagccaatcgacgtcaagagcctgttaccgtaaggagaggggcaatggaattcgctttttatatctgtggcctgatagccatcctcgcaaccttgcgggtcgtcacccacaccaatccggtgcatgcgctgctgtacctgattatttcgctgctggcgattgccggggtgtttttctcgctgggcgcttacttcgccggtgcgctggaaatcatcgtttacgccggggccattatggtgctgttcgtcttcgtggtgatgatgctcaacctgggcggcaccgagatcgaacaggagcgcaagtggctgcagccggggatctggattggcccggccatcctctccgcggtgctgctggtggttatcgtttacgccatcctgggcattaacgaccagggtatcgacggtgcggcgattaacgccaaagaagtgggcattgcgctgtttgggccgtacgtcctggcggtggagctggcctccatgctgctgctggcgggcctggtggttgccttccacattggccgcgaagagcgcgccggcgaggtgctgagcaaccgtctgaacgacagcgacaaacgaaaaacggaggaacacgcatgatccccttaacacatggactgatcctcgcggccatcctgtttgtgcttggtctgacggggctggtgatccgccgcaatctgctgtttatgttgattagcctggaaatcatgattaacgccgccgcgctggcctttgtggtggcgggtagctactggggtcaggcagatggtcagataatgtatatcctcgccatcagcctcgcggctgcggaagcgagtatcggcctggcgctgctgctgcagctccatcgtcgccgccagaacctgaacatcgattcagtaagtgagttgcgtggatgaacatgcttgccttaaccattcttttgccattgattggctttgtgctgctggccttctcccgcgggcgctggtcggaaaatctttccgccgccgttggcatgggctcggtaggcctggcggcgctggtcaccgcgtacgttggcgtcgactttttcgctaacggcaaacaggcggtcagcgtgccgctgtggacctggatgtcggtcggtgatttcaacatcggcttcaacctggtgttggacggcctgtcgctgaccatgctctccgtagttaccggcgtcggcttcctgatccacatgttcgcctcctggtacatgcgcggtgaagagggatattcccgcttcttcgcctataccaacctgtttatcgccagcatggtggttctggtactggccgataacctgctgctgatgtacctcggttgggaaggcgtgggcctctgttcttacctgctgatcggtttctactacaccgatccgaagaacggcgccgcagcgatgaaagcgtttgtggtgacccgcgtcggcgacgtgttcctcgccttcgcgctgttcattctttataacgaactgggcaccctgaacttccgcgaaatggtggagctggcgccgcagcacttcgctaacggcagcaccacgctgcagtgggcgacgctgatgctgcttggcggcgcggtcggtaaatccgcccagctgccgctgcaaacgtggcttgccgatgcgatggcgggtccgacgccggtctctgcgctgatccacgccgcgaccatggtcaccgcgggcgtctatctgatcgcccgtacccacggcctgttcctgatgacgccggaagtgctgcatctggtcggtatcgtcggggcggtcaccctggtgttggcgggcttcgccgcgctggtgcagaccgatatcaaacgcgttctcgcctactctaccatgagccagattggctacatgttcctcgcgctgggcgtgcaggcatgggacgcggcgattttccacctgatgactcacgcgttctttaaagcgctgctgttcctgtcgtctggttcggtcattctggcctgccatcacgaacagaacatcttcaagatgggcggcctgcgcaaatcgattccgctggtatacgtctgcttcctggtggggggcgcggcgctgtccgcactgccgcttatcaccgcaggcttcttcagtaaggatgagattctggcaggcgcgatggccaatggccatatcaatctgatggtggcaggcctggtcggcgcctttatgacctcgctgtacaccttccggatgattttcatcgtattccacggtaaagagcaaattcacgcgcacgcagggaaggggattacccatcatctgccgttgattgtgctgctggtactatccaccttcgttggcgcgctgattgtgccgccgctggaaggcgtactgccgcagaccactgagctcgcccacggtagcgtgatgacgctggagattgcctccgggatcatcgccattgccgggattctgatcgctgcatggctgtggctgggcaaacgcacgctggtgacctccatcgccaacagtgcgcctggccgcttcttcggtacctggtggttccatgcctggggcttcgactggttatacgacaaggtgttcgtaaaaccattcctcggtattgcctggctgctgaaacgcgatccgctgaactcgttgatgaatatcccggcgatcctttcccgcttcgcaggcaaaggcctgctggtgagcgagaacggttatctgcgctggtatgtggcttcaatgagcatcggcgcggtggtggtgctggcgctgctgatggtattgcgttgatttgatcgcgcggttttgcccggtggcgcttcgcttaccgggcctacgagaccgtaggtcgggtaagcgaagcgccacccgacacaacaaaccgcactcaaacgtgaatgtagtcgaattcgttgaaaatcggtcctgaacgggactttaacaaggaataaaaatcgccatgttactaccctggctaatattaattccctttatcggcggcttcctgtgctggcagaccgaacgctttggcgtgaaagtgccgcgctggatcgcgctgattaccatgggactgacgctggtgcttggcctgcagctgtggatgcagggcggctattctctgacgcaatccgcgggtattccgcaatggcagtcggaattcgtgctgccgtggatcccacgcttcggcattagcatccatctggcgatcgacggcctgtcgctgctgatggtggtgctgaccggtctcctcggcgtgctggcggtgctctgttcgtggcgtgaaatcgaaaaataccagggcttcttccacctcaacctgatgtggatcctgggcggcgttatcggcgtgttcctcgccatcgacatgttcctgttcttcttcttctgggaaatgatgttggtgccgatgtacttcctgatcgcgctgtggggccacaaagcctcggacggtaaaacgcgtatcacagcggccaccaagttcttcatctatacccaggcgagcggtctggtgatgctgattgccattctggcgctggccttcgtccacttcaacgccaccggcgtgtggaccttcaactatgaagatctgctgaaaaccccgatgtctcacggcgtggaatacctgctgatgctcggcttcttcatcgccttcgcggtgaaaatgccggtggtgccgctgcacggctggctgccggacgctcactcccaggcgccgaccgccggctctgtcgacctcgcggggatcctgctgaaaaccgccgcctacggcctgctgcgctttgcgctgccgctgttcccgaatgcctccgccgagtttgcgcccatcgccatgtggctgggcgtgatcggtatcttctacggcgcgtggatggccttcgcccagaccgatattaaacgcctgatcgcctacacctccgtgtcccacatgggcttcgtgctgattgctatctacaccggcagccagctggcctatcagggagcggtgatccagatgattgctcacggtctgtccgcggcgggtctgtttattctctgcggccagctgtacgaacgtctgcatacccgcgatatgcgccaaatgggcggtctgtggagcaaaattaaatggctgccggcgatgtcgatgttcttcgcggtcgccactctggggatgccgggcaccggtaacttcgtcggcgaatttatgatcctgttcggcagctataaagtggtgccgacgatcaccgttatctccacctttggtctggtattcgcgtccgtttactcgctgtcgatgttacatcgcgcttacttcggtaaagcgaagagcgaagtggcggcgaaagagttgccggggatgtccctgcgtgaactgtctatcatcctgctgctggtggtgctgctggtgctgttgggcttcttcccgcagccgatcctcgacacctcgcatgctgcgatgagcaacattcagcagtggtttgttaattctgtttctactacaaggccgtaattcgccatgacaataactccacaacaactgatcgcactgctaccgctgctgatcgtcggcttgacggtggtggttgtgatgctctccattgcgtggcgacgcaatcattttctcaatgccacgctgtcggttcttggacttaacgccgcgctggtctcgctctggttcgtcggccagaacggggcgatggacgtcacgccgctgatccgcgttgacggctacgccatgctttacaccggtctggtgctgctggcgagcctcgcgacctgtactttcgcctacccgtggcttgagggttacaaggacaacaaagaagagttctacctgctggtgctgatcgccgccctgggcggcattctgctggccggtgcgaatcatctggcggcgctgttcctcggtattgagctgatttcgctgccgctgttcggcctggttggttacgccttccgccagaagcgttcgctggaagcgagcatcaaatacaccatcctctccgcggcagcttcgtccttcctgctgttcggtatggcgctggtgtatgcgaactccggcaatctgtccttcctcgcgctgggcaaaagcctggcggacaacatgctgcacgagccgctgctgctggcgggcctcggtctgatgatcgtcggtcttggctttaaactgtcgctggtgccgttccacctgtggacgccggacgtttaccagggggcgcctgcgccggtctccaccttcctggcgaccgccagcaagatcgctatcttcggcgtagtgatgcgtctgttcctgtacatgccggtgggcaacagcgaagcggtacgtgtggtgctgggcctgatcgccttcgcctctatcatcttcggtaacctgatggcgctgagccagaccaacattaagcgcctgctcggttactcttccatctcccatctcggctatctgctggtggcgctgattgccctgcagagcggtgaaatgtcgatggaagccgttggcgtctacctggccggttacctgttcagcagcctcggcgcgttcggcgtggtcagcctgatgtccagcccgtaccgcggcccggatgctgactcgctgttctcctaccgcggcctgttctggcaccgtccgatcctgtcggctgtgatgacggtgatgatgctctccctggccggtatcccgatgaccctcggctttatcggtaagttctacgtgctggccgtcggtgtgcatgcgcatctgtggtggctggttgccgcggtggttgtcggctcggcgatcggtctctactactacctgcgcgtggccgtcagcctgtatctgagcgcgccggagcagctgaatcgcgatgcgccgtcaaactggcagtacagcgccggcggtatcgtggtgctgatctccgcgctgctggtgctggtgctcggtatctggccgcagccgctgattagcatcgtgcagctggcgacgccgctgatgtaagttgattgactcaataaaaaaccgccgggatggcggtttttttatgcccggattttacgccatcttgtagaccataaagtcttccgccagcagcgtgttagggaaaatctcccggcattccgccagcatacgcagacagccttcggcatcgtagcgcgagctaaagtgggtggcgatcagcgtaccgacccccgcttctttggcaagcgccgcggtctgctgactggaagagtggccgcggctattggctttctccgccatcgcctgctcaagggtggtttcgtggaccatcacatccgccccgcgagccatctccagcgcctgcgggcagggggcggtatcgccgaagatggccagcgttttacccggggtcgctggccccagatagcggctgccgtcgatgacccggccatctgccagcgtgacgcgctgtccgcgcttgagttgatggaacagcggcccgggaggcacgccatcggcaatcagctgggcggcgtcgagggtgccgggcttgtcatgctgcgcaatgcgatacccatagcactccaccggatggctgagcggatacgcggtgacccgatagccctcttcgtcgaacaccagaccagggccgacttcgatgatggtgagcggatagtcggtccacgaaccgctcaggcgcagcgcggtctcaacaaactctttgagtccttttggcccgtagagggtgaggggcagggagtttccctgcatcgagcggctgcacagcaggccgggcaggccgaacaggtggtcgccgtgcagatgggtaataaaaatcttattcagtttgccgggatggtagggcgtgtgaagaaactgatgctgggtcccttcgccgcagtcaaacaaccacatttcggcgcgggtcggctgttgcaaattgagtattatcgacgtcatattacgcgtgcgggtcggcaccccggcggatgtccccaaaaaagttaattccatcgtccagtgtcctcagggcgagtcgcaaagtatcagtatatcaataaggagcagcagatgatgacctggcaggatctccaccatagtgaactcaccgttccccagctgtatgcgctgctgaaattgcgcagtgaagtctttgtcgtagagcagcagtgcgtctatcaggatgtcgacggcgatgatttggttggtgaaaatcgccatctgctcggctggcgcgatggcgaactggtggcctacgcgcggatcctcaaaagcgaagaggagtttgcgccggtggtgattggccgggtcatcgtcagccccgccgcccgtggtgcgaagctcggctatcagctgatggagcaggcgctggccagctgtcagcagcactggccgcaaaaggcgatttacctcggggcgcaggcgcacctgcaatccttttacgcccacttcggttttacgccggtgaccgaggtctatgatgaggatggcatcccccacattggcatggcgcgagaaaagcgcactgtctgactcctctgcaccctcgtccacacgcagctctggcccggcgagcgggtaagataaaacccgctccctcatcatgggtactgctattccgccgtcgaaccccttataatgtggggttttactaccgtggaggtttgcgtgctgtctgtttccactgcgctggcccgtttgcaagacggcctgggcgagtcttttccagacttgcccggcacgcgaattatcgatgttgcttttccgctgaatgatgccttcgatccgctactatggtgcggccagcaggcgcaatggccgcagttttactggcagcagcgcaatggcgatgaggaactggcgacgctgggggcggtaaaaacctttacctcgctcgacgcggcgaaccgctttttacgccaggtcggccggcaggatctgcgtatctgcggcctgaatgcgtttgaaccgcagcagggcagcctggcgctgccgcgtctggagtggcgccggtgcggcggcagggccgtgctgcggctggtgctgcatagtgatatctccctgcgtgaggatgccgcgacggcccgcgcgtttctcgccagcctgacaaccactcaggcgactcccggcgccataccgccgttgctgagcgagcgccactcatccgactatcctcaatggcaggcaatgattgcgcgggcgactaaggcgatcagcgccggtgaaatggataaagtagtgctggcgcgggcaaccgacctgcagtttgccgccccgctggacgccgtgagcatcatggcggctagccggcgcagcaatcttaactgttttcatttcctgatggcgttcaatgcccggcaggcatttttcggctccacgccggaacggctgtggcgccggcgcggcgcgctgctgcgcaccgaagcgctggcggggaccgtcgcgaaccatcaggaagacgcgaaggcgcagcaactggccgactggttgatgaaagacgacaaaaaccagcgggaaaacatgctggtggtagaggatatctgccagcgcctgcagagtgaggcctcgacgctggacgtcctgccgccgcaggtggtgaggctgcgtaaggtgcagcatctccgacgctgcatctggaccgagctggcggcgcctgacgacagccgctgtctgctgcagctgcagcccaccgccgcggtggccggcctgccgcgccgggcggcgctggcgttcattcagcgtcatgaaccgttttcccgcgaatggtacgccgggtccgccgggtatctgtcactggcgcaaagcgagttttgcgtggcgctgcgttcggcgaaagtgaaccacgacaccctgcggctgtatgccggggcggggatcgtcagcggctctgatgcacagcaggagtggcaggagatagacaacaaagcggccgggctgcgctcgctgctgtgtccataaagcttgaatgacgatgcatatcaaaacgacgtcactttgccttatctatacttagcatcaatatttgataccggacaatttcatgtcagtaagcgcatttaaccgacgctgggcggcggtgatcctggaagctttaacgcgccatggcgtgcagcatatctgcatcgcgccgggctcgcgctcgacacccttaaccctggcggcggcggaaaaccgcgcctttatccatcatacccatttcgacgaacgcggcctcggccacctggcgctcggcctggcgaaggccagccggcagccggtggcggtgatagtcacctccgggaccgccaccgcgaacctctatccggcgctgattgaggcagggctcaccggtgaaaagctgatcctgttgaccgccgaccgtccgccggagctgatcgactgcggcgcgaaccaggctatccgccagccggggatgtttgcctcccatcctgcgcagacgatttctttgccgcgtccctcgcaggatattcctgcccgctggctggtctcaaccatcgaccaggcgctgggcgcgctgcacgccggcggggtgcatattaactgtccgttcgctgaaccgctgtatggtgatatggatgagaccggcgtggagtggcagcagcagctcggcaactggtggcagagcgacaaaccctggctgcgccaggcgctgcagttagagagcgagaagcagcgcgactggttcttctggcgacaaaaacgcggcgtcgtcgtggcgggcagaatgagcgccgcggaagggaaaaaggtcgctgagtgggcgcagaccctcggctggccgctgatcggcgatgtcctgtcgcagaccgggcagccgctgccgtgcgccgacctgtggctgggcaacggcaaagcggtcagcgagctggcgcaggcgcagatcgtcgtgcaactcggcagcagcctgaccggcaaacgcgtgctccagtggcaggcgacctgcgagccggatgaatactggctggtggataatctgcccggtcgcctcgacccggcgcagcaccgcggtcgccgtctgctctcaagcgttgagcgctggctcgaattacatccggcggagaaacgccagccgtgggcgacggtgatcccacagcttgccgggcaggcgtggcaggctgcagtcgccagcaacgagccttttggcgaagcgcagctggcgcagcgtattcggggctatctgccggagcagggccaattgtttgttggcaacagcctggtggtgcgcctgatcgacgccctggcgcagctaccggccgggtatccggtctacagcaaccgcggcgccagcggcatcgatggcctgatcgccactgcggccggcgtgcagcgcgccagcgcccgaccgacgctggccatcgttggcgatctctccgcgctctacgatctcaactcgctggccctgctgcgccaggcgtcggcgccgctggtgctgatcgtggtgaataacaacggcgggcagattttttctatgctgccgacgccgcaggacgaacgccgtcagttctatttaatgccgcaggacgtggatttcagccacgcggcggcgatgttcggcctggcctatcatcgccctgatgactggccgtcgctggatgaggcgctggccggcgcctggcgcagggcaggggcgacggtgattgagctggcggtcaatgagaccgacggcgcgcagaccctccagcagctgctggcgcaggtaagtcgcctgtgatcctcagcgctgctgtcgacaacggccagccgggctatccctggctggtgtttctgcacggtttttccggcgaccgcaacgagtggcggaaagtgggcgacgcctttcccgcctggccgcggctgtacctcgatctgccggggcacggcggctccgcggatatcgcggtgcaggactttgccggggtcaatactctgctgcagtctacgcttaatagttacaacatacataagtattggctgatcggctactcgctgggcggccgggtggcaatgaacttcgccagccagccgcgcgcaggcatgcgcgggctgatcgttgaaggcggccatccgggcctgcaggatgtagaggcgcggcaggcgcggcgcagcaatgacagcgcctgggcggaacgttttcgccgcgagccgcttgagcaggtctttgccgactggtatcagcagccggtcttcgcttcgctgaatgccgcgcagcgtgagtcattggtcgccttacgcagccggaacaacggcgcgacgctggcggcgatgctgcaggcaacctcccttgccgcgcaggccgatctgctcgcgtctctgcaggcgcgcgattttccttttcactacctgtgcggcgagcacgacgcgaagtttcgcgccatcgcgcagacgctcgcggcggatctccatcttattcaccatgccggacacaacgcgcaccgggacaacccggcggcggtgattgcctgtctggcgcagattctggcaagttaactgaaggacattctatgatctctcttgatgaagcaatgctctacgcccccgttgaatggcacgattgctccgaaggctataccgatattcgctatcacaaatcgactgacgggattgccaaaatcaccattaatcgtccgcaggtgcgcaacgccttccgcccgctgaccgtcaaagagatgatccaggcgctggcggatgcccggtatgacgacaatatcggcgtcatcgtgctgaccggtgaaggtgagaaagccttctgcgccggcggcgaccagaaagtccgcggcgactacggcggctatcaggacgactccggcgttcatcatcttaacgtgctcgacttccagcgtcagatccgcacctgcccgaaaccggtggtggcgatggtggccggctactctatcggcggcggtcacgtgctgcatatgatgtgcgatctgactatcgcggcggaaaacgccatcttcggccagaccgggccaaaagtcggctctttcgacggcggctggggcgcctcctatatggcgcggatcgtcgggcagaaaaaagcgcgcgaaatctggttcctgtgccgccagtatgacgctcagcaggcgctggacatggggctggtgaataccgtggtaccgctggcggatctggaaaaagagaccgtgcgctggtgtcgtgaaatgctgcagaacagcccgatggccttgcgctgcctgaaagcggcgctgaacgccgactgcgacggccaggctggtctgcaggagctggcgggcaacgccaccatgctgttctatatgacggaagaggggcaggaaggccgcaatgccttcaaccagaaacgtcagccggacttcagcaaatttaaacggaatccataatgcgcgtttcgcaggtttaccgctggcagataccgatggacgcgggcgtggtgctgcgcgagcggcggttaaaaacccgcgacgggctgttcatccgcctgcaggagggtgaacgcgaaggctggggcgaaatttctcccctgccgggattcagtgtcgagacgctggaagaggcgcaaatggcgctgttagcgtgggcacaggcctggcgcgacggcgccgagccgccgcttcccacgcagccctccgtcgcgtttggcatcagctgcgcgcaggcggagcttagcggcggactaccgcaggccgcggattatcgcgcggcgccgctctgctccggcgatccggatgagctattcgccagactggcggcgatgcccggcgagaaggtcgctaaggtcaaagttggcctctgggaggcggtccgcgacggcatggtggtgaatctgctgctggaggcgatccccgacctgcagctgcggctcgatgccaaccgcgcctggacgccgctcaaagcgcaacagttcgccaaatacgttaatccggcgtaccgccagcgcattgcttttcttgaagaaccttgcaaaacgcgggaggattctcgggcctttagccgcgagacagggatcgctatcgcctgggatgaaagcctgcgcgaggcggatttccgctttgtcgccgagccgggggtacgtgcggtggtgatcaaaccgacgctaaccggcagtttgcagaaggtgcagcaacaggtcgccgcggcgcatgcgctggggttgagcgtagtgatcagctcgtcgatcgagtccagtctcggcttgacccagctggcgcggattgccgcctggctgacgccgcagactattcctgggttggatacgctgtcgctgatgggcgcccagttggtacggccgtggcccgaaagtgtgctgccggtgctcaacattgatgcgctggagccgctgctgtgacctttaacgactggccctggcggcattggcgtcagcggcgcggagaggccctcgccttacgtctgaataaccagccgctgacctggcgggagctatgcgcgcgggttgacgcgctggcgtctggttttgccgcgcagggcgtaatggaagggcagggcgtggcgctccgggcctataaccagccggaaactctgctggcatggctggcgctgctacagtgcggggcgcgggtgctgccgctgaatccgcagctgccagcggtgttgctgcaggaactgctgcctgcgttaaccgtacagcatcaactggtgcttaacggtgatacgctgccggggaatttaccggcgttaactctgcaggcggcagaaggcgcttgtgccgtttgttggcatggcgatcggttggtgtcgatgacgttgacctccggttcaaccggcctgccgaaagcggcggtacatagcgccaacgcccatctggccagcgcggctggcgtgctggcgctgatgccgtttgccgcaggagatgactggctgctgtcgctgccgttgttccatgtctccggtcaggggatcgtctggcgctggctgctggccggcgcgcgactcacggtacgtgacaaacagccgctggcgcagatgctgcacggctgtacccatgcttcgctggtgccgactcagctatggcgcctgctgaatgatgatgctgcggtttccctcaaggcggtgctgctcggcggcgcgtcgatcccggtcgaattgactgaacgggcgcgaaagcagggcatacgcagcttctgcggctatggcctcaccgaattcgcctccaccgtgtgtgccaaagaggccgacggcgctgcggatgttggcgaagcgctgccggggcgagaggtgaaaattgtcgccggcgagatctggctgcgggcgtcgagtatggccgcaggctactggcgggatggtcaattgttgtcattaaccaacaatgaaggctggtttgcgacgcgcgatcgcggagcattgcataacggtcggctgacggttgttgggcgactggataacctcttttttagcggtggagaaggtattcaaccggaagaggtcgagcgtgtgatactcgcccatccacaggtacagcaggtgtttatcgtgccgctggatgatgcggaatacggccagcgcccggtagcggtggtggaatgcgatgacggctgcgagttgagcgcgctggcggcatggagcgctgagcggttagcgcgttttcagcagccggtgcgttggctgcggttgccggaaacgttaaaaaacggcgggattaagatttcgcgccgggcgctgtgcgagtgggtcaggcagcagacgcatgcgaccgtatcgtagccacccgcattatcccgcggcataacgccgggtgggttgaacgcggtatgctggactaaagtagccctttcaggctgagagtaacgcgggtggcggcattaagatcgtagtttttgagatcttcggctttgacccaggcgtaatcgtcaaactcctcgttgatcgtcacatcgcgattggcgctcacgcagttgaagatgagatagatcatgtagatcgtttcctgatgcccgtcggggtaggttttgacgcgggtatcgtcgcgaaagcaccatggcgcgatatgggtaaggatgagtttttcgccgagctcttcgcgtatttcccgccgcagcgcctcttcaatacgttcccctggctccacgccgccggataaggcccattgcccgggaaaaccccctcggtcggcggccattttgcaaagcagataatggcctttattctcgatcagcgggcaaacaatcgtcctgtggcgcatgggttttctcctgcagagggatggggcggtatgctggtgaaatagtttgcgagccgcctcggtaaactgcaagcgaaatacagttcaggtcttgttgagtgctacgttaagcgaaaatgattgtatggagcaccgccatggaaagggcgacgaattccccccacgatgctgtatttaaacacctgctgtcgcatcgggcgacggccagggattttctggacattcaccttcccgcaccgctgcgcgcgttatgtaacctgaacacgctgcggctggagtccgggagctttatcgacgacgaactgcgggcgagtcattccgatatcctttactcgctgcaaacgcaggcgggggagggctatatctatctgttgatagagcaccaaagctcggcggaccgccatatggcatttcgcctgatgcgctatgcgatagccgcgatgcagcgtcatctggataaagggcatacgcagctgccgctggtgatcccgctgctgttttatcatggtcgcgtttctccctggccttacccgatgtgctggctggcaggctttgccgatccggacatcgcgcggcgggtctatggtgaagattttcccttaattgatatcactagcaccccggacgatgaaatcatgcgccaccggcgcgtggcgatgctggagctgctgcagaagcatattcgccagcgggatttgatggacctgcatgagcaactggtcaggctcctggcgctgggatacactagccgcaggcagcttaagacgctgttgcactatttattacaggcaggaaacgccgccgatccggttgcttttttgcgccatcttgcgcaaaacgttccccggcggccgcataaggagacgctaatgaatattgcccagtttctggaacaacgcggccatcagcaaggattaaagcaaggtcttgaacaaggtctacagcaaggtatcgaacaaggtatcgagcaaggtgagcagcagaccgcggagcgtatcgcccgggcgatgcttgctaacggactcgacctgtcgctggtggcgaaactgaccggcctcgccccggaatgtctggcccggctgcagcattaattattcccttatccacccgcgccgcgccgatcgtgcggcgccagctctctgttttcgtcaatgtgtcagcgttaatcataataaacatgaatattactggcgttgaataggctgttcgtggttctggcaacgctcgatgccgtaaaaatacgcaactggttacactcttgtgaaaattcatttcgccaggtcattgattcctgatgggtgcgcagtagaattttcaggttttttcgggacttctttgattttaattttctggatagagtaaataatgaaaaaaagcatttttatggcgctggcgggcgtgatgatggtttcttcggcggcccatgcgattagcgttaccggtgaagccggcgagcattacaccaaccttggcgtcggcttcggcaccgagtccaccggcctggccgtttcgggtaactggctgcacagcgataacgacggcgacgccgcgggtttaggcctgggactcaatattccgctggggccgttcctcgcgaccgtgggtggtaaaggtatttacaccaatccgaaacagggcgatgaaggttatgcggccgcggtcggcggcggcctgcagtggaaaatcggcgacagcttccgcctgtacggcgattattactactctccggattcgctctccagcggcattgatagctaccaggaagccaacgtcggcgccagctggaccattatgcgtccgcttagcatccaggccggctaccgttacctgaacctggcgggcaaagatggcaaccgcgataacaccatcgccgacggcccatacatcggcgccagcgccagcttctaatctcttccggcgcggcatcttcttgctgcgccagattttcctcctcgtcagcatcccgctttgcgttatagtatttctcacctggcaggcaaggagtgagcaatgttgaatgtggaaatgctgtccaccggcgatgaagtgttgcatggtcaaattattgatactaatgcggcatggctggcggatttcttttttaatcagggtttaccgttaacgcgccgcaataccgttggcgacgatctcgatgcgctggtggcgattctgcgcgaacgcagcgaacaggcggatgtgctgatcgtcaacggcggcctcggcccaaccagcgacgacctgagcgcgctggccgccgccactgcgaaaggcgaagggcttattttgcatccggagtggctggaaaccatgacccgcttttttgccgagcgcggcaggccgatggcggaaagcaaccgtaagcaggcggaaatcccggccagcgccgagatgatcaacaacccggtcggtacggcctgtggctttgccatccagctcaaccgctgcctgatgtttttcactcccggggtcccctctgaatttaaggtgatggtcgagcaggaaattttaccgcgcctgcgccagcgctttacgctgccggacccgccggtatgcctgcgtttgaccacctttggccgctcggagagcgagctggcgcaaagtcttaatccgctgacgctgcctccgggcgtggtgatgggttaccgctcgtcgatgccgatcattgaactcaagctaaccggaccggccaaccagcgcgacgccatgctggccctgtggccggaggtgcgtaaggtggctggcgacagcctgattttcgaaggtacggaagggttacccgcgcaaatcgcccgctgtctgcaggagcggcagctgagcctgacgctcagcgagcagtttaccagcggcctgctggcgctccagctgtcccgcgccggcgcgccgctgctggccagcgaagtcgttccggcgcaggaggagacgctggcgcaggcggcccgctgggcggccgagcggcgcataaaccattttgccggcctggctctggcggtgagcggtcaggaaaacgatcatcttaacgtggccctggccaccccggacggcaccttcgcgctgcgggtgaagtttagcgccacccgccacagcctggcggtacgccaggaagtctgcgctatgatggcgttaaacatgctgcgtcgctggctgaatggtcaaccgctggccagcgaacatggctggattaacgtggtggattccctctcgctgtaagtcattccccccggcgcaccgtatcctcggggcgccggtcgtccaacctgttgtactcctctgaaaaaattctgtgcgttaagtcgcaattttctgctgcgaacggtccagtatacgggaaaacgattgccccgcgatgtcgctcacactttaccgcccggacaatcgcaacactgattccagtattcaggattggagtccagtatgttggaatcaacgaaagtcccggcgctgacccgcgcgattgagatcctcaatttaattggccgcatcggcccctgcagcgcggcgacgataatagcggagctggggatcccgaaaagcacggtgtatctgctgctgggcgagctgaaaaagcagcgcttcatcagtatggataatcaggataactactgcctgtggaccaagctggtggagctggccgggcaggcgctgagcaaaatggacctgcgcgagctggcgcggccgcgcctcacccggctgatggatgagtgcggcctgctttgtcacttgggcattatcgatcagggtaacgcctactacattctgaaaattgagtctcccgccaccatcagcgtgcgctcgcatgagggtaagagcctgtctctttaccgctccgggatcggcaaatgtttgctggcctggcagcccgccagcgttcaggcgtcgattatcgaagacctacagtgggagcgggccacgccaacgaccatcaccgatgctcaacagctgcgggaggagctggggcggatccgcgcccggggctggagctttgataatggcgaggactatccggatgtgcgctgcgtggctgccccggtatttaacgccaataacgacctgaccgccgccatctcggtggtgggtacccgtctgcaaatcaatgaagacaatcgcgattacctggctggtaaggcgattgcctgcgcgaaagatatttcacgtctgctggggtggaaaagccccttcgaacaactcgcctcatcataaggagaacatcatgaccctaccgaaaattaaacacgtccgcgcctggttcatcggcggcgccacagcagagcagggcgccggcggcggcgattaccatgaccagggggctaaccactggattgacgatcatatcgccaccccgatgagcaaatataaacagtatgagcagtcccggcagtcgtttggcatcaacgtgctggggacgctgattgtggaagtggaagccgacaacggacagaccggctttgcggtgtcgacggccggggagatgggctgctttatcgtcgaaaaacatctcaaccgctttatcgaaggcaaatgcgtcagcgatatcaaactgatccatgaccagatgcttaacgccaccctttactacgcgggatccggcggcctggtgatgaataccatctcctgtgtcgacctggcgctgtgggacctgttcgggaaagtggttggcctgccggtctacaaactgttgggtggggcggtgcgcgacgaaatccagttctatgccaccggcgcacgtccggacctggcgcaggagatgggctttatcggcggcaaaatgcctacccactgggggccgcacgatggcgacgccgggatccgcaaagacgtcgccatggtggcggatatgcgcgaaaaatgcggcccggatttctggttaatgctggactgctggatgagccaggacgttaactatgccaccaaacttgcccatgcctgcgccccttataacctcaagtggatcgaagagtgcctgccgccgcagcagtatgaaggctatcgcgagctgaagcgccaggcgcctgccgggatgatggtgaccagcggcgagcaccacggcacgctgcagtccttccgcaccctgtcggaaaccggcatcgatattatgcagcccgacgtcggctggtgcggcggcttaaccaccctggtggagatcgcggccatcgccaaagcgcgcgggcagctggtagtgccccacggctcgtcggtttactcacatcatgcggtgatcaccttcaccaacacgccgttcagtgagtttctgatgaccagtccggactgcgccacgctgcgcccgcagttcgacccgatcctgctcggcgagccggtgccggagagagggcgcattcataaatcggtcctggataaacccggctttggcgtcgagctcaatcgcgactgcaacctgaagcgtccttatcaacactgattgcgtcaggccgcccggcggcccgcgcctgaggatattatgatgagcaacactctgctggagagcgtggtgaagaaaaaccgcgcccgcttaatcccctttatgctggcgctgtacgtgctggcgtttcttgaccgttctaatatcggtttcgccaaagagacctaccagctggataccggactcagcaatgaggcctacgcgctgggggccggtatcttctttgtggtctatgccttcctcggggtgccggccaatctgctgatgcgcaaatttggcgccaggcgatggatcggctgcaccacgctgctgtggggcgtgctgtcggcggcgatggcgtgggcggatacggaagcgaaattcctgctggtacgtaccctgctgggcgcggcggaggcgggcttctttcccggaatgatctacctcacttcacagtggtttccccagcaaaaccgcgccagcattatggggctgttttatatgggcgcgccgctggccctgacgctgggatcgcctttatccggtgcgctgctggagatgcatggatttatgggccatcccggctggttctggatgtttgtcattgaaggcctgctcgccgtcgccgcgggagcgttcaccttcttctggctggacgattcgccgcagcatgcccgcttcctgagcgcagcggagaaacaggcgctgataagcgagctggcgcgcgaggaggagaaaaagattgcctcgcgcctgtccgatgcgctgcgtaacgggcgggtctggcagctggcgctgatttatctgaccattcaggtggcggtctatggtctgattttcttcctgcccacccaggttgctgcgctgctgggcaccaaagtcggcttcgttgcctcggtggtgacggccatcccgtgggtggcggcgctgtttggcacctggcttatccctcgctactccgatcgcaccggcgagcgacgcaatattgccgccctgacgctgctggcggcggcggtcgggattgcagtgtccggactggtggcgccggtgctggctatcatcgcgctgtgcgtggcggcggtcggggtgatcgccgtgcagccggtcttctggacgatgccgacgcagctgctgtccggcacggcgctggccgcagggattggctttgttaacctgtttggcgccatcggtggttttctggcgccgatcgtgcgcgtgcaggccgaaacgttgttcgccagcagcgccgccggactgttaaccctggccggcgtcgccattgtcggggtggtcattatcttttcattgagccttacccgcgcggtaccccagcgcggcagcgtacagcattgaataaaggaatcgctatgaacgcactgttatctaaccccttcaaacggggattattacgcggtgagacgcaaatcggcctgtggctgagctccacctcatcctacatggcggagatcgctgcgacgtcgggatacgactggctgctgatcgacggcgagcatgccccgaacaccattcaggatctttatcatcagctgcaggcgattgccccctatgccagccagccggtcattcgcccggtcgagggcaaccgcagcctgataaaacaggtgctggatattggcgccagaaccttgctggtgccgatggtcgataccgccgagcaggctcgggaggtggtctcagcgacccgttatccccccatcgggagccgcggcgttggcgccggcgtggcgagagcggcgcgctggggaagggtggagaattatatggcggaggcgaatgacgaactctgtctgctgattcaggtcgagagccgaaccgcgctggagaacctggacgctattctcgaggtggacggcattgacggggtgttcatcggtccggcggatctctccgcctcgctgggctacccggacgatgccggtcaccctgacgtgcagcgggtgatcgagcagagcatccggcgcattcgcgcggcggggaaagcggccggatttctggcggtcgacccggcgatggcggaaaaatgtcttgcctggggggccaactttgtcgccgtcggggtggataccatgctgtatacccaggcgctggaccgccggctggcgatgtttaaatctgccagcgcccagccgcaagagaaaacgagctattgacggcacaggctggcgctgggctcagacgagcgcctgcgccagcaccgtcagcggatgctcgcagcgtttgctggtggacatctcaatctgccatttgcaggtctcgcagtcggtgacgacgaggtcggccccgctctcctcaatctgacggaacagcggggcgccgatagcctgggataccgcgtaattctcagttttaaacccgtaggtgcctgcgatgccgcagcactgtgaatccagcacctccagctgcaggccggggatcagccgcagcagctcgagggtatacagcgaccagcccatcttttccatatgacacggggtgtgatagaccaccttcagcggcagcgggcgcagcggtagcgtcctgccggcagccagctgtttccagatccagcgggtggcaagctcgacgcgatcgcgaagatcgctgttatcgacatcgaggagatgggggtattcatcacgtagcgtaaaggcgcaggtcgaggaggtggcaatgatcggtagcgtgttttcccgcatcgcggcgacgttgctctgcgcctgcttacgcgccttgtcgaaaaaaccgttggcgatcagcggtacgccgcagcatttttcttttgataacaactgcaccccggtacccagcgcgttgacgacgcgaatcagatctttacccaactgtggatggttatagttgacgtagcagccatgaaagaaagccacctgttcgctgtactgcttctgacgggcggcgagctggcggtaagcgcggcggaaggtgccgaaaccatatttcggcagcgtacgccggtgatcgatgttgagcgtcgcgtcgagcagacggcgcaccggttttaagccggtggcggcgttgaccaggggggcaaagggggtggaaagggtacccatcaggtcggtatggctgaggatggcgtcgcgcagggtcggcttttgctggccgtactgtgcccgggcgcgttgaatgatatcgccaattttcacatccgacgggcaggcgacctcgcagcgcttgcagttaatgcagtacttcagcgcctcgtcgtacagcgcgccatccttcagacgcaggcgttcgccgtccggccccgcttgtttcgggccgggatagcgcggattgacccgacttaccgggcaggtggtggtacagaccgtgcacttaatgcagctttcaaaacgggtatcgttcatggccggcctccggcaagggcgtggatctgtctggcggcgtgcagcgcggtaacggcgcagacgccgccgccacagccgagctgaatggcatcgaacccgccgagcaatgagccgatggcgaacagattatggaacggctgcccgcccagcagggggcgcagcagggcatcggttttcacgccgaagcgctgccacggttgtgaggcgaagaaatcgcgctggtaccagctttcccgtggcagagtctggtgaaggtcgaggccgaggatcggctcgcgcacgctatcgcgagtggcgacaagaccgttgctgaaaaagctgccgctggccagcacggtaaagcgcggacgcagcgcaatatcgccgtgatttcgcgtccagaccgcctcgacggcgttctgtcgatggctgattttcaccacctcatcgcctgcgagccaggcgccgccctcgcgaatgaactggcgttgcagctgagaatgcaaacgcatcccgggaaccgagggcggcagcgtcggcagcagacgcagcgggcagggtagacgcgcctgcagccagtggtacaggcgatcgtcggcgaggccaaaacaggcgggcatgatcagcaggtcatactgctgcgccagcggtagcagcgctgcatgcagggccggccacatattctcatcatccaggacgcgggcgatattggcggcgcgaaactcggtcgggttatcacgcagcacatccagcagcggtaactcgatttccaccgccgcggcggtaactccgtgttgaccgagcgcggcggcggcgagatgcggctgaaaatcagcaaagccgctgatccccaccagacaggcgccctgcgacggcaggggctcgacaggcacctcaaggggcgacagccatgccgggcgcaacgtccccagcggcgttacccgccggtgcggccggcgcgcatcgccctgcatcaccgcgccgcaggcggccagcagggcttcggtctgcgtagcgtattcgagtaccgcctcggcgccgagccgggaataagggtgttcaggaagctgttcagcgagttgctgcagaccttgtgcgacgtcagtgacgtgatcgccgttgggcagcgccgagagcaggtctaacgacgcggaggaaaaatgcagcgcgctctgcccgcggctgatgatgacgctgcgcaggccgtgctgattcagggccagcccgcacagcaggccggcgagcccaccgccgataatcgcgcaatcaaacttcatcccggtgctcctgtggcaatccgcacaggccgaggtagacccagcgggtgaattcgctttcgcgcagcgcatcgccccaggcgatgggctgcacgcccttccagcgttcattgagaaattccgagagctgggttaacgactgcgcgggcgtggtgacgttaaagcgctgcagcaggccggcagcgcggcaggcgcagagttccccctgacaggtccccatgccaatccgggtgcggcggcgcaggtcgagcagggtgttgaccgccaggttttccaccgcgtatttcacttcaccggcagtgacggcttcacattcgcagaccaggctacggtgctggcggctgtcgccaagccaggacggggtgcgatcgccgtgacggtagacggccgagccgcgcagcggggtggggagggagataatcttttgcagggtactttccgttggctcctgtgaaccgggcagcggggcttcggccgtggtacagggggtggtgtttcccagcttacgacagacggcgtcggtggcccactcggccatcaggcgataggtcatcagcttgccgccggtgatggtaatgaagccttccataccgtcacgctgggcatggtcgagcaggacgatgccgcggctgacgctgcgcccgctgggatcgttatcgctggccaccagcgggcggacgccggagtaggcgcggaggatccgggtgcggcccatgaccggcgccagcttttccccttcgcggagcagggtatcgacctccgccgctgttacccggttgtcgtcaatttcgtcataaggaatatgcattgaggtagtgccgatcagcgagatggtatcgccgggcaccagaatatcggcgtcggccggcttacggcagcggttgatcaccaggttgttaatccgatgatcgaggatcagcagcgatcccttcgccgggaacatggtgatgcgcaggtcggcatattccgcaatacgctgcccccagatcccggcggcgttaaccaccatcccggcgtacagagtgcgggcctggtgaagttggcggtcgtatacctggacgccgcagacgcgatcgccccggcgcagcaggcctgttacttcgcagccggtaaggatctgcgcgccgtgttcgcgggcgtcgagcatattggccgcggtgaggcgaaacgggtcgatggtaccgtccgggacctgcaccgcgcccagcagcgtcgggttgacggcgggctcccggcgcagcgcttcctgcggcgagagcggcgtggcctctatgccagcctgctgacaggcgtcgataaaggtttgctgccatgccaggtcatcttcaggcagggtgataaacagcccattggtcggttcaatacagtggcgggcgatgcggcgcagaatgcggttctcactgatgcattcgcgggcggattcgttgtcggtcaccgcgtagcgggcgccgctgtgcagcagtccatgattccggccggtcgccccggtggcgatatcatggcgctcaatgagcagcgttcgtaatccgcgccgggcgcagtcgcgggcgataccggcgccggttgctccgccgccgatgataatgacctcgctatcaagacgtcccgtcatcttcagctcctctgctttcgtttaacgccatttagccacaaatagtaaggttattgtttgatttcgagcatattcgcgcgttatttgagcgtgttatgtgatttcgtgctcacattggaacgttttgtcatatttctgtaacaaattgtgcgatgtttcacagtatcaactctacgtattgcctaccatcgcgaccatatttgaagttggtgattaatctgggattttgtcgtgacgtcagtagaaaacagcaagggccacggaggctgatatgttaagtatttttaaacccgccgcgcataaagcgcgtttgccagcagcggagattgacccgctatatcgccgattacgctggcagatttttattggcatcttttttggttatgccgcctactatttggttcgtaagaactttgccctggcgatgccttatcttatcgagcaggggttctctcgtggcgacctcggcttcgccctttccggtatctccatcgcctatggattttcgaaattcatcatgggatcggtctctgaccgctcgaatccgcgcattttcctgccggctggcttgatcctagccgcgctggtgatgctggtgatgggcttcgtgccgtgggcgacgtccagcatcatgataatgttcgtgctgctgttcctctgcggctggttccaggggatgggctggccgccgtgcggccggaccatggtgcactggtggtcgcagaaagagcgcggtgggattgtctcggtgtggaactgcgcgcataacgtcggcggcggcattccgccgctgctgttcctgttagggatggcgtggtttaacgactggcacgcggcgctgtatatgccggcattcggcgccattctgctggcgattttcgcctttgcgatgatgcgcgacaccccgcagtcctgcggtctgccgccgattgaagaatataaaaacgactacccggacgattacagcgaaaagcacgaagaagagctgacggcgaagcagatctttatgcaatacattctgccgaacaagctgctgtggtacatcgctatcgctaacgtcttcgtttatctgctgcgctacggcattctcgactggtcgccgacctacctgaaagaagttaaacacttcgcgctggataaatcctcctgggcctatttcctgtacgagtacgcggggatcccgggcacgctgctgtgcggctggatgtcggacaaagtgtttaaaggcaaccgcggcgccaccggcgtgttctttatgaccctggtgaccatcgccactgtcgtttactggctgaacccgccgggtaatccgggcgtcgatatggcctgtatgatcatcattggcttcctgatctacggcccggtgatgctgattggtctgcatgccctcgagctggcgccgaaaaaagccgccgggaccgccgcgggcttcaccggcctgttcggctatcttggcggttccgtggccgcgagcgctatcgtcggctacaccgtcgatttcttcggctgggacggcggctttatggtgatgatcggcggcagcgtgctggcggttatcctgctggttatcgtgatgctcggtgaacgtcgccatcaccaacagctgaaacaagcctaaggagcggcgatgaaaatgaaacttaccgcgctgatgagcggaatgattctgtccagttcggcgctgtgcttcagtgcgacagcggctgataaaatggtcatcgcccaccgcggcgccagcgggtatctgccggaacataccctgccggcgaaagcgatggcttacgctcagggggcggattaccttgagcaagacctggtgatgaccaaagacgaccggctggtggtgttacacgaccactatctcgatcgggtgactgacgttgcgcagcgtttcccgcagcgagcgcgtcaagatggccgtttctacgccatcgactttaccctggccgagattaaatcgctgaagtttaccgaaggttttgagccgaaaaatggtaagaacgtgcaaacctatcccggtcgattcccgatgggcaaatccgatttcagtattcatacctttgaagaggagattgagtttgtccaggggctgaaccattccaccggcaaaaacatcggtatctacccggaaatcaaagcgccgtggttccaccaccaggaaggcaaagatattgccgccagcacattgaaggtgctgaaggaatatggctataccagcaagcaggataaggtttatctgcagtgctttgacgccaacgagctcaaacgcattaaaaatgagctggagccgaagatggggatggatctcaatctggtgcagctcatcgcctataccgactggaatgaaacccagcagaaacaggccgatggtaagtgggtgaactacagctatgactggatgttcaagccaggggcgatggcgcagattgcgcagtacgcggacggcatcggcccggattaccatatgctggtagcggaaggctcgaagccgggggcggtgaagctgacggcgatggtgaaagaggcgcacgccagccatctgcaggtgcatccgtacaccgtgcgcgcggatcagttgccggagtacgcgactaacgttaatcagctctatgacgtgctgtataaccaggcgggcgtcgacggcttatttaccgatttcccggataaagcggtgcagttcctggacgcgaaacactaaaaagccgggtggcggctacgccttacccggcgtacgaactgctgttttgttgacactgttctcggcgtgcaacgatttcgacccgggaataacgtttgttctatgttatttcctggaagattgcgctcccgatatttcttctgcgttatgcctttcatagcgcagggagcgcacagggggaggccagtcgccgcctccccctgtacccccgggctccggccagcaaaatcgccgctgcgcgttcccttcgacttatccctgcaggcttcgggtcgggccgaggtagcgtccatgcaaaacacggccctcagcccgcatccatgcgggctgccccggccttccgggaacgtctcagcgattttgaggccgtcaacaccggcagtttcagcagcccagggcggcagtgcgtaaacggccggtcctggaacagtaggtcaggtaagcgtagcgccacctgacaagactacatctcgatctcaatatcgcctttcgcccggcagcagcagggcaaaatttctcccggctggataaaggccagcggctcggtcagccagtcaacctggccggagaccaggcgagtgcggcaggagccgcagtagccttcgcggcactgatattcgacgtcgatattatgcgactccagcgccgccagcagggaagggtgttcatcctgacactcaaggcgagtgtcagagattttcaggaagatccgcttcattacagctggaagttactcagatcgtcggcatcgacttcagaatcgatctggccgacgagataagaactgacttccacttcctgcggcgccacctgaacgttgtcggagaccagccaggtgttgatccatgggatcgggttggagcgggtctggaacggcagatcgaggcccaccgcctgcatgcggatattggtgatgtactcgacgtactggcagagaatgtctttattcaggccgatcatcgagccgtcgcggaacaggtagtccgcccactctttctcctgctgcgccgccagcacgaacaggtcatagcactcctgcttgcactcttcggcgatttccgccatttccggatcgtcgctgccggagcgcagcaggttcagcatatgctgggtgccggtcaggtgcagcgcttcatcgcgggcgatcaggcggataattttggcgttgccttccatcagtttgcgttcggcaaaggcgaaggagcaggcgaagctgacgtagaagcggatcgcttccagggcattaacgctcatcaggcacagatagagtttctttttcagctcgcgcagattcacggtcacggtcttgccgttgacggtgtgggtgccttcgcccagcagatgccagtagctggtcatctcgatcagcgaatcgtaatagtgagagatgccttccgcacgtttctggatctgctcgttggtgacgatgtcgtcgaacacggtcgccgggtcgttgacgatgttgcggatgatgtgagtgtacgaacgcgagtgaatggtctcggagaaggcccaggtttctacccaggtctccagctccgggatggagatcagcggcagcaacgccacattcgggctacggccctggatggagtcgagcagcgtctggtacttcaggttgctgatgaaaatatgtttttcatgttccggcagcgcctggtagtcgatgcgatcgcgggaaacgtcaacctcttccgggcgccagaagaaggagagctgcttttcaatcagcttttcaaagatgtcgtatttttgctgatcgtagcgggccacgttaaccggctggccaaaaaacatgggttccagcagctgatcgtttttcgtctgtgaaaaagtggtgtatgccattgaagtgagtcctgttgaactgtattgcccggcaggaatgggttggccgggcctacacaaacgtaggccgggtaagcgtagcgttacccggcaaaaataccttagatcttacaagcgccgctttcgcagccgtcgtcctggatggacggggccaggtcatcctgggcgtcttcagcgccatcacgggtgttgtgatagtacagcgttttgacgccgaatttataggcgttgagcaggtctttgagcaactgctgcatcggcacttttccggacgggaagcgcgtcggatcgtagttagtgttggcagagatcgactggtcgataaacttctgcatgatacccaccagctgcagataaccgtcgttgttcggcatctcccacagcagctcgtaggcgttctgcaggttttcgtaatccggcaccacctggcgcaggataccgtccttggacgctttgatactcacgtggccgcgcggcggctcaatgccgttggtggcgttggagatctgcgacgaggtctcggacggcatcagcgcggagagcgtggagttgcgcaggccgtgagttttaatggattcgcgcaatgcttcccagtcgtagtgcaggggttcgctgacgatgccgtccagatctttcttataggtatcgatcggcaggatgccctgcgcataggtggtttcgttgaaccacgggcaggcgccttgctcgatagccagctcgttagaggccttcagcagatagtactgaatcgcttcgaacgttttgtgcgtcaggttgttggcgctgccgtcggagtagcgtttgccatgcttcgccagatagtaagcgaagttgatcacgccgatacccagcgtacgacgccccatcgcaccgcgtttagccgccggaatggggtaatcctgatagtcgagcagcgcatccagagcacgcaccgccagcaccgccagctcttccagctcgtcgaggctgtcgatagccccgaggttgaaggccgacagggtgcacagcgcgatttcgccgttttcgtcgttgacatcttccagcggtttggtcggcagagcaatctccaggcacaggttagactgacgcaccggggcgactaccggatcgaacgggctgtgggtgttacagtggtcgacgttctggatatagatgcggccggtagaggcgcgctcctgcatcatcagcgagaacagctcaacggctttaatacgctgcttacgaatgctatcgtcctgctcgtactgggtgtacaggcgctcaaactcgtcctgatcggcgaagaaggcgtcatacaggcccgggacgtcggaagggctgaacagggtaatatcgccgcccttcagcagacgggtgtacatcagcttgttgatctgtaccccgtagtccatgtgacgaacgcggttggcgtcggtaccacggttgtttttcagcaccagcaggctttccacttccagatgccacattgggtagaagagggttgccgcgccgccgcgcacgccgccctgcgagcaggatttcaccgcggtctggaaatgcttgtagaacggaatgcagccggtgtggaaggcttcgccgccgcggatcgggctgcccagcgcgcgaatgcgcccggcgttgatgccgatgccggcgcgctgggaaacgtatttcacaatcgcgctggaggtggcgttgatggaatccaggctgtcgccgcactcgatcagcacgcaggagctgaactgacgggttggggtacgcacgccggacatgatcggcgtcggcagcgagattttaaaggtggacaccgcgtcgtagaaacgcttgatatagtccagacgcgtttcgcgcggatagttcgagaacaggcaagcggcgaccagaatatagaggaactgcgcgctctcataaatttcgccggtgacgcggttttgtaccagatacttgccttccagctgcttaacggctgcgtaggagaagttcatgtcgcgccagtggtcgaggaaaccgtccatctgctggaactcttcttccgtgtagtcttccagcagatgatgatcgtatttacctttctcgaccatcttcaccacgtgatcgtagagcgctggcggctcaaactgaccgaaggcttttttacgcaaatggaaaatcgccagacgcgcggcgaggtactggtaatccggtgcgtcgcgggagatcagatccgcagcggctttaataatggtttcgtggatgtccgcggttttgatgccgtcatagaactggatatgggagcgcagctctacctgggaaatcgaaacgttattcagtccttctgccgcccaatccagtacgcgatggattttgtcgagattgatgcgctcggtggtcccgtcgcgctttgtcaccagcagactctgattcatgtggattttacctgtccgtgaaagaaaatatcccccgtttatccacagaaggccgttgtgactaactctgtggataaatactatatgtagggggttgtcgataaaagaaacgctatatggtgagtattttagtaaggaatcttttgagtacaagggttgattttgacgttaaattgaggttgcggaagggtaataatccgcaagtccacgtcgcataaggcctggagaagaagtcaataaaacagaaaaaaaaatgaaaatttgatcgagtgctgatttcttcatcggaagaaataatcacgcggcttgatgccgcgcaatcatcataagcggaggtgctgacctcagtcctgtttggcggttgtatgcaacatatagttaacatcaacccccggcgctaacttgaaggtattggtcagcggattgtaatgcagaccgatgatatgctgctctttcagagtagtctgatctacccagcccagcagctcggccggcttgataaacttcttcacatcatgagtgcctttgggcaccatcttcatgacatattccgccccgactaccgccatcagccaggccttgccgttgcggttgatggtggagaagaagacctggccgccgggcttcactaaccgcgcgcaggcgtgcaccaccgactgcgggtcggggacgtgctccagcatctccatgcaggtcacgacgtcatactgctgcgggtgcttcgcggcatgttcctcaactgtttcctgaacatagtctacctgaataccgctctccagggcgtgcagcctggcgacctgcagcggttcggcccccatgtccagcccggtgaccgtcgcgccttcgcgcgccatgctctcggcgaggatgccgccgccgcagccgacatcgaggacttttttaccgaacaggccgccggagcgttcggcaatatagcccagccgcagcgggttgatgcggtggagcggtttgaactcgccctccagatcccaccagcgcgaggcgacggcttcgaatttggcgatttcagcatgatcgacgttaggggctaccgacgttttttcggcattcatgggcgcttttactccttttctgttcagacctgcgagtatatcagcagcgcgccatgaataaaccgtattgctttacctctattagcgcggctgtgttataatttgcgacctttgaatccgggatacagtagagggatagcggttagatgagcgaccttgcgagagaaattacaccggtcaacattgaggaagagcttaagaactcttatctggattatgcgatgtcggtcattgttggccgtgcgctgccggatgtccgagatggcctgaagccggtacaccgtcgcgtactttacgccatgaacgtattgggcaatgactggaacaaagcctataaaaaatcagcccgtgtcgttggtgacgtaatcggtaaataccacccgcacggcgactccgcggtatacgacaccatcgtgcgtatggcgcagccgttctcgctgcgttacatgctggtggacggccagggtaactttggttccatcgacggcgactccgccgcggcgatgcgttataccgaaattcgtctggcgaaaatcgctcatgagctgatggccgatcttgaaaaagagacggtcgatttcgtcgacaactatgacggtacggagcgtattccggacgtcatgccgaccaaaattcctaacctgctggtgaacggcgcctccgggatcgccgtagggatggccaccaacataccgccgcataacctgacggaagtgattaacggctgtctggcgtatgttgacgatgaagacatcagcattgaagggctgatggcgcatattcctggccctgatttcccgaccgccgccattatcaatggccgtcgcggcatcgaagaggcctatcgcaccggtcgcggtaaagtgtacatccgcgcgcgcgcggaagtggaagtggacgcgaaatccggccgcgaaaccatcatcgtgcacgaaattccgtatcaggtgaacaaagcgcgcctgatcgagaaaatcgccgagctggtcaaagaaaaacgcgtggaaggcatcagcgcgctgcgtgacgagtctgataaagacgggatgcgcatcgtgattgaagtgaagcgcgatgcggtaggggaagtggtgcttaacaacctctattcccagacccagctgcaggtctccttcggcatcaacatggtagctctgcaccatggtcagccgaagatcatgaacctgaaggacatcatcgccgcgtttgtacgccaccgccgtgaagtggtgacccgtcgtacgattttcgaactgcgcaaagcgcgcgaccgggcgcatatcctcgaagcgctggccgttgcgctggccaacatcgacccgattatcgaactgatccgtcgcgcgccgaccccggcagaagcgaaaacggcgctggttgcccaggcgtgggatctcggtaacgtcgcggcgatgctggagcgcgccggggatgacgccgcgcgtccggaatggctggagccagagttcggcgtgcgcgacggtaaatactatctgaccgagcagcaggctcaggcgattctggatctgcgtctgcagaaactgaccggccttgagcatgaaaaactgctcgacgaatataaagagctgctggagcagatcgcggagctgctgcacattctcggcagcgccgaccgtctgatggaagtgattcgcgaagagctggagctgatccgcgatcagttcggcgacgaacgtcgtaccgaaatcaccgccaacagcgctgatattaacatcgaagatctgatcaaccaggaagatgtggtggtcaccctgtcgcatcaggggtatgtgaagtatcagccgctgaccgactacgaagcacagcgtcgtggcggtaaaggcaaatcggcagcgcgcattaaagaagaagactttatcgaccgcctgctggtggctaacacccatgacaccatcctctgcttctcaagccgcggccgtctgtactggatgaaggtctatcagctgccggaagccagccgcggcgcgcgcggtcggccgatcgtcaacctgctgccgctggaagccgatgagcgcatcaccgccatcctgccggtccgcgagtacgaagagggcgtcaacgtctttatggcgaccgccagcggtaccgtgaagaaaaccgcgctgaccgagttcagccgtccgcgttccgccggtatcatcgcggtcaacctgaacgaaggcgatgagctgatcggcgtcgatctgacctctggtcaggatgaagtgatgctgttctccgcggccggtaaggttgtacgcttcaaggaagacgccgttcgcgccatgggccgtaccgccaccggcgtacgcggtattaagcttgcggaaaacgacagcgtcgtctcgctgattattccacgcggcgaaggcgcgatcctgacggtgacgcaaaacggttacggtaaacgtaccgcggcggcggagtatccgaccaagtcgcgtgccacccagggcgttatttcgatcaaagtcaccgagcgtaacggttccgtggtcggcgccgtgcaggtggatgactgcgatcagatcatgatgatcaccgacgccgggacgctggtgcgtacccgcgtttccgaagtgagcatcgtgggccgtaacacccagggcgtgatcctcatccgcaccgcggaagatgaaaacgtggtgggtctgcagcgcgtggctgagccggtggatgatgaagagctggatgccatcgatggtagcgcggcggaaggcgatgacgatatcgccccggaagcggataccgatgacgacatcgccgaagacgaagaataatcgtccgaggtaaatgttctggaagggccgggtattttcccggccctttttgcattaacattgcggcaaagccggtttaccgctaccttaaccgcattctgttgagtccctgacggccgagcatcgccacattgaaatatcttgcctcttttcatacaaccctgaaggtttcacgttatctgttcagagcgctggcggtattgctgtggctgcttattgcgtttgtctctgtgttttatatcgtcaacgcgctgcacgagcgggaagccgaaatccatcaggagcttaatctcaacgccgatcaggcccagcgctatatccagcgtaccgcggatgtaatgaaagagctgaagtatgtcgccggtaatcgcttgtcggcaggggacgcggtagcgcaagggcaaaacggcgatatggcggtgcccaactttgaacccctgtaccccgattccgactgcagcgcgatgagcgccacctggcgtaattcgctgcagtcgctggcatggtttatgcgctactggcgggataattttactgccgcctacgaccttaaccgcatctttctcatcggcagcgataacctctgcatggccaactttggcctgcgggacgtgccgattgagcgcgatcaggcgctgaaagtcctgcatcagcgcatagagcaatatcgcaacgcgccgcaaaacgagcgcggcaacaacctgttctggataagccagggcgttcgccccggggtgggctatttttacgccctgacgccggtctatatggccaatcgcctgcaggcgatgctgggcgtggagcagaccatccgcatggaaagcttctttacgccgggcagcctgccgatgagcgtgacgatctttgacgataacggccagccgctgatttcgctggccggtgcggaaggtaaaatccagagcgaagcgaagtggatgcaggagcggatgtggtttggctacagttcaggtttccgcgagctggtgctgaaaaaaagcctctctccgtcctccctgagcatcgtctattccgtctcggtagatcaggtgctggagcggatccgtatgctgatcatcaatgctatcgttcttaatatcctcagcggcgcgatgctgttcgcgctggcgcggatgtatgagcggcgcatttttatccccgcggagaatgacgcccagcgcctggaagagcacgagcagttcaaccgcaaaattgtggcttctgccccggtagggatctgtattctgcgcactgccgacgggaccaatattctcagtaatgaactggcgcacaactacctgaacatgctgacccacgaggaccgccagcggctgacgcagatcatctgcggccagcaggtcaattttgtcgacgtgctgaccagcaaccataccaacctgcagattagctttgttcattcacgctatcgcaatgaaaacgtcgccatttgcgtgctggtggacgtttccgcccgcgtgaaaatggaggagtcgctgcaggagatggcccaggcggcggagcaggccagccagtcgaaatcgatgttcctggcgacggttagccatgagctgcgtaccccgctgtatggcatcatcggtaacctcgatctgctgcagaccaaagcgttgccgaaaggcgtcgatcgccttgtgacggcgatgaacaactcctccagcctgctgctgaaaatcatcagcgatattcttgatttctcgaaaatcgagtccgagcagttgaagatcgagccgcgggagttctctccgcgcgaagtcatgaaccatatctccgctaactatctgccgttggtggtgcgcaagcagctgggcctgtactgctttatcgagccggacgttccggaacaaatgtccggcgacccgatgcgcctgcagcaggtgatctcaaatctgctcagcaatgcgataaagttcaccgataccggctgtattgtcctgcacgtccagtgcgcgggggattatctgcagattagcgttcgcgacaccggagaggggatcccggcgaaagaggtattgcgcctcttcgatcctttcttccaggtggggaccggcgtgcagcgcaattttcagggcaccggccttggcctggcgatctgtgaaaaactgatcagcatgatggatggcgatattgctgtcgaaaccgagccggggatgggtagccgctttaccatccgtattcctctgtatggcgtgcagaatacctcaccggtgagcagagacggtttcgctggcaagacctgctggctggcgattcataacacttcgctggcgatgttcgtcacctcgctgctcagctaccacggcctgacggtccgccgccatgccggcgaaacgccggacgccgaggatgtcttactcactgacgatgaggcgctgagcggatggcagggaagggccatggtcatcttctgtcgccgtcatatcggtattccgcaggagcggtccgccggcgaatggctgcacagcgtgacgactccccacgaactgctgccgctgctggggcgtattttccatgttgcgctcgccagtgcggaaaatagcccggcgctgatggccccggaggcgcaggccggcaataatgacgacatgatgatcctcgtggtcgacgatcacccgatcaaccgccgcctgctggcggatcagctgggttcgctcggctaccagtgcgtgaccgcgaacgacgggatcgacgcgctcaacgtcctcagcaagcagcacatcgatatcgtgctcagcgacgtcaacatgcctaatatggatggttatcgcctgacgcagcgcattcgtcagcttggcctgacgctgccggtgattggcgtaacggccaatgccctggcggaagagaagcagcgctgtctggaatcggggatggacagttgtctgtccaagccggtcaccctcgacgtactgaagcaaacgctgacggtatatgcggcgcgggtgcgtaaagggcgggaataatggggagctccgtctcgccggggcgagacggagagggcgaagagattactctttgtccgtcgcgctcagcgagacggaagagaggtagttcagcaaggcgatgtcgttttcgacgcccagcttcatcatcgccgatttcttctggctgctgatggttttaatgctgcgattaagctttttggcgatctcggttaccaggaaaccttcggcgaacaggcgcagcacttcgctctctttcggcgacagacgtttatcgccatagccgctggcgctgattttttccagcaggcgagagacgctttccggggtgaatttcttccctttctgcagcgcggccagcgcttttggcaggtcggtcggcgccccctgcttgaggacgatcccttcgatatccagatccagcaccgcgctgaggatcgccggattgttgttcatggtcagaacaatgatcgacagatccgggaagtggcgcttgatgtatttaatcagcgtgatcccgtcgccgtatttgtcaccgggcatggacagatcggtgatcagcacatgggcgtccagcttcggaagattgttgataagggccgtggagtcttcaaactcgccaacgacgttcacccactcaatttgctcaagtgacttacgaataccgaacagtacgatcggatggtcatcggcaataattacgttcatagtgttcatgtataaggctaccttctacagcaagctcttgacgtaagcgtcaatgtcgctgatatatttttctatgccttgcgcatccttttcgcgaatcagatgctcaagcgtttcacataactgcttgccgggtatcagattaagcatagcaaatgcccctttgaggcggtgggcggtttgcgccagagcagcaaaatcgcccgcttcgatttcagtatacaatctctgaacatcatccggtaccgtatcggcaaacagtgcgtaatagccgctggcatggagttcggcgttactctcgtttcctgaggtgacgggctgaaccgcctcctccgccagctgctgctcaataagctgcaggatagcctcctgcatcgccgtgctaatattaaagttgacccgcagttggcccgggccgatcttgcgtatcccgacctcatcatcgcttaaaagcaagcctgaagcagtaagattagacggattatccgttaaataaagatcaaaggcttgactggtcgcccgatcgtccggtgtgatgcaggacgctccccagctctccagctggcgagtgacaatccgccgcacttcgctggaagtcacatccagcaggacgataacgtcatccagcaaatgctctcccgcctctggcgcctcttcgctagccggcattttcagatgcagggtatagcgcgtccccagcgactcccgggctttaatggtcaattgcccgcccagcttgcgcgtcatgcggtcgcatagccagaaggtaagggcgtttgctttgccgtacaggtcgctctgggtctcgttgagatacgggaagtgcatattgtcgatctcgtttgccgagacgccgttgccggtatccagaatgcggaaggtcaggcgatcgctggccgactcatcctgacagacgtcgagggtgatcttgccgataggcgtggtggtcactgaatattggattaacagcaccagcgtgcgccgcagagcttcacggtcgccatagcgctgctcgccggccgggagcgcattgttgatgagcagctgcagacccttgcgtttcatcgccggcagcacttccggcacgacgtcgtcaataagctcctgcaccgagaacaacgtctggttggttttccaggcatcgctttccagcagattggcgagctgaatgtcatcgatgagtttgaccagctcatcggcatgctgggccagcgtccgattctctgtactactgagcgccgccgcctctgccgccagcgtcagcgcgggctgcttcagggcgctgccgatgtgctgcataaaggcggcccgtccctgctggtttttctcatacaagcgctgggcctgcttgagctttttattgaccagcacttcgcggtcctgatcacggatgatcaggatctgggtgcgcggcgctacctggctgcgatactggcggatttcatactgctcattattgacggtggcctgaattaccccctgatgctggtccgccatattagtgatgttctgcagattcaggtgcggaagcagatggtcggcaattggattgctgataaccgttcggttggcttcctgatcgtgaacgagcagccccagcggcagcagagaaacaatctcttcgttaatggcgcgcagcagacgcagttcgctgttggcggcggaggggagcccggcgccagacgaatggctgcgtcctttatagtggcgaaaggtggtaaaaccaaacagcgccagcgccagcagaccaatgttgagcagcagcggcagaagaatgttctgcatggactccagcagcatggtgctcattggtaccgtccacagcaactgcataccggtggtgctgatgtcggtggcgatgtcaatctgcatgccgttaaaggtgatcccaatatgatcggcgctctctttatccggcgtggtggcgagattttgcgacgggtcaggctcgatacggaagctgtcgatagtcatgccgggcgggatcagatcgttaatcggcagatcgaaggcgaccaccgtggcaaggtgtccgggctggttgaaggtggtgcgtaacgtaaaatagtgcgcgttctgccaggcgagatggcgcaacggcgagaacgtctcgcgctcatcaagggtattagcctgcagcagcatttccgcgcgccgcgactccacgacgctgctgatcgttgactctttgaagctcgaagagaggtccttcaacggcagagtggagaccaggatcagactattgtccaggccgttgagatagtacatcgaccacggaatggtctccgcgccccacaaaatatcgagataatcggacattttctgcgtcatttcgagggtggagctgtcatgggagccaaagatcagggcttcggttttacgccggggtttctccaggtagtaaacgtcctgttttaaacgcgtctcctgcagaccgccgcttgcggtgttgactgaggtggcggcgatattgtcgtagatctgccaggtggcatagcgccaggcgtcaatgcgctggtgcagagcgtgggagacatcaaccacctgatagcttttctccttcagccaggcattgacggcgctttggatcatcacccccattgtcgccagcaggacaataaccatcaaaatgaagaagcggctgatgttgccggggatcagggagaattttttcggggtcatcttgtggctgaacgactcatcattgtttgtaaacaggatgtagcgccagagtaactggcaacaaagcagatgctgctggcagtataaaggctaatggcgtaaatccatactacagattggcgccagcggtgcgatgccgcccaggaattatcttagaaacgaagcgtaaatgaaaccgcgccgggaaggttaaccggcgacgatattgacggaaacaaaagggaagaatcgcacgaaataacaagacattggaagaatatgcaccactgatggcctaattgattgattaatagtcgttagggaatcattagccgtagcacagataaattaaagttgtgtaaagaagggtaaaaaaaccggatgcgaggcatccggttgaaataggggtaaacagacattcagaactgaatgacggtaataaataaagttaatgatgatagcgactcttattttagccaccaatgatcattttgttttaccattcagtgctatagatatgctgtcgtctatcgctttgattataaaaggttaaatattttttttgatgattagtgcgtatttccctgaccattttgcggtgaaaaaagttccgctaaatttacaaattgaaacatcttgtgggaactttgaaacatcttagaagttttagtatcatattcttgttggattattctgcattttgcagcacaatgaaatagccgactgattagaagggtaatcagtaagcagtggcataataaaaggcatataacaaacagagggttaataacatgaaagttaaagtactgtccctcctggtaccggctctgctggtagcaggcgcagcaaatgcggctgaaatttataacaaagacggcaacaaattagacctgtacggtaaaattgacggtctgcactacttctctgacgacaagagcgtcgacggcgaccagacctacatgcgtgtaggcgtgaaaggcgaaacccagatcaacgaccagctgaccggttacggccagtgggaatacaacgttcaggcgaacaacactgaaagctccagcgatcaggcatggactcgtctggcattcgcaggcctgaaatttggcgacgcgggctctttcgactacggtcgtaactacggcgtagtatacgacgtaacgtcctggaccgacgttctgccggaattcggcggcgacacctacggttctgacaacttcctgcagtcccgtgctaacggcgttgcaacctaccgtaactctgatttcttcggtctggttgacggcctgaactttgctctgcagtatcagggtaaaaacggcagcgtcagcggcgaaggcgctctgtctcctaccaacaacggtcgtaccgccttgaaacagaacggcgacggttacggtacttctctgacctatgacatctatgatggcatcagcgctggtttcgcatactctaactccaaacgtcttggcgaccagaacagcaagctggcactgggtcgtggcgacaacgctgaaacctacaccggcggtctgaaatacgacgcgaacaacatctacctggccactcagtacacccagacctacaacgcgacccgcgccggttccctgggctttgctaacaaagcgcagaacttcgaagtggttgctcagtaccagttcgacttcggtctgcgtccgtccgtggcttacctgcagtctaaaggtaaggatctggaaggctacggcgaccaggacatcctgaaatatgttgacgttggcgcgacctactacttcaacaaaaacatgtccacctatgttgactacaaaatcaacctgctggacgacaatagcttcacccacaacgccggtatctctaccgacgacgtggttgcactgggcctggtttaccagttctaagttgcaagctgcataacaaaaaggcgcctctggcgcctttttttatgtccggtttaacctcgctggtatactcttgtcgccctggtaagaggagcctcgattaatggatatgactttctttcgcgccgcgctgctgggcgcctgcgttctgctctctggctgcgattcagctaccactcctgcgacccccaccgcgacggccaccgtgctggatggcaaaacgatgggcaccttctggcgggtcagcgtcattggcgtggatgaggcaaaggccctggcgttgcgcgccaaggttcaggcccagctggacgccgacgatcgcctgctgtcgacctggaaaaacgactcagcgctgatgcgcttcaatcatgccgccactaccgaaccctggccggtgagcgaagcgatggcggatatcgtcaccctgtcgctgcggattggcgccaaaacgcacggcgcgatggatattaccgtggggccgctggtcaacctgtggggctttggcccggataaacagccggtcaccaccccggatgccgaggcgatagccgcggcgaaggcgcgcaccggcctgcagcatctgcaggttattaatcagagcggcaggcagttcctgcaaaaagatattcccgatctgtttgtcgacctctccaccgtgggggaaggctatgccgccgaccacctcgcgcggttgatggagcaggaggggatctcccgctatctggtgtcggtgggcggggcgctggtcagccgtgggatgaacggcgaaggcaagccctggcgggtagcgatccagaaaccgaccgaccgcgaaaacgccgttcaggcgattgtcgacatcaatggtcacggcatcagcacctccggcagctatcgcaactactatgaactcgatggcaaacgcatctcgcacgttatcgatccgcagaccgggcagccgataacccataagctggtctccgtgaccgtcattgcgccaacggcgctggaggcggacggctgggataccggactgatggtgctggggccggaaaaagcgcagcaggtggtgcgcgaggaggggctggcggtctacatgatcgttaaagaaggagagggttttaaaacctggatgtcgccgcagttccgcactttccttgtcggcgagaaaaattaaaaagcaagattgcgggttttttactgcgggctttaccacagactgagggtacacttacagctggagacccgtcatgaaaccgatagttgccgataccgatgatcgccgctggcaggcggtctgcgaacgtgatacccgggccgatggtcagttcgtctttgcggtactgaccaccggcatctgctgtcgtccctcctgccgctcgcggcgcgcgcggcgagaaaacgtacgcttttttgccgacgtcgccgccgccgtggcggcgggattccgcccctgcaaacgctgccaaccggataaagactacccgcagcagcaaagggtcgacaaagtggcgcaggcctgtcggctgctggagcaggacgcgcccctgaccctcgaggcgctggcaggccagctggcgatgagcccgtttcatttccaccgtttatttaaatccgtcaccggcatgacccctaaagcctggcaacaagcgtggcgggcgcagcgcctgcgggaagcgctggagcaggggataccggtgacccgcgccgcgctggcggctggttttcccgacagcagcagctattatcgccaggccgacgcagcgttagggatgaccgccagccagtttcgccgcggcggcgccgccaccgtggtaacctggaccacgggcgactgcgcgctgggtcgttgcctggtggcgcagagcgagcgcggcgtctgcgcggtgctgccgggtgataacgatgcggcattgctcgacgacctgcgccggcgctttcccaatgccgagctgcgtgaaggcgaccctgatttttgtcagcagatggccgagattttcgcccacctcgacgacagccggcggccggtatcgctgccgctggatctgcagggcactgcgtttcagctgcaggtctggcaggcgctgcggcagatcccggtgggcgagacccgcagctaccgccaggtggcagagcatattggccagccgcgggcggtaagagccgtggccggcgcctgcgcggcgaattcgctggcggtgattgttccctgccaccgggtggtgcgtgaagatggcgccctgtccggttatcgctggggaacggcgcgaaaagcgcagctgctggcgcgcgaggcccaacatgaggaggagtaatgctcgatctgtttagcgatatcccaccgtggcaggagccgctggcccccggcgcggtggtgctgcggcgatttgcccgcgaacgcgccccggcgctgctgcaggcgatagccgacgtcgccagtcagtcgccgtttcgccagatggtcacgccgggcgggtacaccatgtcggtcgccatgaccaactgcggcgcgctgggctggactaccgatcgccacggctatttgtacgccccggtcgacccggtaaccgatcaaacctggccgccgatgcctgccgtatttcatgaactggcgctggcggcggccgccgccggcggctatccggagttttcccccgacgcctgtttgattaaccgctattgtcctggcgcaaaactgtcgttgcatcaggataaagatgaacaggatctgcgggcgccgattgtctcggtctcgctgggcttgccggccatctttcagtttggcggcttgcaacgcagcgacccgctgcagcggctgctgctggagcatggcgatgtggtggtctggggcggcgagtcgcgcctgttttatcatggcattcagccgctgaaagcggggcatcatccggaaacgggcgattgtcgttacaatctcaccttccgacaggcgggtggtcgccagtattaaaataagaattattcttgatgtcatcggcgagccgtttaaactgctggctgttttgcttttgcggatagcctgttatggaacttctctctctcgtctggcgccagtatcgctggccgtttctgggcgttattgctctcagcctgctcagcgccgcgctgggtatcggcttaatcgctttcattaacctgcgtctgattaccgctgtcgatacctcgctgcgggtcctgccggagtttcttggtctgctggggctgctgatggcggtgaccctgggttcgcagctggcgctaaccaccctcggccaccattttgtctatcgtctgcgcggtgagtttgttaaacgcatcctcgatacccagattgaacaagtagagaagatcggcagcgcgtcgctgcttgccgggctgaccagcgatatccgcaatatcaccatcgcctttgtgcgcctgccggagctggtgcaggggatcattctcaccttcggctccgcggcctacctcgcctggctgtcaggaaaaatgatgctggtgacggtgctgtggatggcgctcaccatctggggcggctttgtgctggtctcgcgggtgtacaaacatatggccagcctgcgcgaaacggaagataaactgtatcacgactatcagacggtgctggaggggcgtaaagagctgaccctcaaccgcgagcgcgcggagtatgtgtttaaccagctctacctcccggacgccagggagtaccggcaccatatcgttcgcgccgataccttccacctcagcgcggtcaactggtcgaatattatgatgcttggcgccatcgggctggtgttctggatggccaacagcctcggctgggccgataccgccgtggcggcgacctattccctgacgctgctgtttctgcgcacgccgctgctctccgccgtcggcgcgctgcccacgctgctcagcgcccaggtggcgtttaacaagcttcgtcagttctccctcgccccgtaccgggccgactttccccggccgcaggcgcatcctgactggcagacgctggagctgcgcgatgtcaccttccattatccggaccagcgctttgcggtagggccgcttaatctgacgctgaagcgcggcgagctggtgtttttgataggcggcaacggcagcggcaagtcaacgctggcgatgctcctgaccggcctgtaccagccaatatccggtcagatcctcgtcgacggccagccgctggcggcggagaggccagaggagtaccgcaaactgttttccgcagtgtttaccgacgtctggctgtttgaccgcctgctcgggccgcagggcgaggaggccgatccggcgctggtggcgacatggctggagcgtctgcaaatggctcacaagctgcagctggagaacggaaaaatcgccgacctgcggctgtcgaaagggcagaagaagcgcgtggcgctcctgctggcgctggccgagtcccgggacatcattctgctggatgaatgggcggcggatcaggatccgcatttccgccgcgagttctaccaggtcctgctgccgctgatgcagcagatgggcaaaaccgtgttcgccatcagccatgacgatcactacttccagcacgccgatcgtctgctggagatgcgcgccggccagctcgccgaacttaccggcgaagagcgggaacaggcttcccgcgatgcggtggcccgtacggcctgacaatcgccacgcgcccggggaaaagcccgggcgccgctgaaattttcagcgtctacatcgctgacggttattatttccccctcctcgcgctatgcttaaggcttccggcccgcaggccggctcaccattctcaaaaggattgcccgatcgatgtccgttttgcataaaaaaagcgcccgcttgcgtgacgaagagcgcgcccgtctgatttggctcttgagcaccgataaagcggtgacttccgcgctgctgggcaaactgacgctggctgaacgatatgatgaagggacgctggccgatgacctggccgaagtggaaatgctggtctcgcatctgccgccgccggatctcgccgatgcgctggaagcgcttccctatgacgcccgcaccgcgctatggtgcctggtgcccgacgataaacgcggcgaagtgctgctggaggcctcagagaacgtctggggcgacctgatcgacaagatgagcgaccccgagctgctgcaggccatgcagccgctggatatcgatgaacaggtttacctgctgcagcatctgccgcgcaacctgaccggacggctgctggcgaccctgccggccgagaagcgcgcccgtattcgccagattatgcgctacgccgacaacagcgtcgggtcgatcatggagtttgaggtcattacggtgcgaccggaggccaccctggcggcggtgcagcgctatctgcggcgtctcggtaaaatgccggaaaacaccgataagctgttcgttaccacccgtaacaagctgctgctcggcgagctggagctgcagaccattctgctcaatgatgcgcagaagcgggtgggggaggtgatggagggcgacccggtcacctttcagccgcacgaagaggcggagaaggtggcgcgcaccttcgaacgtgatgacttgctcagcgccgccgtcattgatgccgacggcaagctgatcgggcgcctgaccatcgatgagatcgtcgatgtggtttatgaagaaaccgataacgatctgcggcggatgggcggcctgagcgatgaagaggatgtcttcgccccggtcagcaaagcggtgaaaacccgctgggcatggctggcggtcaatctgtgtacggcgtttattgcttcccgggtcatcgacggcttcgaacacaccatttcacagctggtggcgctggcctcgctgatgccgatcgtcgccgggattggcggcaacaccggcaaccagacgatcaccatgatcgtccgggcgatggcgctgcagcagatccagcccggcagctttacctttctgatcctgcgtgaaatgggtgttgcgctgattaatggcctggtgtggggcgggattatgggggccatcacctggtggctgtatgacgatccgcagctcggcggggtgatgacgctggccatgatgctcaacctgctgatggcggcaatgatgggcgtgataatcccgatggtcatggtgaagctggggcgtgacccggcggtcggctccagcgtgatgatcaccgccatcaccgacaccggcggcttctttatttttctgggtctggcgacgctgtttctgatgtagcctgcgcttttgcccgcaggcggcgggggatgatcgccatcgcgacaatccccgccagcacaccgatcgccagattgctggttcccaccgtcgcggcgacagtcaccagcatcaccagcgtttccggccacggattacgcgccagctcgaccggacgaatgctgtgccagctaaatgtcttcaccgccacgatcaccatcaccccggccagaaccgccatcgggatcttcgccatcacctggctgagcgctgtcaccagcaggagcagcaccaggccggcgattaccgttgagaggcggctgcgtgcccggcccatttccacgttcacgatagtctggccgatcatcgcgcagccggcgatgccgccatagcagccggcaaggatattggcgatacccagcccggcgctttcccgcgatttgttcgacggggtatgagtgagatcatccaccagcttagccgtcagcaaggactccatcaggccgacaaaggcgatgctgagggcgcacggccagattatctgcagggtggtcaggttcaggggaacggtcagggcggtgaaccccggcaggccgccgctcattgacccttcatcgccgacggtcggcagctgctggccggtggtcgcggtatagagggtgagcgcgacgatggcgatcagcggcgccgggatagccttaataacgcgcggcgcccacaggacgataagcagcgtcaggacgaacaggccaacgattagcggttgtcgactccagaaatgcggcacctgagcaaagaaaatcaggatcccaagggcgttgacgaagccggtcatcaccgccgggggaataaagcgcatcaggcgcgtcatgccgcacagaccaaacaaaatttgaataatacccgccagaatgacagccggtaaaatgtaccccacgccgtgctgatgcaccatcgggccaatcaccagcgccaccgagcccgcggcggcggtgaccatcgccgggcgtccgccgaagactgacatcgccaggcagagcaccaccgaagcaatcaggcttacctgcgggtcaacgccggcaatgactgaaaacgaaatcacttcagggatgagcgccagggcggtgagcacgccggccagcacttcacgcgtcagtaaagacggggagcggaggatgggacgcaggttgccggaagcggcggggtcagaaactggaggcataaaaaaagttcgcagcttataaaaaagagggagcggtgtcaggccctgcttccgtgcggtctgtcacagaaccagggatgatagcgcggaatctgtcagcgcaccagtacaaaaagtgatttggtgtatacatttattaaacatttttataacggatctcaaaacagaacttaaaatttaaacaatatttaaatttttgagcttcggtggtaacgtgaggggtgagaatcgtatcacctgcgctaaataaaaacagcgagtaaagtaaggctcaaatccgatgaataaaaagatggccgtaccacgctcacaggcggttggtcccaacagcactcggaccaacacccgccatgagcaagagacggatgtattgttgattggcggcggcattatgagcgccacactgggaacctggctgcaggagcttgagccagactggtctattaccatggttgagcagatgtccagcgtggcggaagagagctcaaacgggtggaataatgcgggtaccggccacgcggcgctgatggagctgaactacacgccgcagaccgccaacggcatcaatatcgacaaagcggtcgacatcaacgaagccttccatatctcgcgtcagttctgggcgcatcaggtgacgcgcggcgtcctgaacaaaccaaaatctttcattaacagcgtgccgcacatgagctttgtgtggggcgaagataacgtcaacttcctgcgtgcgcgctacgcggcgctgcagcaaagtgaactgttccgcggtattcgctattctgaagaccatcagcagatcaaagcctgggcgccgctggtaatggaaggccgcgacccgttgcaaaagatcgccgccactcgctcagaagtgggaaccgacgtcaactatggtgaaattacccgccagctgatcgccggtctgcaaaagcatgataatttctccctacagctgggcaccgtggtgcgtcgcttcaagcgcaacgccgacaagagctggacggtcaccctggcggatgccgacaatcgtcgtcagaagcgggtcattaaagctaaatttatctttatcggcgccggcggcgcagcgctgaccctgctgcaggagaccggcattccgcaggccaaagagtatgcgggcttcccggtcggcggccagttcctggtctgcgaaaatccggaggtggtgaaccaccatctggcgaaggtctacggtcaggccgaagtgggcgcgccgccgatgtcggtgccgcacatcgatacccgtattatcgacggtaaacgcgtggtgctgttcggaccattcgccaccttctcgacccgtttcctgaagaacggttcgctgtgggatctgctggcctcgacgaatacctcaaatattttgccaatgctcaacgtcggcctggacaacttcgatctggtaaaatatctgattagccaggtgatgcagaaagataaagatcgtctggccgcgctgtgcgaatattatccggaagcgcggaaagaggactggcggttgtggcaggccggtcagcgcgtgcagatcattaagcgcgacgcgaagaagggcggggtactgcgcctgggcaccgaagtggtcagcgatgatgaaggcaccgtcgcggcgcttctcggcgcgtcgccaggggcctccaccgcggcgcctatcatgctgcagctaatggaaaaagtgtttaaagataaagtcaattcgccggaatggcaggccaagctgaaggcgatcatcccaacctacggtattcgtcttgacggcaacccggcggagatcgagaaagcgctggcgtggaccagtgaagtgctggagctgaaatatgagccagccggggcggtggatgaggtaccgcaggcggagctgaagccgctgagcggcggcaagccgatggcggatatcgcgctctgataaacgctctgacaaaaacggcagcctgcgggctgccgttttttattgccgtttgcgctgttcgccttagcggacgacggcgttgccgatagtctcgtcggcgcgccagatgcgatatttcacatcgacattgctcggcgtgtataccacgatcggcagtttgctgttgtagcgcagcatggcgtcatccccgaggccggcagtgacaaatttcttctcttttttgccgtccgggcaggccatcatggtggataccgggccgctcagcttctcaaagacatagtaatcatagccccagccttccagggttttactttccagttccccgccgagacgatgatggttgcagtcgacttccagcgtctggccgatcatcagctcaaccttgagcgccgactcatcctgctgctgcggcagctgaataacctgacgcttcatgcctttttccgctttcgggaacggcgcgactttttccagcggctggtctgcggccaatgcgccagcggacatgcaggcggcggtcagcagagaaacggctagcgtagtgatttttttcacggttgatcatcctttattttcgttcctgacagagatagcctatcatcactcagctgaatgttaagatttatttaccaatttttgcaaaatgaatagtgttatctactggtaagacatcggccgcgcagagcgcaacagaggcgctggcgggccgccagccccctgccggtaaagctattcattacggctatttttcgcttcctcaataaactcttcatcgatttcatcggtattgccggcatgttctcgtcccgacagcaggttccagcaggcgataaacagggcggcgatcagcggcccgatcacgaagccgttgataccgtagatctccatgccgcccagagtggcgataaggatcagatagtccggcatcctggtatccttgcccaccagcagtggacgcagaatgttatccaccaggccaatcacaatcacaaagaagccgacgataaaggcgccctgccacagttggccggtggcgaagaggtagatggccgctggcacccagataatggccgagcccaccgccgggataagcgacagaaacgccatcagcgctccccagagaatgctgccgtccagaccggcgatccagaaggcaaagccacccagcgccccctgcgccagcgccacggcgacggtaccttttaccgtggcgcgggccacagcggcgaatttagcgaacaaatgctgcttcacatagcttgataacggtagagactcgaggatcaacagcaccagataaggtccatccttcagcaggaaaaacagcagatacagcatgatgccgaagctgacggtgaagccaaaagtccctttgccaatcagaaacgcgctgccggccagatactgaccgcctttcagagcggcatcagagagctgctgctggatctgctgcgcgctatcaaggttatgatcggcgaggaagcttctggcccagccggggagatgggcgaacaggctggcgaccaccgtcggaaactgggtgtcgttatgctgcagtttgctgtacaccagattgagctcgtaggccagcgaggagagaatgatagccagcggcgtaaaaacgataagacagataatgacgatggtcatcagcgccgcgaggccattgcgctcgccgaggcgggtacggatcttgtttttgaccggattaaaaatcaccgcgaggatcgcagcccaaaggatggcggaataatagggtgagagaacatcaaaaaaggccagggttacaatgaagacgataaggatgaaaaatcctttggtaagtccattaactctcatgttatccgctcctgcttatgagtcatacggtcgaataatagatgctacgacgtaatttaccatcaggatagtcgtacatcttcacgatacgttgaagaaagggcacaaattaagcgagcgggcggcaacaggggaaacaggcataaaaaaaccagccttaaaaggctggtttctgtggagtttttggtcggcacgagaggatttgaacctccgacccccgacaccccatgacggtgcgctaccaggctgcgctacgtgccgacgcgtggggaacaatattacccgttccccaggcgaatgcaagcgggtcacgcgcgattgattcataattaatcaatcagttagcgataaagcgtttttcgtcagtcaggacctgcagcaacagactgagctgcggtttctgatctttaattttctcgccgtcgcggctccaggtggtataggtgccgttatggttgaggaccacggtgatggtcggggtggtgatggccagcgtatcgccgttggccgcggtgacccagttacgacgccgcgcggcgctgaacagatcttctccctgcgagtactcattggccggcgtcgaaacgtgaagcaggcgctgcatcagcgtagtcatcacatctttgttatcggtcagggtggcaatctcctgcgccggcgtgcccggccagtgaataaccagcggcacctgcagctgctcgcgcgaccagtcgaacgcgtcgtgtttcgcattcagcggcttgccgtggccgccggtaataattaccaccgtattatcgagtttgccggcttcgcgcagcgcagtcagcacccgatcgatctgggcatcaacgtcgccagccgccttgctgtagcggcggacaaagccctgctgctgcgtgtcgtcgagggtggtgccattgagcgagatccacgagaaccagcgattctcatcctgcgcgtaacggtccagccagccgatccactgattggccgtctgctcgtcgctctgggtcttcgcgctcggcagcgagaaatcggagagcagcgcctggcgatacagcgggctgctaaacccatcggaggagaagaggcccagctggtagccctgctggttgagggcggtaatcagcgcggcgggaatacgtgccgagaggacaccgtccatatagccaggcgaaataccgtagaacaagccaaacaggccgctgtcggcggtattgcccgagctcatatgctgggtaaagttaacgttttctttggcaaatgccgccagcgccggcatggtcttttcaaaccgcgagtagttcaggttgtcgacggtgatcagcagcacgttgtagcccgcgccgaggtcacggtagcgcaggttgctaagcggatactggaccgataccgcctccggcgccccttgctccaccagacgacgctgataatcctgggcgtcgagcaggccatgtttctcaaggaaacgacgggcggtcatcggataggagagcggcagattcgcccgctgcatagtgatcgggcgatagaaattggcgtccgcccagatatagaccaggtggctgctgacgaacgacaaaaagaagaaccaggcgaccgggcgggcgtaatggcggcggcgcgtcaggctgcgcagcttttgccagctccaggtggcgaagagcatttcaatcaagaagatgaccgggacgctgataaacatcagctgccagtcgcgcgccatctcattctggtcagggttgatgaccagctcccagacgaccgggtttaagtgcagatggaagcgggtaaaaacctcgctgtctatcagcagcagcgtcatcccggcggtggcaaggatcaccgacaggaagcgcatcaggcgctgcgagaccacgataaaggtcaacggaaagaggatcagcacatagctggtaaacaccagaaagctgaaatgcccgacgagactgacgtacgaaaacagtcgtccggcaagcgtcgtcggccagtcggcgacaaaaaggtagcggctgccgagcaccatggccaacaacatgttgaacagggcgaaccagtgcccccagctaaccatctgggagactttttctcggtagggctgacgtagagtcaccatatactgttgctgttatccttaatgcgctggatcgtcgttaatcgaagattgcaaagcctgcgcgaaagaacgggcgatggcctgacgctgcgccggcgcgacgctactgttgatcaggttggtcaccatattgcctaacaccatcagtgaaaggtccaccggggctttgtgtgattccaggacgttcgtcagctcgctgagcaactgttcgacctgttgatcgctatagcgggaaatttgcggcataaactcaaaatctgtttgttcgtgaaagggcaacatattaccgtagcagcagctttttttccgcattttttcgccgcggcgcaaaagcgcatcaatcgacgttaacgacgtcgaaatgtgtggcgccagttgcgtcggccacccggcggtggttgaataccgcccggtctaaaaggagagtttaacatgagtctggatatcgaccagattgccctgcatcagttaatcaaacgtgatgaacaaaatctggagctggtgctgcgcgagtcactgttggagccgaacgcgacggtcgtcgagatgatggctgaactgcaccgggtctatagcgccaaaagcaaagcctatggcttgttcaatgaagagagcgaactggcccaggcgctgcgcctgcagcgtcagggggaagaagagtttctggcgtttagccgcgcggcgaccggtcgcctgcgcgatgagctggcgaaatacccgttcgccgaaggaggcattgtcctcttctgccagtatcgttaccttgcggtcgagtatctgctggtggcggtactcaataacctgagcagtatgcgcgtcaacgaagagctggatatccgctcgacccattatctggatattaaccatgccgatatcgtcgcgcgcatcgatctcaccgagtgggaaaccaacccggagtcgacccgctatctgaccttcctgaaagggcgggtagggcgcaaagtggccgatttctttatggatttcctcggcgccagcgaagggcttaacgccaaagcgcagaaccgcggcctactgcaggcggtggatgacttcgccgccgatgcccagcttgataaatccgagcgacagaacgtgcgccagcaggtctacgcctactgcaacgaacagctgcaggctggggaagagattgagctggagtcgctgtccaaagagctcgccggcgtcagcgaaaagagcttccaggaattcaccgctgagcagggctatgagctggaagagagcttcccggcggatcgcagcaccttacgtcagctgaccaagtttgccggcagcggcggcggattgaccattaacttcgacgccatgctgctgggcgaacgcgtattctgggatcccgccactgataccctgaccattaagggtaccccgccgaacctgcgcgaccagctgcagcgccggacgtcaggcggcaattaagccctgcgccccgtcggcgctaccgctgaacggggacgatctccacgccgctctgcaccaactgttggcgcagcgcggcgtcgggttctccatcgacaatcagcgtactggcgaggctcagctcgccgatggcaaaggccgacgcggcgttgagcttctcccgggaggccattaccacggtttctgccgccctggccgtcagcgcgcgcttgatgcctgcctcttcgtaatcaccggtggtgaaacccgcccgcgggtggacgccggtcacccccataaagaacagatcggcgttgatccgcgccattcccgccagcgtctcggcgccgacggcgacaaccgaatgtttaaatactctgccgccaagcaggatcacctcgattcgcgggtggtccaccagcgccacggcgatgccagggctgtgggtgaccaccgtgcagctgaggtcggcgggtaaaaagccgatcatggccgcggtggtggtgccgccatcgacaatcaccacctgtcccggctggatcagggcggcggcggcgcgggcgaccgcctgcttggaggcgatctgcacgcttttgcgcgtttcaattggcgcaatggcggcggataccggcaatgccccgccatggacccgctgcagttttccctccgccgccagttcgcgcagatcgcggcgaatggagtcctcggagacgttaaaccgctggcttagctccccggacatcacctgtttttcctcggtgaggatctggaggatctgctgttttctctgactggcgagcatcggttttccttcatcgaatgatcttgtttgtgcacgattatgcatgttatggtgcctgctgtcacctcaaaggggaaataacatgcaaacgcatgcaccgcacgtccgccacgttcgcgagacgctgctctcggataactggtacacgttgaaaaaatatactttcgaactgctgcgtcgggacggtcgctggcaggagcagagccgcgaggcttatgaccggggcaacggcgcagtcattttactctacaaccgggaaaagcggacggtggtcctgacccgtcagttccgttttccggtatttactcatggccacgacggatatctcattgaggcggctgccgggctgttggataacgcctcgccggaggcgcggatcgttgccgaagcggaagaggagaccggctttcgcgtgacccgtgtcgaacccgtcttcaccgtctttatgagccccggctccgtcaccgaaaaactctacttttttatcgccgaatatcaggccgatgaccgtcggggcgacggcggcggactggcggcggaaggtgaggacattgaagtactggagtggccgctgacgcgggcgctgcaggccattcgcgatggcgagatcatggatgctaaaaccattatcctgctgcaacacctggcgctgaatgccgacacgctcctcgccggctgagcggcaaggagcggggagttaacgcagctcgcgggcaatggcgctgtacatcagcgccgcttccaacggctgagcgttgaaggaaggttccgcctgcggccaggtcgaccactggacgatcaccaggtgttccgcgcggttcaccatgatcacctggccgtagatccccagcgcccacagcgaccctttaagcccttcctgcggcgtcggctggacgttttgcgcattcgccggaatcgcgttattccaccactgatagccgtaaataccctccggatgcgctgccgagaccgagtttagcgccttggtccagctggcggcttgatcgaaccagccagtcggcaccagctgtttgccattgcttaaccgaccgtcaagggcaacgaattcaccaaagcggccccagtcttcaagggtggcgttaaagccgtgggcgccgacgtcgtgcttcccttgctgataagcatgccacacgccgtcgtgggccatcccggccggctgccatagagcctgttcaagccaggcggccagcgacatgccggtggcgcgctccaggatatccccaagcagccaggcgccgccggaagagtaggaccactgctcgcccgccgggtgttgacgcgccaggccggtgacgatcttacgcacgcaggcataggcgccgggctgcgcttcacactgggtcaggcgggcgaaatgcgactgcgggtcggtgtagtcttcattccattccaccccgctggtgtgttgaatcaactgcttcagcgttacgccgtcccaggcggtgcctttcagttcgggttcataaacggtaatcaggtcatcaagggagtggattttaccctgttgaatggcgataccgaccagcgtcgataccaccgatttgcctaccgagcgcgaggtccacagggtggtgtcggtattaccttcggcgagatatttccaggcgactttaccatctttcagcaccagcataccgctgacgttctcgcgcttcaggtaatcctgcaaattccaggtgtggccgttgagcgtatagcgggcatcggtcagttgtttttcagcgcgctccagcggcgtcgaggcgccgtggcggaagacatcgccggtatagttgcgatagtcattgcgaaagccaatcacgcgtgaagtctgatcccagctgagcatgtctttggccgcgggtagcgtttgatcgtaaggcgttgggcagacatccagcgtcaggctgccgcagtgttgcgccattgccgccgccggcagagccgccaatattaacgccagggccagtggttttcttatcattatcatttcctcgtttgccatagattcgctgcgcagtatataaatcggcgcgcgccggctaaaatcagcacatgggggattttcccccttaagggagaaaaggatgaaaaccctacagtactcattcgcacagattgaagccttcgcgacgattgctgagaccggcagcctgtcgcaggcggccattcgtttagctaaagaccggaccacgctgcgcgatctgctggactatctggaagatgcgctgggctaccggctgttcagccgtgaaggacgtagcctgacgctaactgccgagggtgagcagctgtttcgccaggcgcatctgctgttgcgtcaggcgcaggctttcgagtcttttgcgcaaacgctgccgcaaaccgccgggcaggcgctgcgtctggtgtacgatcctttcgtgccgcgtgaatttctctgtgcgctggccgataacctggcccgacggcagatccgcctgagctgctggagcgcctcgcgtcgcgaagccgagcaggcgctgagcgatggcgtggcggagatggcgatttgtcaggctaacaaccgcacgctggggagcgaaatggagtggcgggcgctcggcaccgtggatctgcgtttctacgcggcggacagcctgttccacgacgctccgcggccgctgacgctattgaatctttcgttgacgccgcagttagtgatgcaccggcgcagtgacgatcaaatcgcccgccggctgcagatttccggccatacgctgtatatgaatgaaattaccctgttgcgccatgcgctggagcaggggaggggctgggggtttttaccggaccatttgcggccaggcgagtggcagggagtcagtgaaatcgcgacggaggtcggcagtcaggggctgaacgtcactatggtgatgctctggctgcccggaatgaataagcatcggatgcttagcgacatcgtgcacgaggcgccggagctttggctgcgcagataacaaaacgccccggagcctgagaccccggggcgcttgccatacaacttgctatcggcgattacgcgcgaacgaagtcgatgtgagtcagtttcggcttgaacgcgtggcgctgaacagcctgaactttgactttttcttctttgccatcaacaacgacggtcagaacttcgctgtaaaactcagctttgtcctgcatgttccatactttgtcgtggtccagttcgatagcaaccggagcagctgcgccaccgtagatgattgccgggaacttgttagctgcgcgcaggcggcggctcgcacccttaccctgctctttacgtacttctgcgttgatagtaaacattgacgtctctctatatataaagcctgctacaggcgacccagcaacaggcggattatctgctttgcgaatgcaaaagcgggcggcattatagccgccaaacgacacccgggcaatcaaaacctcagctttccggtaattaacgcagctcgttggcgcgacgaaaacgcccctgataatcgaacactttttcccgcacctgccagtactgccccttcatgcgggcgacgacaaagtccggatggcgcagcagcgcctgctgggtcacgatatccgccggcgttatccagcgcagcggcaccccgggggtgcgggtatgcgggcgaataaacagttgttcgaaggcggtgcgctgggcgggggtctgcagacggaagcgctcactgacatccgccccgtcttcatcgtagtaggtgattttcagccacgggcccttctcgtcgccgccgtgctgcagggccatgccgctgcagcgcagcaccagcgcgtccttcagcttcagcgccgccttcagcatatcgtccgggtcaaccagtatagtgtcgcactcccggcagcggcgggcggcgatgtcgttttccgcattacactgcgggcagtttttaaagcgaaagcggaagtcgcactgttcgcggtggccgtcgtcatcttcgaaccacccctggcagcggcggccaaagtgttcaatcaaggtgccgtcggcggtggttttgccccagaaggtattggcgaagccgcaggccgggcagaagacctgcaccggcacgttgtcgcttttgcccttcggcgtccccacttccggggcatacaggtcatgcggattgccggcgtagtcgaggatcagacagtcggttttccccggcgccaggcgcagaccgcggccaacgatctgttggtaaagactcaccgactcggtggggcggaggatggcgatcaggtcgacgtgcggggcgtcgaagccggtggtcagcaccgcgacgttcaccagatagcgatacgcctgcgctttaaaggcctcgatgatgcgatcccgctccggcccaggcgtttcgccggtgatcagcgccgcctggcctaccggcagcaggccggtcacttcccgggcgtgttccacggtggcggcaaagatcatcacccctttgcggttttcggcgaactccacgatctggctgacaatatgcggcgtgatacgctgttgttttttcagctcatggttaagatcggcttcgctgaacaggccgttgctttgcgcctgcaggcggctgaaatcgtactgcaccaccggcatatcgaggcgctccggcggcgtcagatagccgtgtttaatcatatagcgcagcggtagctcatagatgcagtcgcggaacagggccttttcatcgccgcgcaccatcccatgataatggaactgatagatccagcccttgccaaggcggaacggcgtggccgtcaggccgagcagccggatctgcggattgacctgccgcaggtgaccgatgatctgctgatactggctgtcgtcatcatcgctgatgcggtggcattcatcgacgatgagtagcgaaaattcgctgcgaaactggtcgagattgcgcgccaccgactgcacgctgccgaacaccactttgccgtggctctcttttcgctgcagaccggcggcgaagatatccgcctcgaggccaagggcgcagtatttggcatggttctgcgccaccagctctttgacatgggccagcaccagcacgcggccgcgcgccagcctggcaagctcggcgatcaccagacttttgcccgcgccggtgggcaggacaatcgccgccggctcggtatggcgacggaaccaggcgagggtggcatcgacggcttcttgttggtaaggacgtaatgtaaaagtcatgaattcacggggctaattaactggcgaatagtatgccatgaatcttttcccttgagtggtgttaagagcccgttatactagccggtgaaattcttctttttcgggcgatttgcccgctccagcactatgacaggctaaaaaaatctcatgcgacttgataagtttatcgctcagcagctgggcgtcagccgggctattgccgggcgtgaaattcgcggcagccgcgttaccgtggacggcgacattgtgaaagatgcctcttttaagctccagccggagcacgaggtggagtatgacggaaatacgctgacccagcagaatggcccgcgttattttatgctcaacaagccgcaagggtacgtctgttccaccgacgatcccgatcatccgactatcctttatttcctcgacgagccggtggcgcataagctgcacgccgccggacggctggatatcgacaccaccgggctggtgctgatgaccgatgacggccagtggtcgcatcgcattacctcgccgcgccaccattgtgaaaaaacctatctggtggcgctggaaaacccgctggcggaagggaccgctgagctgttcgccaaaggcgtccagctgcataacgaaaaagatctcaccaaaccggcgttgctggaagttatcactccgaccgaagtgcgcctcaccatcagcgaaggccgctaccatcaggtgaaacgcatgttcgccgccgtgggcaaccacgtggttggcctgcatcgggaacgcatcggcgacatcctgctggatgaatcgctggcgccgggtgaatatcgtccgctgacggaagcggaaatcgccagcgtgggcgccccgcagccacggagtaaaacgtgacgctgaagcagaattcttcactggggattgtgtttatccttggcctgctggccatgctgatgccgctgtctattgatatgtatcttccggccctgccggtgattgccgcccagtataacgtcccggacggcagcgcgcagatgacgctcagcacctatatcctcggctttgcgctgggtcagctgctgtacggcccgatggcggacagccttggccgcaagccggtgatcctcggcgggacgctggtcttcgcggcggcggcggtagcctgcgccctgtcgcaaaccgtcgatatgctgattgtcatgcgtttcttccacggtctggcagccgcggcggccagcgtggtgattaacgccctgatgcgcgacatctatccgaaagatgagttttcgcgcatgatgtcgtttgtcatgctggtcacgaccattgcgccgctggtggcgccgatggtcggcggggcggtgttggtctggttcagctggcatgccatcttttggatcctcgccctggtggccctgctggcctcgctgatgatcggcctgtttatccgcgaaacgctgccggctgaaaggcgtcagccgttccatctgcgcaccacgctgggtaactttgccactctgttccgccacaagcgggtactgagctatatgctggcgagcggctttagcttcgcgggcatgttctctttccttagcgccggtccctttgtctacatcaatataaaccacgtcgcgcctcagcactttggctactattttgcgctgaacatcgtttttctgtttctgatgaccatgttcaacagccggtttgtgcggcgggtaggggcgttgcgtatgttccgcgccgggctgtggatccagtttgccatggcggtgtggatggtggtctgcgcgctgctggatgtcggcttctggtcactggtgatcggcgtagcggcctttgtcggctgcgtatccatggtgtcgtctaacgccatggcggtgatcctcgatgagtttccgcatatggcaggcactgcttcgtcgctggcggggactttccgtttcggtatcggggcgattatcggcgcgctgctgtcgatggcgacgtttaccaccgcctggccgatgctgatctctattgccttctgcgcaacctgctctattttcttctcgctttacgcatcccggcggcgaaaaatcgcacgctaggtcacattttcaggggcgaaatcgcccctttcttgatgcatgtcaaccgcaatgggcttcagggttctgcgatttgtttcctttatgtaaaatcaattagtgtaaaaagtcgcattgttgcgataaaaaagttgttttggatcacagaaacgggtacatatagcgccaattggctcgccaggtataaaaaataaagcgctggattataagtgcttaaccctggtccgccgccgctgtaaacgttttctgcctcaaggcaggactatttgtcaacagtgtgttaatattgatgtaaatttattgtgaagccttttgcttccggggaaaccaagtgaatacacaacaactctctatcgtacaccgtctgccgcagagctatcgctggctggccggttttgcgggttccagagttgaaccgattccgcaaaacggcgcgcagaacgagaacagtctcgttgccctgaaattgctgagcccggacggtgagaaagcctggccggtgatgcataagctcagccaggcgttaagcgacatcgaagtcgactgttccgtgctggagtgcgaaggtgaaccctgcctgttcgtaaacctgcaggatgagtttgccgccacctgtcgtctgaaaaactttggcgtggccatcgccgagcccttctccggcaataaccctttctgaccgtcagcttagcgccagcagctggcgggtatactcatgccggggtgcgctgaagacggacttgcactcgccctgttcgaccacctctccctgacgcagcaccatcacctggtgacacagcgcccgcaccacgcctaaatcatggctgataaaaatataggccagctgatgctttcgctgtaaggctttcagcaggttcaggatctgcgcctgaacggttttgtccagcgatgaggtcggttcatcgaggacgatcagctgcggtttgacgatcaacgctctggcgatggcgatacgctgtcgctggccaccggagaacgccgccggatagcgctggcggctggccgggtcgaggccgacctcctgcatggcaaggatcaccgcctgttcgcgttcggccgccgtcagcgtcggctggtggacgcgcaagccttcctcaatgatctgctgcgccgtgaggcgcggattgagcgacgagttcggatcctgaaaaaccacctgcatctgtcggcgcagcggtagcagctgtcggcggttacgcccctgaatcggctggccggcgaaggttatcttgcccccggacgggatcaggcgcagcagggccaggccggtggtgcttttaccggaacccgattcccccaccaggcccagcgtctcgccggcgcgcagctgaaagctaaggctgttgaccacccgatgatgatcgaccacccgacgcaggatccctttgcgaacgggaaacgccacctttaaatcgtccgcctgcagcagcaccggggcatcggcggccagcggcaccggctccccgtccggctcgctatccagcaggcgttgggtgtagggatgcgctggcgcgctgaacagcgcccgacagtcattgtgttccacgcagcggccgttctgcataaccgccacccggtcagccagctggcggacgatgctcaggttatgagtgataaacagcagccccatgttcagctcctgcttcagctcgcgcagcagttgcagaatttgcgcctgcaccgatacgtccagggcggtagtcggctcgtcggcgatcagcagctccgggcgagtcagcagcgccatggcgatcatcacccgctggcgctcgccgccggagagctgatgcggatagtccgccagccgccgcggcgcctgacggatcccgacgcgctccaggcagtcgaggatctccccgcgcgccgcctgtttgcgcattccccggtgtaacgacagcacctcgtagagctgtttttccagggtgtgcagaggattgagcgataccatcggctcctgaaagatcatcgcgatccggttgccgcgcatgccgcgcagggtcgcctcatccgcatacagcagcgactggccatgaaaacggatgtcaccgctggggtagctggccggcggggtagggagcagccgcagcaccgacagggcggagatgctcttaccggagccggattcgcccaccagggccagcgtttcgccgaccgccacctcgagcgacagattatgcaccacggtctgcgtctcgccctgctggcgaaaggcaatagagagattgtcgatagctaatagcgggtgggtcatattacaccgccttactcgggtcaaaggcgtcgcgaaccgcttcaccgataaaaatcagtagcgtcagcagcacggcgacggagagaaacgcggcaatgcccagccagggcgcctgcaggttgtttttgccctgcagcagcagttcgccgagggagggggagccgagcggcaggccgaagccgagaaaatccagcgacgtcagggtggtaatggagctgcacaggataaagggcaggaaggtgagggtcgccaccatcgcgttgggcaacatatgccgcaggatgatctgccggtcgctaacccctaacgcctgcgccgcccgaacatagtcgtagttgcgggtacggagaaattccgcgcgcaccacgcccaccagcgtcatccagccaaagagaacggtgattgccagcagccaccagaagcccggctgcacgacgctggagagcaggatgatcaggaacagtgttggcatgccggaccagacttcgataaaacgctgtccccacaggtcgattttaccgccgtagtaaccctgtatcgctccggccagcacccccagcacgctggagaacagcgtcagcagcagaccgaagagcaccgagatgcgtgtcccatagaggatccgcgccagcacatcgccgccgttggcgtcggtgccgagccagttgctggccgagggcggcgatggaaagggaaccgtgctggcaaaattaattgtcgtcgcgccgaagcgcactggcggccatagcgcccagccgtgagtcgccagctgctgctgcagccagggatcctgatagtcggcggcggtggcgaacgcgccgccgaaggtttgctcggtgtagttttttaacaccgggacgtacagctggccccggtactgcaccagcagcgggcggtcgttggccagcagctcggcgcccaggctgcaaaggaagagaattaaaaacagccacagcgaccagtagccgcgacggttgtggcgaaagcgcgcccagcgggcctgattaacgggactgaagaaagacattagcggccctcaaaatcaatgcgcgggtcgaccagcgtatagctgatatcgctgacgatattcagcagcaggccaatcagagtgaaaatatagagcgtgccaaacatcaccggatagtcgcgggagaccgtcgcttcatagcccagcagacccaggccgtttagcgagaacatcacttcgatcagcaacgagccggtaaagaacatactgataaaggtggccgggaagccggcgattaccagcagcatggcgttacggaacacgtgtccccagaggatctgtttctcaccaacgcctttggcgcgggcggtgaccacatactgtttgcggatctcgtcgaggaagctgtttttggtcagcatagtcagcgcggcaaagccgccaattaccgtcgccagcaccggcagggtgatgtgccacaggtagtcgaggatcttctgataccaggggagggtgtcgaaatttggcgagaccagaccgcgcagcgggaagaggtcgaaatagctgccgccggcaaaaatcacgatcagcaggatggcgaacagaaaggcagggatcgcatagccaatgataatcagtgtactgctccagatatcaaagcggctgccgttgctgaccgctttgcggatgcccagcggaatggagaccagatagataatcagcgtgctccacagcccgaggctcaccgagaccggcaggctgtctttaatcagctgcagcacggaggcgctgcgaaacaggctgtcgccgaaatcaaagcgcagataatcgcccagcatcttcagatagcgttcgtgcagcggtttatcgaagccgtagcggtgggtgatctcggcgatgacttccgggtcgaggccgcgcccgccgcgatagtgaccctcgctgatattgcctgcgccggtgcgggcatggctggcgcccatcccgccgtcgccagcccccggcatcccgccgcgctgattaaactcgatggcggcgatggcctgatcgaccgggccgccaggcgcgatctggacaataaaaaagttaatggtgatgatggcccacagggtggggatgactaacagcaaacggcggatcaggtagctgcccatgggatgtccttagcgtctgtccgcggggagggtggccgctttgttcacgtcgtaccaccaggtatcgaggccggacgaatagatggggcgggtcgcggggaaagagaacttattccaccacgcggtgcggtcctgcgccatataccacatcggcaacatgtagttattccaggtcagcacacgatccagcgcccgaccgagagggagcagtttctgcttattgccctgccactgcaggatctgcgcaattagcttatccactaccgggctttgcacccccggcgcgttgtagctggagtgaatatagtcggacgcccaggagatttgcaggtcggtccccggccagggcatggcgcgccacaggcttggcatcatgtcgtaatcccggctgcggcggcggttgctgtactgcgaattatcaacctgacgaatatccatgacgatccccagacgctgtaggttgtgctgaaacggcagcacccagcggtcattgcccccggccggcagcagtagctcaaagcgcagcggcttgccggtggcggcgttgacccggcgctggttcttcaccgtccagcccgccgcattgagcagggcgtcggctttgagtaagtttgcgcggtcgaagccatcgccgcgggagaccggcggctggtaaacctggctgaagagctccgggggcagttcgtttttcatcggcgtcagcagggccagctcggctgcgtcaggcaggctgcgggcggcatattcggtgttctggaaatagctgttggcgcgctgataggcgctgtaaaacagcgccttgttcatccattcgaaatcgaacgccagggtaatggcctgccgcacccggcgatcggcaaaaatcgggcgctgaatattgaacgccagccactgggtatcctgcgccgaggtattggtatgctcatctttaatgatgtagccgcggctgaagttgcgaccgacgtagcgggtagcccagtttttggcgacggtctcttcccggcgatcgacggctcccgctttaaaggcttcgaaagcgacattgtcgtcgagataatagtcatagcgcagcgtatcgaaattccagcgaccgcggttgaccggcaggtcggccgcccagtagtcggcgacgcgggaataggtaatatattgccccattcgccaggcgctgatgcggtatggcccgctggccagcggcggcttcgacagcgggtcgctgagtttgtgctggcgccagaacgcctcgggcataaccggcaggctcagcagactcagcatgttctctttgccgggctggccgaggtcaatacgcacggtcaacggcgcgatggccttcacggtggtgcctttataaaacaggcgaaactgcggcaccccttcggtcataaacttgttgaaggtaaacgccacatcgcgggcggtgatcggcgtaccgtcatggaagcgggcgcgcgggttgagcgcgatctccatccaggaatagtcctcggcatagcgcgcccgctcggcaatcagcgggtagtagctgccgggctcatcatccgaggtggtgaacagggtatcgtagagcgcctccgtgcgtaccgcggggttgccacgcagcgcataacggttgaagttatcaaaggtgccgatcgccgccagggtgagggtgccgcctttcggcgccctgggattgacgtaatcaaaatgactgaaaccggcggcgtatttcggttcgccgataatcgcgaaggctacgctttcctgaatggtttgcgccttagcgtccaggctaaacagagccagcagaatcagaaagaggcgcgcatacataggcggcagaataccttgtcatggccggcccccatggccgacatccgttcccgcatcataagtgagacttagcgcgttgtgaaatagttcgcgggttcatcgtgcgcagccaccagcccggccagcgacagcggtcggctgatccagtacccctgcaggaaatgaacgccctggccgcgaagccactccgcctgttcctgggtctccaccccttcggcgacggtcattaatttcagccggcggctgagggtcagtaccgcatccagcaccggcgaggttactgtttcagtaccaatcgcctgcacaaaaccgcgatcgatcttcagataatcgaagttatagcgttcgagatagatcagcgcgctatgcccggtgccgaaatcatcaatcgcgatttcgaatccctggcggtggagccaggcgaagttagccatcgatttttctttatcaatcatcgcccgctcggttacctccagcaccacgtgaaagtggtcggctggcagcgcggcggcgaagcgcagcatatcgtcgcggaagctgtcggcctgcagatgggcaggggaaatattcagccccagctttacgccgcgcggcagaatacgcttcaacaccgcagcgtcgctggcgatcagcgcgagcaggtgatgggttagcggcacgatcatctgctgggtttcggccaggttaataaaaacgtcgggcggaatttcaccaaccaccggatggcgccagcgcattaggacctccacgccgctgatacgtagagtctgagcattaaccaccggctgataaacgatgtagaactggttatttttgatccccagcagaatggattttcgcggatccgatttgatcgtcagcacgtaatagcagagcagccccgccagcaggccgcagacgaccccgagcagcagagcaaactgcgtattttccgccagccagctgttggcatacaggtagaccttcagcggtaagccctcgatctgtgcctggcggatcggcgcgttatgcagcgtttgcggatccaccagccgattactgaaggtggagatagcggtgtgatcgatggccagcgcaatgccgctgaaatcgttttgccgcgcggaatagaggatatacggcgtgagattagcgttaatcgacacgaaaatgccgctgttttgatcgccgggtttacctacccacagcgccagcgccgcgctcttcggcatcatcggcgtgcctggtaaaatcgccatagcaacgggtttgctgatatcgatggccgggatcagctggctgaggggcgtattcatggctcccgtagccgatgagcaaaaggcgatgccgtttttgaccagcaggaaagcgcggacgttggggctgaacgcggcatgggaggtaagcccggagtcaatattctcgcagggctggtccaccagcggctgcaggccgtcaatggtctggcgcaggtcgtgaaaatagcttttcagataggtattaacgttgttgataatggcgtcgaaacgctcggcccggttatggtagatcaccataaactgaatgctcccggccaacagcgcgacgatgatccccacgctcaggctggttaaccaggttttacgctggggcgaaaagtagcgagtaagcatagccagattctttccgtgttattgaagcgcatcaacggagtgtcggtcgtcgtttttctcattcccacttaaaagacatagcttattttgcgacgttgagaaccaggtggcaaaaaaaaacactgcctggggcagtgttttttatcccgcagccagccaagggataaccggcggcggtggaggacagtttacgagcggctcaggactcgacgcgcttcattgtagcgctttttccagtatggctcatccatgctggagatagtcaccccgctgctggtggaggcgtgaacaaactggttgttgccgaggtagatcccgacatggcggccggtagagccggcacgaaacagaaccagatcgcctgtacgcagttgggcacgagaaatcgattttccggtttcctgctgttcagaagttgaacgcggcagttccagaccaaattgttcgcggaaggtgcgctgcacaaacgctgagcagtcgatacccttgcgggtgctgccgccgaggcggtaacgcacgcctttccagctggcatactgatccattaaacgggactttacgtccaggttacggaccatcgtttcaaattcatcctgagaggcttgcagtgatgataaatcgccactacccacagcatgcgtctcagaatgcatattcctggcggtacttgttgaactacacgcggaaagcagaaccgctactgcaatcgcgggggctacccgcaagatatatctcaaaatcggctgagatttgaccatgctgtttattttcccttgttgtccttaacgacaatgtcgttataaaaaatgccaaacgtgttagagcctaaatacccatccgcaatgagacaattccttaagcttaaatttgtgcagtcacgcacaattttattcatgccctgaattaatgctgcggaaaaggcaaaacgagaacgagattaccctatcaaacgccgcatggcgagcggttttgcgcgatttcttataagtattttggtgacaaaaagtgaatcatcgggaaaggccaaaattacggcaatatcgggcaaaaaacagacaattccttcatttgtcacgggattaatgtgacaagaagatgaacgtcatgttgaaaaaaagggaaaatgtaaaaagggacccaaaaggtccccttatagttaatgactttggcggctgccggagacattatttggccgatattctgctgggtaagtagcgatcgaaaaaggcgatcaatttatcgctcagcggggtcatcaatacccagggcgcgccgatcagcacggcggtcagggagccgacggcaatatcgctaaaccagtgggcgccaatcattacccgcgggaaagcaaagactacaaagataatcagcgcgacgcccagcgcgcgacggccaaaatagcgccacataaagctcgcgaagatcagcagcatcatcccatgatcgccagggaagctgtccttcgacgcatccttagtggggaagttaacgacgtcgctgacgcgggtaatatcgctaaaaaacagcgacgggctggcgcgctgtaccggcatcaggtgttgtgcgagctggttgatgatcaccgccgccagcagcatcaccaggcccatgatggcgatctgacgacggcctgcagtcggcgcctttagccaatagctcagcatcaggcagcccatcgccagcagcgaacaggcgtcgaaggcgcgattgttgatgatcgccagcagccaggcataagcatggctgacgctgacgccatggttaaagaaatggaagatcgcggagtcgaccggcaaccacgcgccatggttggctggcagataccaggagcaaaatagcgctacacccgcgatgttaagcagcaggattaaaggaattcggtttttcatcatagccattgcgattttgtgacagtcggcggcaaccttagccgccttaacttaaacgaagcctcaacaacgaggtctggagtgcgttccagtcggcttcattcgcggaaataagctcgatccgactatcgggcggagcgacgctgagggtctcgatatggagatcctccccctgacggttgattcgcaccgccccctcggcaatgcgcatcacgcctttaacgcgccccactggcgccagcctggcccattcgagcaggccgatggtgtcaaagaccgtctccgcgtcgaagatccagccgcagccctgaaagccctggccattgttgagatgtcggcgccagcgctggtgttccgccaggctgagcgcggcgaggccggaagtggggggatggcggtgggcgtgctccgcgctcgccggcagcggggcggtgttccgtcgtggctcatcgagcagggtcagatcgatattgccctggattgccgacaccttgcgacgctcgccgccccagcgctgccaccagtcggccagcgcccgggcgctttcggcggtttcccgatcacttttattagccacaatgatgtccgccgcggccagctgatcgcggaagttgtcgttgctgacggctctttcatccagcagctggcggggatcgaggatgcacagcgtggcgcgcagatcgatccagggctcatacaccgccgcggtgaggatatcgaggatctgctttgggtggcccaaaccggtgggttcgatcagcaggcgatcgggtttgccctggcgcagcagggtgttcagcccaacctgcatcggcaggccattgacgcagcacatgcagccgccggggatctctttgagcagggcgccgctgtcggccagcagcgcgccgtctatcccgacttcgccaaactcgttaaccagtacggcccatttttcatccgcaggcttctgcgccagcagatgaagaatcgaggtcgtcttaccgctgccgagaaagccggtgatcaaattggttctggtcactcttttctccaggataaatgtaatgttgtaacagttacgcctatcctgacgaaaaaagggggaaaagagaagtcctgaggcggacagaagagaattctgtccgcataagcgcaaatattgttaagaattcagcgcgcgggcgacggcctcgcgggcgccgtgcgtcgccagctgttgccaggcggcgcggatcccggcgacaaactgggcgttgtgcggcaggtcgcggccaaatatttcctccagccccagcagggcgtcgacgcgctgctgctcatcgctctgcgccacccgctgctggatcttgtcgaccagcggatcgcgcacgtcgatcgtctgaccggcgtcgtccgtgccgctgacgtagcgcatccagccggccacaccgagagccagcaacggccaacggctgtcgcgcgccagatgtacgcggatgccatcgagcatgcgctggggcagcttctggctaccgtccatggcgatttgccaggtgcggtgtttgagcgccggattgctgaagcgggcgatgagactgtcggcataggccagcagatcaacgccggtaatggtcagcgtcggagcctgttcgtcaagcatcagctggcgggcggcgcggcggaagacgtcatcccgcatgcagtcgctaatgtgcgcatgccctgccagatagccaagccaggcgaggaaagagtggctgccgttgagcatccgcagcttcatttgctcccagggcaacacgtcatcggtcatctgcacgcccgccgtctcccaggcgggtcgcccggcgacaaagtgatcttcgaccacccactgaatgaagggttcgcaactgatggcgcagggatcgtcgacccccagcacggtggcgatttccgccagcgactccggtgtggccgcgggaacaatgcgatccaccatggtgcccgggaagctgacgttgtcggcgatccagtccgccagcgccgggctgcgtttttccgccatgccgaggacggcattttttaccacgtgaccgttgtcggggatattatcgcaggagagcacggtaaagggcggaaggcctcgttcccggcggcgggccagcgcttcaactaaaataccgggagctgactgcggcagcgtcggattctccagatcgtgaataatgcgcggatgcgtcggatccagtttcccggtcgccggatcgatgcagtagcctttttccgtaatggtcagcgagacaatcgctacctgcggctcgcaaaatttttcgataatcgccgccagcgaatcgagcctggcgttcagacattcgtgcaccgcgccgatcacaatgggctggttgccgtcggcgcctttttccagcacggtaaacagatggtcctgttcgcgaagctggctcatcagcgtgtcgccgctgaacagactgatttcacagatcccccagtcgccgccgacgttattcagcacgcgatcggtgagcagcgcctggtgcgcgcggtgaaacgcgccaaagccgaaatggacaatacgcgagcggagctggctgcgatcgtattgagggtattgcacgttcttcggtagcgtagcggttgcaattgttgtcattcttcccacacctgtttaactgcttattaacaatgccagtctaaagttatatgacaggaagttaaattggtaagccgaaattatccgctgactgtgagctggatcaatcaataggccagcactgtttgcagccaggtgagaaacatgtatggtagtcgtcatgagtgtcgccattattggtataacaacttttgtgagggcatagcgatggagcaaacctggcggtggtatgggccgaacgatccggtatcgcttgatgatgtacggcaggcgggggcgaccggcgtcgtcactgcgttgcaccatattgcaaacggtcaggtatggccggtcgacgagattaaagcgcgtcaggcgctgttagcggcaaaagggttgacctggtcggtcgtcgaaagcattcccgtccacgaggatattaaaacccacagcgggcagtatgcgacctggattgccaactatcagcagagcatccgcaacctcgcggcctgcggcatcgataccgtgtgctacaactttatgccgatcctcgactggacgcgcaccgatctggaatatgagctgccggacggctcccgggcgttgcgtttcgatcagatcgctttcgccgcctttgagctgcatatccttaaacgcccgggagcggaagcggattacagtgaagaagagcagcgtcaggctgaggtctatttcaaggcgatgagcgaagcagatatcgataaactgacccgcaatatcatcgccggcctgccgggagcggaagagggctacacccttgaccagttccgcgcgcgtctggcggagtacgaccacattgataaagcgcagctgcgtgaaaatatggcctatttcctgcgcgccatcgtgccggtatgcgaagaggtagggatccgcctggctgtgcatccggacgatccgccgcggccgatccttggcctgccgcgtatcgtgtcgaccatcgaagatatgcagtggctgaaggagacggtggacagcattaataatggcttcaccatgtgtaccggatcgtatggcgttcgcgccgataacgatctggtgaagatggtggagacctttggcgatcgcatccattttacccatctgcgctctacctgccgtgaagcaaacccgaaaaccttccacgaggcggcgcaccttagcggcgacgtcaatatggtggcggtggtggatgctatcctgcgtgaagagcagcggcgtaaacaggccggcgatctgcgcccgatcccatttcgtccggatcatggtcatcagatgctcgacgatctgcgcaagaaaaccaacccaggctattcggcgattggccgtctcaaggggatggcggaagtgcgcggcgtcgagctggcgctgaaaatgaccaaataccctgaactgctgtaatcgcggcaatggggataataaaaaggacagccagcgctgtccttttttactgtcggggcgttaccgatgattaatccgcgcggcccatatagcggcactcttcgatatgaatgcggattttctcaccggtggtcaggtattccggcacctgaatcaccaggccggtgctcatggtggctggcttggtgcgggagctggcggacgcacctttaatacccggcgcggtttcgataatttccaggtcaacggtctgcggcagctccagcgccagcagctggccgtcccaggtcagcacctgcatgtccggcatcccaccttccggaataaactgcagctcttcttcaatctgctctttggtaaaggtgtaaggggtatagtcttctttatccatgaacacgtattcgttgccatcgacgtaggagaagtcgacgaaacggcgggtcagggtgacggtatcgacgatatcgtcgcctttgaagcgctcttctactttcaggccggtgcgcacatcggagaagcgcattttatacagtgtcgcagcaccgcgggcgctgggtgactgaatatcaatatttttcacaatcagcagcttgccgttgtaattcagcaccataccttttttaatttcattcgctcttggcattgcagtaatcctgtcacttaacgagtcaaaaatatcgcgtaaaactactcgcgcccgggcgttcaggcaagcggatttcgcgagttttgctatcttctggcaaaacgtttaggctgtggcgcaaaatgagcgtttgggagtcgggttgtggaatgtcgtactgattgtggcgcatgttgcatcgccccctctatatcatcgccgatccccggcatgccgcagggcaagccggctaatgtcaggtgtgttcaattatctaatgacaacctatgtaacattttcggttcggaactgcgaccaaaagtgtgcggcaatcttcaaccttcgccagatatgtgttcgacggatcgtgacgccgctataacttacctgcttcacttggagtccagcacggcaccataggtatttgtagaacattgcttataagtatataacctatggtggtgtttattttgttttatatcaacaggataggtggctcctctgagaggatagctatcacgcagccatttaatctaccaacacgtcttccaggttttgttgttgaaatctatcagtggcatcgacattgaggtctggcttcaactgctcaatatcaaattgaacacgaaagcctgttttctctgcaatatagtcactaaacatatttgtaccatcaatatcccatcctctgcagactcgcgctcgggaggaagggggataaatatcgacttgatgaggataatgttatctgagcgtgacagcagtaggcagtgtgaatttttgtattgcttacaaattgtcaatctacagctgaaagtataacgtatacaccagtaatcaagtgataggtgttgtgatatggatattaatgagttccctccgggagttatcgaacatctcggttggtatgtatatcgactgattgatccacgagatggaagcactttttacgtgggtaagggaaaaggcaatcgcgtttttgctcacatgcgcggcgaagtggcagccgctgatgatgatgaactgctcagtaataaactcaagcaacttcgtgagattagattagctggtctggaggtcatccatgtaatccatcggcatggtattgccgatgaaaagactgcttatgaggtggaggctgctctaatcgatgcctacccaggtttgaccaatatcatgaacggtgctggcagtaacgagtatggcgctgcacatattaaagaattaattgcaacgtaccagcctgagacagtggagtttaagcacaaagcgctgatgatatctgttaacagaagttcaaaggatgttgatctctatgacgcagtacgcttcagttggcgtgtaagcctcgaacgtgcaagcaaagctgaagttatcctggctacagtaaaaggaattgtcagaggggtatatgttgctgatgagtggttaaaatctacccgtgacaactttcctgaaatgcgccaatgggatgaagatgatgagtttgaagctactcaaagttcacgctttggttttcgaggtcgcgcggcatctcctgaaattacacagctctatcttggtaagaagatccctgatgacctcagaaagaaagggtcaatgtctcctgtgaagtattcaccaaattttgattcctgaacgctaatatttcagtataactgcttaaagggcgatccggcgttgaatatgggtcgcctccaaaacatcgaataacttattgtattttaaatacatttgttttatctcccggcatttttttgagccccggaccaaataatggtgctgtcgatattactctggtgtcatattgttcagttattaatgcggaaatcaaaaattatattaagatcaataagttaattataaagggcaactgcactatagcactgacgacacggatgcctgcgcatggctgaaacatctgcaggccgagctggctgcattgactctatcatgatcattaatctgcattgcccggctctggccgggcaatgtgcttacacgtctcttatccgccacaggcaggcctgagtgacaacgcccatcgccagcgcaatccagaacaccgcgtgatagctccagatctccgccactacccccgccagtgagccggcaatgatccagccgacgcgggtagtattggtatagagggtggtggccgcgcccgcctgccccggcatcaggtcctggaaatagagcatgccgatcccggcgaggatcccgatatagatggcgttcagcacctgcatcgccagcagcagcgctggcgtatgcaccgtcagcatgccgacgtaaaacagcaccccggccactgcagaaagacgcatcagaaagcgtttgccgaaacgccgggcgtagtaaccggcaatcagcatggtcggaatttccagtccggcggcggtgcccatcatcagccccgccagcttctccggcagatgcagctcgttaatgataaacagcggcatgttaatgatgtacaggctgttagtaccccacatcagggtgcagatgctgaacagcagcaacgcatcgcggcggtgcgtgcgcggagcttccagccggccggtcgctaccggctttgctttgcgcatgctgggcaagaatagccagaccatgatcccgcagacgataaacgccgccgcggcgctgagatacatcgcggtaaaaccaaatcccatcgccagggcgtaggccagcgggggaccaatcacccatgccagggagacctgggcacgtaaaatggagctgaacatcaccgcttcgcggccggtcctgtcggcatgctcccgcgcgagggcaaacatctgcgggttggcggtcgatccaaagctgctgagaaaaacgccgatgaacagcaaaatgaaatagttgcggttccaggcaaagagtacgcaggccagcacccccagcagacagcagacgacaatcagctgcttgcgatcgccctgacggtcggagcggccggcgaggaactgactgaccagaatgccaataaccgcgctgccggtaaaaaagaaaccgaccatcgccgggcggacgtgcacttcgttggtcagaaacaggctcagggtcggggtttgcagcgccccggcaatgcccgtaagaaaggcgacgattaagaaggcggaagaggtgacatcgaacccgcgtcgggggagagcggcgctacggttttccatgggtttggttttctgtagtttcaggagacggcgcggagtttacgcctgctggctaaaaataaacagtagtatggcacgaataattaaaaaggcgtttcaaaatatagagttcagcaaaaagctgacgttctaggcggtcgatagctaaggcttcagcaaaagtgtgcagtacctctaagttctgcgatcaagtcgctgacgtaccttgcgcgttgagcaagaaaggtacaaaattcttgaaacgtttcagcgtcattcggcaatccgttccccgtcagatggcgccttttttctcaagttagctgaaacgattcaattcagcaggagaggagaaccatgttccagttatctgtgcaggatattcatcccggccagcaggccggtaataaagaagaggccatccggcaggtcgccgccgcgctggtcagcgccggcaacgtggccgatggctacgtgaacggcatgctggcgcgcgagcagcagacctcgaccttcctcggcaacgggatcgcgatcccgcacggcacgacggatacgcgtgaccaggtgctgaagaccggcgttcaggtgtttcagttcccgcagggcgtcacctggggcgaagggcagaccgcctatgtggcgatcgggattgccgccagctcagatgaacacctcggcctgctgcgtcagctgacccacgtgctgagcgatgacgcggtcgccgcgcagctgcagtccgccaccaccgcggaagagctgcgcgcgctgctgatgggagagaagcagagcgaagcgctgaagctggataacgagaccctcagtctcgacgtcgcggccagcgatctgctgaccctgcaggcgctgaacgcggcgcgtctgaaagaagttggcgctgtcgatgccgccttcgttagccacgtcattaacgatacgccgctgaacctcggtcagggcgtctggctgaacgacagtgcggaaggcaatttgcgcagcgccgtggcggtcagccgcgcggctaacgcctttacccgcgacgagcagccggtttccctgctggtcacggtggcgatggccgacgagcagccgaccgcagtgctgaaccgtctgagcaagctgctgctggacaagaaagctgaacatttgctgaaagccgacgccgccaccgtgctggcgctgctgaccagcgacgacgccattgccgaagatgtgctgagcgccgaattcgtggtgcgcaatgaacacggcctgcatgcccgtccgggcaccatgctggtcaacaccattaaacaattttccagcgacatcaccgtcaccaatctcgacggttccggcaagccggctaacggtcgcagcctgatgaaggttgtggcgctgggtgtgaaaaaaggtcaccgtctgcgttttaccgcgcagggtgaggatgcgcaacaagcgctggatgcgattggcgaagcgatcgccgcaggccttggggagggcgcataaatgagcagacgtgtagcaacgattacgttaaacccggcatacgacctggtgggattcaccccggagattgaacgcggcgaagtgaacctggtgcgcaccaccggcctgcacgccgccgggaaaggcattaatgtggcgaaagtgctgaaagatctcggcattgacgtcaccgtcggcggtttcctgggtaaagacaaccaggacggctttcagcagctgttcagcgagctggggatcgccaaccgtttccaggtggtgcagggccggacccgtatcaacgttaagctgacggaaaaagatggcgaagtgaccgatttcaacttctccggctttgaagtcaccccgggcgactgggaacgcttcgtcaacgactccctgagctggctcgggcagttcgatatggtctgcgtcagcggcagcctgccgtccggcgttagcccggaagccttcaccgactggatgacccgtctgcgcagccagtgcccatgcattattttcgacagcagccgcgaagcgctggttgccggactaaaagcggcgccgtggctggtgaaaccgaaccgtcgcgaactggaaatctgggctggccgcaagctgccggagatgaaagatgttatcgacgccgcccatgcgctgcgcgagcagggtatcgcccacgtggtgatctccctgggcgaagagggcgcgctgtgggtcaacgcctctggggagtggattgctaaaccaccttcagtggaagtagtcagcaccgttggcgccggcgattcgatggtcggcggcctgatttacggcctgctgatgcgtgaatccagcgagcataccctgcgcctggcgaccgccgtcgctgccctggccgtcagccagagcaatgtaggaattaccgaccgtacccagttggccgcgatgatggcgcgcgtcgacttacaaccctttaattgacagcaggagaggcataatgaaaacgctgctgattattgatgccggactcggacaggcgcgcgcctacatggcgaaaaccctgctgggtgccgcggcgccgaaagcgcaccttgagctgattgataacccgaatgacgccgaactggccatcgtgctgggaaccgcgctgccggccgatagcgcgctgaatggtaaaaacgtttacctgggcgatattaaccgtgctgtcgcccatccggagctgttcctgggagaagcgaaagaccacgctaagccctacgttgcgccagcggcggtagccgttccggccgccgctcaggggcagaaacgcattgtcgcggtcaccgcctgtccgaccggcgtcgcccacacctttatggcggcagaagccatcgaaaccgaagccaaaaaacgcggctggtgggtgaaggtggagacccgcggctccgttggggcgggcaatgccatcaccccggaagaggtggccgaggcggatctggtgatcgtcgctgccgatatcgaggtggacctggcgaaattcgccggcaagccgatgtaccgcaccaccaccggtctggcgctgaagaaaaccgcccaggagctggataaagcggtggcggaagccaaaccgtaccagccatccggcaaacctcaggcggctgctgaagggaaaaaagagtcggcgggcgcctatcgccacctgctgaccggcgtctcctatatgctgccgatggtagtggccgggggcctgtgtatcgcgctctcctttgccttcgggatcaaagcgtttgaagtgaaagacaccctggcggcggcgctgatgcagatcggcggcggctcggccttcgcgctgatggtgccggtactggcaggctttatcgccttctccattgccgaccgtccgggtctgaccccgggccttatcggcggtatgctggcggttagcggcggctccggctttatcggcgggatcatcgctggtttccttgccggttatgtggcgaaagccatcagcacgaagctgaaactgccgcagagtatggaagccctgaagccaatcctgatcattccgctggtctccagtctgatcgtgggtttggcaatgatctatctgatcggtaaaccggtagccggtatcctcgcctggctgacccactggctgcaaaccatgggcaccgccaacgcggttctgctgggcgcgatcctcggcgcgatgatgtgtaccgatatgggcgggccggtaaacaaagcggcctatgcctttggcgttggcctgctgagtacccagacctatgcgccgatggcggcgatcatggcggccggtatggtgccaccgctggcgatgggtatcgcgacgctggtagcgcgcaataagttcgacaaagggcagcgggaagggggcaaagccgcgctggttcttggcctgtgctttatctcggaaggggcgattccttttgccgcccgtgacccgatgcgcgttctgccgtgctgtatcgtcggcggcgcggtaaccggcgctatctccatggcggtcggcgcgaaactgatggcgccgcacggcgggctgtttgttctgctgatcccgggggcaattacgccggtgctgggctacctgctggcgattgttgccggaacgctggtggcgggccttgcctacgcggtgctgaaacgccctgaggcgcaaacagcggaagttgaaaaagcggcataatcctaccgcaataaaaaagggccgactgttcggcccttttttgtctctatttacgccacttcggcaatctgctgcgcccgcagccaggcaatctcttccgcccagatatccgggttgatggtttccagaatcagcggaataccgtcgaagcggctgtcctgcatgatccagctgaagcaatcgtggccgatgttgccttcccccaggctgtggtgacggtcgacccggctgccgaaggcgctcttggcatcgttgagatgcatgccgcgcagatactgaaaaccgacgatgcgttcgaaggaggcgaaggttttttcgcaggcttcggcgctgcgcaggtcgtagccggcggcgaaagcatggcaggtatcgatgcagacgccgacgcgggatttatcttccacgccgtcgatgatggccgcgaggtgctcgaacttaaagccgaggttgctgccctggccagcggtgttttcgatcaccgcagtaacgccttcggtcttcgccagtgcgatattgatcgattcggcgatgcgcgccaggcactcctcctccgggatctgctgcagatggctgccggggtggaagttgagcagcgtcagccccagctgctggcagcgggtcatttcatcaatgaaggcatcacgggatttttccagcgcttcttccaccgggtggccgaggttaatcaggtagctgtcgtgcggcaggatctgccccgggccaaagtgatacttttcacaggcggctttgaattcggcgatggtctcgtcgctgagcggcgcggcgcgccactggcgctggttcttggtgaagagggcgaaggcggttgcttcgatttcggcggcgcgaatggcggcattggccagtccacctgaggcgctcacgtgcgctcctacgtatttcataaaaaaactccagttaaagccgctggggggtgggtaatgatagcggcttaactggagaaagatgtagtgctttatgccatcaggctgtggatagcgacgttaatgaccccgccgccgacaatcaaccagacgaacagcatcagcgccatcagcagcggtttcgccccggcttttttcagcgcgctgacgtgggtggtgaccccgagggcggccattgccatcgccagcaggacggtatccagcgtcaccagcatatccaccacggctttcggcagcagatggaaggagttaaacaccgccaccaggatgaacataatggcgaaccacggaatggtaattttacttttctcgccgttgcctgccggggtcagctgtttaacacgcgccgccaggaacagcaggaatggagccagcatcatgacgcgcagcattttggcgataaccgccgcgttctccgcgtccgggctgaccgcatggccggcggcaacaacctgcgccacttcatgcatggtggagcccatatagatcccgtaggtctccggggtaaaccagtgcgccagcagcgggtacatcgccgggtagaggaagatggcgatggtaccgaagataaccactgtagcgacggcaaccgtcactttactggcttcggctttgaccaccggctcggtggcgagcacggccgccgcgccgcagatgctgctgccggcgccgatcagccagctggtgtgtttatcgagaccaaacactttctggccaaggaagcaggcgataaaaaaggtactggagagtgtcagaacgtcaatcaaaataccgctcacgccgacgtcggcaatctgggcgaacgtcaggcgaaagccgtagaggatgatccccaggcgcagcagatgctgcttggcgaagatcaccccgccgtcgcagggctgccagattttcgggtagaccgtgttgccgacgaccatcccgaataggatagcgagggtcagggcgctaaagcctgcgccggcgatggccgggaaactaccggcccacagggcggcgccggtcagagcggcggtcagcgccaggcctgggacaaaatgccacagggaacgatgtttggtgggtaaagtgagtgctgtcataaccttctcctttgtctgcctaaaggttacgccgcgcgggattaaatataaaattgattatatgtttataatcaatcgtaataagtggttaatggccgcttcgccggttacaacggggcgagagcgggttaggcagaagcggggcggtctcgccggcaagacgatgattttgtgatataagcggattttccttccgtcagccgcctcgatttgtgtcaccatagtaaggaaggttattcaggttggattactaaacgggtgggttatgcatattacgctgcggcagctggaagtgttcgccgaagtccacaagagtgggtcgaccactcaggcgtcacagatgctggcgctttcgcaatccgcggtcagcgccgcgctgaccgatctggaagggcagctcggcgtgcagctgtttgaccgcgtcggtaaacgactggtggtgaatgagcatggacggctgctgtacccgcgtgcgctggcgctgctggagcaggccctggagatcgagcagctgtttcgcggcgataacggggcgatccgagtctacgccagcagcaccatcggcaactatattatgccggagattattgcccgctatcgtcatgacttcccggatctgccggtcgagctgagcgtcggcaacagcctggacgtcatcaacgccgtcgccgacctgcgggtggatttcggcctgattgaggggccgtgccatgccgccgatattattgccgagccgtggctggaggatgaactggtggtgtttgccgcgcccaactcaccgctgctggcgggggaggtgaccctgcagcaactggctgaggcgccgtggatcctgcgcgagcatggctccggcacccgggagattgtagattacgttctgctgtcgcatctgccggcgtttcatctgggcatggagctgggtaattcagaggcgatcaagcacgcggtcaggcatggcctgggcatcagctgtctatcgcggcgggtgattgccgaacagcttgcctcgggcacgctggcggagctgaaagtgccattgccccggctgacgcgcacgctgtggcggatccatcaccggcagaagcatatttctaaagcattacaacgttttctgcactattgccaggtgtagcagcccggttttatcgcctgattacggggggaattcgctggcaattccgcaggttagtgctttactaataatttgcgggcgatcatgaagctctcttataactttgcatttgtaccggatggaaccccgatcgtctgctacaatcgcgcctcattttttggatggatagcattatcacatggtttcggaaactaaaaccacagaagcgcccacgctacgtcgtgaactgaaggcgcgccacttgaccatgatcgccatcggcggttccatcggtacgggtctttttgttgcctctggcgcaaccatttcgcaagcaggtcccggcggggcgctgctgtcttatattctgatcggtttgatggtctatttcctgatgaccagcctcggcgagctggcggcgtttatgccggtatccggttccttcgccacctacgggcagaattatgttgaagaaggcttcggcttcgcgctgggctggaactactggtacaactgggcggtgacgatcgccgttgacctcgtggcctcacagctggtgatgagctactggttccctgacactccgggctggatctggagcgccttgttcctcggcatcatgttcctgctgaactggatctcggtgcgcggctttggcgaggcggaatactggttctcgctgataaaagtggccaccgtcattatctttatcatcgtcggcgtgatgatgattgtcggcatcttcaaaggggcgcagccagccggctggagcaactgggggatcgcggatgcgccgttcgccggcggtttctcggcgatgattggcgtggcgatgattgtcggcttctcgttccagggcaccgagcttatcggcatcgctgccggtgaatctgaaaatccggagaagaacattccgcgcgcggtgcgccaggtcttctggcgtatcctgctgttttacgtcttcgcgatcctgattatcagcctgatcattccgtataccgatccgagtctgctgcgcaatgatgtgaaggatatctccgtcagcccgttcaccctggtgttccagcatgctggtttgctgtcggcggcggcaatcatgaacgccgttatcctgactgccgtgctgtcggcggggaactccgggatgtacgcctccacgcgtatgctgtacaccctggcctgcgacggtaaagcgccgcgcattttctcgaagctgtcgcgtggcggcgtgccgcgtaacgcgctgtacgcgaccaccgtgatcgcggcgctgtgcttcctgacttccatgtttggcaaccagacggtgtacctgtggctgctgaacacctccgggatgacgggctttatcgcctggctgggtattgcgatcagccactatcgtttccgtcgcggctacgtcctgcagggtaacgatattaataatctgccgtatcgttccgggttcttcccgctggggccgatcttcgccttcgtgctgtgcctgatcatcaccctcggacagaactacgaagcgttcctcaaggacaccattgactggggcggcgtggcggcgacctacatcggtattccgctgttcctcgtcatctggtttggttacaagctggcgaaaggcacccgctttgttcgctacagcgaaatgaccttcccggaccgctttaagcgttaatcttcgcgattgtgcgataaaagccctctgtgaagagggctttatattgctggcaaagtgcaatcttcagggattgcccggcggcgctgcgcttgcgtaggcctacagataaccgcgtaactgattgatattgcgatgtttcgtaggcctggtaaggcggaagccgccacccggcagacatgtgagcacaataacgaagacagatttgtcatcacccggaagccctctgaacagagggctttttttatgtttgtgcggttacagcttgtcacaattcttcataattatattgataatcgtaatcattatctttatcattttcgcccattacggatgaagccactccccgtctctgccgcttgtacagactgacaccgggcgaccagccacatcgacgagaaaacagcgcgagcatgccgccgacagagcggcaagtcgccagcgcgtgtgagcagcaccttgttgtttgtttggttgtacacctcatggagatttggaatgttcaggttaaacccttttatccgggcgggattgtctgcgtccgtcgtatcgttggcgtttccggctctggccgatgtgaatgaagaaacgctggtggtgaccgcctcggccactgaacagaatgtcaaagacgcgccggcgagcatcagcgtcatcacccaacaggatttacaacgcaagcctgttcagaacctgaaagacgtgctgcgcgatgtgcctggggtccagctcaccaacgaaggggataaccgcaagggcgttagcatccgcggtctgagcagcagctataccctgatcctggtcgacggcaagcgcgttaactcgcggaacgccgtcttccgccacaatgacttcgaccttaactggatcccggtggatgctattgagcgtatcgaagtggtgcgcggcccgatgtcctccctttacggctccgatgcgctcggtggggtggtcaacattattaccaaaaaaattggccagaaatggaccgggacgctgagtgctgataccactattcaggagcaccgcgatcgcggggatacctataacggccagttcttcaccagcggcccgctgatcgacggcgtacttggaatgaaggcctacggcagcctggcaaaacgcgccaaggacgatccgcagtcatccagtaatgccaccggcgagacgccgcgcatcgagggcttcaccagccgcgatggcaatgttgaattcgcctggacgccgaacgaaaaccacgattttaccgcaggctacggctttgaccgtcaggatcgcgattccgattcccttgaccgcaaccgccttgagcgggagaactactctctgagccataacggccgctgggatatcggcaatagcgagctcaagttctacggcgaaaaggtggataacaaaaatccagggcagagcgggactattacctcggaaagcaatgccatcgacggcaagtatgtcctgccgctgggcatgattaaccagctggtgaccttcggcggcgaatggcgccacgacaaactgaaagatccggtcaacctgagcagcggcggccagtcaacgtcggccagccagtacgccctgtttatcgaagacgaatggcgcatcatcgagccgctggcgctgaccaccggcattcgtatggacgaccatcagacctatggcgatcactggagcccgcgcgcctatctggtgtataacgccaccgataccgtcaccgtcaaaggcggctgggcgacggcgtttaaagccccgtcgctgctgcagcttaaccccgactggaccaccaactcctgtcgcggctcgtgcagcatcgtcggtaacccggatctgaaaccggaaaccagcgaaagcttcgagctcggtctctactaccgcggggaagagggctggcttgaaaatgtcgaaggcagcatcaccaccttccagaataatgtcgacgacatgatcgacgttctgcgcacctccagcgccagcgaagcgccgggctacccgaactttgtcggctggaaaactgtcaacggcaagcgcgtgccgatcttccgctatttcaacgtcaacaaagcccgcatcaaaggggtggagacggaggtgaagatcccgtttggcgatgagtggaagctgacggtgaactacacctacaacgatggtcgcgatctgagcaatggcggcgacaaaccgctgcagacgctgccgttccataccgccaacggcacgctcgactggaaaccgctggacgactggtccttctacgtgacggccaactataccggccagcagcgcgcggtgagcgccaccggcaaaacgccgggcggctacaccctgtttgacgttggcgcggcatggcaggtgaccaaaaacgtgaaactgcgctccggggtgcagaacgtgggtgataaagatctgagtcgggacgactacagctataccgaagaaggccgtcgctactttatggcggtggattatcgcttctgattgccggcgctaaaacgcatcctgtaggcctgaacatgcgccgcgtagcagcttcgcggcgcattggcgtttagccaaagagatgctgcgcatggaagcgcagatggtcttcaataaacgaggcaatgaagtaatagctgtggtcgtaaccgggctggatgcgcagcgttaacggccaggccttctgccgcgcgacctccgccagtaccgccggctgcagctgtccggcaaggaatggatcgttgtcgccctgatcgataagcgtcggcacggcgtcctccggccggctggcctgcatcagcgcacagctgtcccaggagtgccatgccgattcatccgcgccgagataggcggtaaacgctttcttgccccacgggacctgggagggattgacgatcggcgcgaaggcggagacgctggcgtagcggccgggatttttgagcgccataatgagcgcgccgtggccgcccatcgagtggccgctgacggcgcagcgttcgccgacgctaaactcgctacgaataagcgcgggcagttcgtcacgcaggtaatcgtacattcggtagtgcgccgcccagggcgcctcggtggcgttcaggtagaagccggcgccttgtccgagatcgtaaccgtcgtcgttggccgcctcgtcaccgcgcgggctggtatccggcatcaccagcgcgatgcccagctcggcggcaatgcgctgggcgcccgccttggtggtaaagttctcatcgtaacaggtcagccccgacagccagtacagcaccggcggcggcgtttcgcgctcaggcggtaaaaaaatgctgaacgtcatggcgcagttcaggacaggggagtgatgacgccagcgttgttgctggccgtcaaaacagcgatgctcttcaagcagttccatgcaaggctcctcggaagggatgtgcgcgtaaacgttcataatacagatatttcattagccggtgagcaactttcactttctccttttgagaacttactgcatcattaatgcaacttatagccaacatgccggtgtagcgacggcgcttatgaatgcgtacagcggttggaacattccggatacggcgataaggatttggcgtcgcgcctgaggcatggcttcgctccctaataaaaggcagcgccaatttcaataattatcgttacggctactggattctgtgcgccacctcacgcacaatgaatacaaactttgcccccagaaaaagcaaagagcgccacacctgcaggagaaacataaatgtcatcactgagtaaagaagccgtcctcgttcatgaagcgctggtcgctcgtgggctggagacgccgatgcgtgcgccagtacaagaaattgataacgaaacacgcaagcgtttgattaccggtcatatgaccgagattatgcaactgctgaatctggatctgagtgatgacagtctgatggagaccccgcatcgcatcgccaaaatgtatgtcgatgagatcttctccgggctggattattctcgcttcccgaaaatcaccgtcattgaaaacaaaatgaaggtcgatgaaatggtcaccgtgcgcgatatcaccctgaccagcacctgcgaacaccatttcgttaccatcgatggtaaagcgacggtagcctatatcccgaaagattcggtgatcggcctgtcgaaaatcaaccgcatcgtgcagttcttcgcccaacgtccgcaggtccaggagcgtctgacgcagcagatcctgatcgcgctgcagacgctgctcggcaccaacaacgtggcggtatccattgacgcggtgcattattgcgtgaaggcgcgcggcattcgcgacgcgaccagcgccaccaccaccacctctctcggcggcctgtttaaatccagccagaatacccgccaggaattcctgcgcgcagtacgtcaccacgactaaaacggagcagggtgcatggagagaaatgtcacgctggactttgtccgcggcgtcgccatcctcggtatcctgcttctcaatatcagcgccttcggcttgccgaaggccgcttatctcaatcccgcctggtcaggaagcgcgtcccttagcgatgcctggacctgggcgctcctcgacctgctggcgcaggtgaagtttctcaccctgttcgcgctgctgtttggcgccggtcttcagctattgcttccgcgagggaagcgctggatccagtcgcggctgacgctgctggcgctgctcggtttcattcacggtctttttttctgggatggcgatattctgctggcctatgccctggtggggctggtgagctggcgcatggtgcgtgaggcgcaccatgtcaaatcgctgttcaacaccggggtggtgctctacctcaccggcattgcagtgctggtcctgttggggctgatctccgggaccgcggcgaatcgctcgtgggcgccggacgcggcgaacctgcaatatgagcagtactggaagctgcacggtggcatggaggcggtcagcaaccgggcggatatgctatctgacaatctgctggcgctgggcgcgcagtatggctggcagctggcggggatgatgctgatgggcgcggcgctgatgcgcagcggctggctgaaggggcagtttagcctgcgtcactaccggcgtaccggcgcgctgctggtggcggccggcatggcggtcaatctgccggcaatattcgcccagtggtatctggcctgggactatcgctggtgcgcgtttttactgcaggcgccgcgcgaacttagcgccccgctgcaggctatcggctatgccgcgctggcctggggctactggccgcaactctgccgtttccgcctggtgggcgctatcgcctgcgtcggacgcatggcgctgaccaactacctgctgcagaccctgatctgcaccaccctgttttatcatcttgggctgtttatgcgcttcgatcgtctgcagctgctggcctttgtcccccccatctgggccgttaacctccttgtctcatcgctctggctgcgccgcttccgccaggggccggtggaatggctgtggcgtcagttaaccctgcgtgcgtcaggcacatcattgaaagacacatccagataacgatctcgatcacaatcattaacaaaacggatgtaaacgtttccagccgtgtgacctcactcacgcagcggaccgcgggtcgctgccagaatatcctccttgctaagcacaggaggtgaatgtgacgtgctgtaattctcttaaggtcgctgagtatgatcaccattcgtgatgtcgcccgccaggcgggcgtttccgtggccaccgtgtcgcgggtgctgaataacagcgcgctggtgagtccggatacgcgcgacgtggtgatgaaagcggtgacccaactgggctaccggcccaacgccaacgcccaggcgctggccacccaggtcagcgataccatcggcgtggtggtgatggacgtctccgacgccttcttcggcgcgctggtgaaagcagtggataccgttgctcagcagcatcagaaatatgtgctgatcggcaacagctatcacgaggcggaaaaagagcgtcacgccatcgaggtgctgatccgtcagcgctgctcggcgctgatcgtccattcgaaagcgctgagcgatgatgaactgagcgactttatgcaacatatcccggggatggtgctgatcaaccgcatcgtgccggggtatgcccatcgctgcgtcggactcgacaacgtcagcggcgcgctgatggccacccgtatgctgctcaatcatggtcaccagcgcatcggctatctctcctcaaaccacggcattgaagatgacgatatgcgccgggaagggtggagcaaagcgctgcaggagcaaggcatcatcgccccggacagctggatcggttccggctccccggatatgcagggcggtgaagcggcgatggtcgaactgctggggcgcaatctcggcctcaccgcggtgtttgcctataacgacagcatggcggccggcgcgctgacgacgctgaaggacaacggcattgtcgtgccgcagcatctgtcgctgattggctttgatgatattcctatttcccgttacaccgatcctcagctcaccaccgtgcgctatccggtaatgtcgatggcaaagctggccaccgagctggcgctgctgggggcggccggcaagctggatcgcgaggcaacgcactgctttatgccgacgctggtgcgccgtcattccgttgcccagcggcaaactgtggggccgatcactaactgacgcgatcgcgggatgtaaccgctttcaatttgtgagtaaattcacagtatattaacattcgcctgattatgatggcagcgtttaccagtctgaaccacaaggtgatggatattcctcactttatttagtaggaacaaggcgttaaacgagttttacagtcgtatttttctggagcgttacccgacacggaagaccgaattttcgtcgtgaaatgcgttgtgcggtaacactaatgcaacaaatcccgcctgcattttctcacaataatgaccctgcataataaaaccggagattccatgaataagaaggtgtttaccctgtctgctgtaatggctggtctgttatttggcgccgccgcacacgcagcagatacccgtatcggcgtgacgatttataaatatgacgacaactttatgtcggtagtgcgtaaggcgattgaaaaagatggcaaatccgcgccagacgtccagctattgatgaatgattcgcagaacgaccagtcgaaacaaaacgatcagattgacgtgctgctggcgaaaggcgtgaaggcgctggcgattaacctggttgacccggccgccgcaggtacggtgattgaaaaggcgcgcgggcagaatattccggtggtgttcttcaacaaagagccttcccgcaaagcgctggatagttatgacaaggcttattacgtcggtaccgactcgaaagagtcggggattattcagggcgatctgatcgccaagcactggaaagccaacccgaactgggatctgaataaagacggtcagatccagtacgtcctgctgaaaggcgagccgggccatccggatgcggaagcgcgtaccacttacgttattaaagagctgaatgataaaggtctgaagacccagcagctgcagctggataccgcgatgtgggataccgcccaggcgaaagacaaaatggacgcctggctctccggcccgaatgccaacaagattgaagtggtgatcgctaacaacgacgccatggcgatgggcgcggttgaagcgctgaaagcgcacaacaagagcagcattccggtgttcggcgttgatgccctgccggaagccctggcgctggtgaaatccggcgcgatggccggtactgtgctgaacgatgccaacaaccaggcaaaagcgaccttcgagctggcgaaaaaccttgccgacgggaaagacgccgcggcaggcaccaactggaaaattgacaacaagattgttcgcgtcccctacgtgggcgtcgataaagacaacctgagccagtttaccggcaaataatcgtgatgtgagttgcgggcgtgggttatccacgcccgattattcctgatacagaaccagactcctgctggcgctagtgcgccggacggggcttgcatgaacgcagccaggtataactatggtcagcaataatagcgaacggtcaggcgaatatttgttggagatgagcaacatcaacaaatcgtttcctggcgtcaaggctcttgataatgtcaacctgaaggttcgtccgcactccattcatgcgttaatgggtgagaacggcgccggtaaatcgacattattaaaatgcctttttgggatctatcaaaaagattccggtagcattctttttcagggaaaagagatcgatttccattcggcgaaagaagccctggaaaacggtatttcgatggtgcatcaggaattaaacctggtattacagcgttcggtcatggataacatgtggctcgggcgctatccaactaaaggcatgtttgtcgatcaggacaaaatgtaccgggataccaaggccatttttgatgagctggatattgatatcgatccgcgcgcccgcgtcggtaccttatcggtatctcagatgcagatgattgagatcgcgaaggcgttttcctatgacgccaaaatcgtcatcatggatgagccgacgtcatcgctgacggaaaaagaggtcaaccatctgtttaagatcatccgtaagctgaaagatcgcggctgcggtatcgtctatatctcgcataaaatggaagaaattttccagttgtgcgatgaaataaccatcctgcgcgacggccagtggatcgccacccagccgctggaagggctggatatggataagatcatcgccatgatggtcgggcgttcgcttaaccagcgttttccggatcgcgaaaacactccgggcgaagtgatcctccaggtgcgcaatctcacctcgctgcgccagccctccattcgcgatgtctcctttgacctgcataagggcgaaattctcggtatcgccggcctggtgggcgctaaacgcaccgacatcgtggagaccctgttcggcatccgtgagaaggccagcggcaccatcacgctgcacggaaagaagatcaacaaccacagcgccaacgaggcgataaaccacggttttgcgctggtgaccgaggagcggcgctctacagggatttacgcctatctggatatcgggtttaactcgctgatctccaatattaagaaatataaaaacagcgtcggcttgctggataactcgcgaatgaagagcgatacccaatgggttattgactcgatgcgcgtcaaaacccccggtcagcatacgcagattggctcgctttccggtggtaaccagcaaaaggtcattataggccgctggctgctgacccagccggagatcctgatgctggatgagccaacgcgcggtatcgacgtcggcgccaagtttgaaatctatcagctgattgccgaactggctaaaaaagacaaagggatcattattatttcttccgaaatgccggaactgctggggattaccgaccgcattctggtgatgagcaacggcctggtcgcgggcattgttgagactaaaaccaccacgcaaaacgaaatactgcgtcttgcgtcattgcacctttaagatcaggggcttcacatgagtgcgttaaataaaaagagttttctcacttacctgaaagagggtgggatatatgttgtccttctggtcctgctggccattattattttccaggatccgacatttttaagtctgctcaacctgagtaatattctgacccagtcctcggtgcgtattataattgccctcggcgtggccggacttatcgtcacgcaggggaccgacctctccgccggccgtcaggtgggtctggcggcggtaattgccgccaccatgctgcaggcggtggataatgccaataaggtattcccggatatggcgaccatgccgatcccgctggtgatcctgctggtgtgcgccatcggggcggtcatcggcctgattaacgggatcgtcattgcctacctgaacgtgacgccgtttattaccactctcggcaccatgatcatcgtctacggcattaactcgctgtactacgacttcgtgggcgcgtcgccgatctccggcttcgacagccacttctcccatttcgcgcaggggtttgtggcgctgggctccttccgcctgtcctacattaccttctacgcgctgattgccgtcttctttgtctggatcctgtggaacaagacgcgctttggcaaaaacattttcgctatcggcggtaacccggaagcggcgaaggtctccggggttaacgtagcgttaaacctgctgatgatctatgccctctccggcgtgttctacgccttcggcggcctgctggaagccggtcgtatcggttcggcgaccaataacctcggctttatgtacgaactggacgccatcgccgcctgtgtggtgggcggcgtatcgttcagcggcggggtagggacggtgtttggcgtggtgaccggggtgattatcttcaccgtcatcaactacggcctgacctatatcggcgtcaacccttactggcagtacattattaagggggcgattattatcttcgccgtggcgctggactccctgaaatacgcccgtaagaaataagattgaacgcatcaaaaacccgcgcctggcgcgggtttttttatatctgaaacgaatgcgttgatggaggctacttttctttctgcagctccagcagctgctccggggtgacggccgggtaggactgggcgtcatccggcacgtcatgctgctgcgccggaatcgggatgagagggccgagaaagcgcggttcccgtttgaagatatagagatccgccagcgcgccaaagcgggcgccgaactcgcgcagccgcacgctccacatatccttcggcgacggcaccgcgtagcactgggcctggatccccatatgcagggcgataaacagcgcccgttcgcagtggaagcgctgggtgatgataatgaagtcgttggtgtcgaacactttccgggtacggacgatcgagtcgagggtacggaaaccggcatagtccagtacgatatccgcgggatcgacgccgcctttaatcaggtcccgacgcatggtcatcggttcattgtagctttgcagagcattatcgccgctcagcaggagatagttgaccttgccgctgttgtaggcgttcagcgcaccctggatgcggtaacggtaatactgattgatgacgccggtgcggtaatatttggcggtgcccagcaccacaccgacctgacggtagggcaggtcctgcagttcatcatagatatagggcgcggttttccagctcatccagcggtcaaggcccagcacggtcaacagcagcaggccgagcaggactaacaggctgtagaacgcacgctttaacatgaacttggctcaataatagacaacggagtcttcaggctactttacccgccgggtaagcgcaagaaacccgcgtttgattgcggggattttcagcaatatagacagatcgccgaatgcaggccgggtaaggcgtgagccgacacccggcatagggatcttcaggtcgccatggcgcgaaccgtaggtcgggtaagcgtagcgccacccgacacctaacggtataaaaagtcggccggataagccgaagacgccgtccggcaatctgctcaggctgatcaacctaacaggacgcgctcaatattgtggcagcccagcgccttcagggtggcgacggtggcatcccactggctcagcgccgcgtcggctttctccgccaggattgcccgctggatagcgggataatcatagccgttgaggctcaggagattcagcgccccctgcagcggcggcagcgtcgggttgaacgctgcgttttccgcatagctaccgctgaaaatggtaccgtctttcagctccagcgccacgccggaaggcgagtggctgtagggcgcatggcagcggttggcggcctgaatagctgcctgggttagggcatcgccgctgaccgggaagccatggtcctgttcatccatcagcagggttttgatctccaggtctttcgggccaaaggcgtccggcagatagtgctccagggcatgcgcttcgcgacccggcagatgaatgcgcagcgccagcccgctgttcagttcgttcataaactgacggcaatgaccgcacggcgtgtagttcaccgtgatagcgcgcagggaggtctcgccgcgcagccaggcgtggctgatggcgctctgttccgcgtgaacggtctgctgcatggtagcgccgagaaactccatattgccgccaaagtaccagcggccgctgacgccgcgggcgatagccccgacgttaaaatgagaaaggtcggggcgcgcgcaggcagcggcaagcggcagtagcgcaaaagccagcgcgtcttcgtccagacctgtcgcatgctgcagcgtcgccacctgatcggcttcgagcagcgccgggaaatgcgggtcggcgagcatcggggcgatggccgcctgcagatctgctgccagagtcgtcaaagcagcttgaaaacgtgagtgcatagcgttgcctcataacagtgtaatgggaagccagtgtacgggcggccagcggttccatatgtgatgaatatctcattctttatgcaactctgatttgttgcattaaaaaatgtgatttaaatcactattaacctaccactgcgaggatcagcggaaataagaacggcgccatcaacgaggtgatgatcccgcacagcaccagcgccagtgagctaaacgcgccttcctgatagtccagctcggcgcagcgggcggtgccgagggcgtgcgaggcggtgcccattgacaggccgcgcgacgctttggtgcgaatgcgcatcaggttaagcaacgtatgcccaaataccgcgccgaggatgccgacaaaaattacgcacacggcgctgatggccggaatgccgccgatgctgccgctaaccgccatagcaatcggcgtagtgactgacttaggtagaatagaggcggcgatttgcggcgtggcgcccatcagcagagcgacggtggtgccggtgatcatcgccacgcagctgccgataaagcagatggtaatgatagatttccagcgggcgcggatctggtgcagctgttcatacagcgggaacgcaagggccactaccgccggctgcagcagatcgttcaggactttgctgccggcaaaataacgctcataggagatcccggtcagcagaagaaatggaataatcaccaccatcgccaccagcagcgggttgagcagcgggaacttaaagcgggccgccagtttgcgggcgagaaaaaagacgatcagggttagcggtagcgaccaccagatttcatgcatcattcttcttttcctttttggccaatcactttacgttcgccatgcaccaaatgggagctccagctcaccactacaaacaccaccagcgtactgatggcgcaggagataacgacaggccccagctgggcgcgcagcagatcccagtactgcatcaccccaacgccgatcggcacgaacagcagcgccatatagcggatcaggatattacagccggggttgacccattgcggcggcataatttgcagcgccagcagcacgaagaggatcagcatgccgatgatgctgccggggatagtgataggcagcagcccggcgataaaaattccgccgtacaggcaggcgtaaatcaggacgaaagcccgcaggtactgccagataatagtcagcgatttactcatggtaataacccttgatgaagtgcattcatcatacaattaatccctaaaatgtgctaccgatcacatcatgaattctatgcatagcgctgatagcttacgggaaccatagtctcacccgtcagggcccgacaccttgcggctcaggcgggatcgctccccacgctaccttgctgaatgaggcgcggcaaataaaggcgaatgggacgccacagacctctgtaaagcatagagattatctcgccgctttgccgcatcgagcgtgcggggaacggcgtgcgtctggtccgacgcattgagcgctttcaaccagcgcccggaggcgctaccatagcgcctcttttttttccgggtaacgatatgcgtgttctactggcgccgatggaaggcgtgctcgattcgctggtgcgcgagctgctgaccgaggttaacgattacgatctctgcatcaccgaatttctgcgcgtggtggatcaactgctgccggtaaaatcgttctacaggctatgcccggaactgcatcaccagagccgcacgccgtccggcacccgcgtacgcgtccagctgctgggacaatatcccgagtggctggcggaaaatgccgcccgcgcggtggcgctgggttcatggggggtggatttaaactgcggctgtccgtcgaagctggtaaacggcagcggcggcggggcaacgctgctgaaagatccagagttgatctatcgcggcgcgaaagccatgcgagaggcggttcccgagcatctgccggtgacggtgaaagttcgtcttggctgggacagcggtgaacggcgctttgaaatcgccgacgcggtgcagcaggcgggggccagcgaactggtggttcacggccgtaccaaagaagatggctacaaagccgaacgcatcaactggcaggcgatcggcgagatccgccagcgcctgactatcccggtggtcgccaacggtgaaatctgggactggcaaagcgcccaggattgtatggctgtcaccggctgcgattcggtgatgattggccgcggggcgctcaatgtgccgaacctcagccgggtgatcaaatacaatgaaccgcgcatgccgtggccgcaggtggtccagctgttgcaaaaatatacccgcctggaaaagcagggtgataccggtctgtatcatgtggcgagaattaagcagtggttaggctatttacgcaaggaatataccgaggcgctgaccctgtttaatgaaattcgcgccctgcaaacgtctgctgaaatagcggcggcgatcggccgctattaaccgccatactgttattcgcttcacatattattacttgcatgcctattgatgataggcatgggttgaataaagtgataatgtgcggtcaaccaattcaggattgctactgaactcaggcaaaacctaagcactttcgtcattcgtggcgcaaagtgcttaggtttttttttggtaaaaattcagggtggataaaatgatgatgtaaaacaatgagatgtgaataacgatttctctggcattgtcgcggttttattaccgacggacgctttttgccattcattttttaaaaaaagaaaacgggtaaataaatagcctggggatccccattgtttttattcagtcacggtggatatcacaatgcataacaaaaaaataaatcagcttttgatcggcgctatgctggcggccatggcgcctgccgtgagcgccgcggacatcccggcgtggaacggcagcgcgctggggtttgaagccgggcagcaagggctgctgggcgatatgctaggcattcgtccgatccttgaagaaaacggctttcattataatctcggctatcttaacgagatggcctacaacgccggcggcggctataaccatgataaacatctggcctatattgaccaggtgtcattgacctttacccaggatctggagcgctggaccggcataccggacgcgcggcttgagggcaatatcgtcaaccgcaaccatgatgataacctcaccacgaaacggctgcaggatccgcgggtgagtttcaacgatctatcgcaggagagctggggcggcgggtcgattacccgccttggctggctcacctttgcccgcagctttgacgaccgccgcctgacctggcgcatcggcatgatgaacaaggtgcaaaccttcgaccagatcattccctgcgattttcagctgctgacccagtgcggtgggaaatcggccaactcgctgacctggaataactggaacattcacacctggggcaccaccctggagtacaagctgacgccgacggtcaccctgaaaggcggggtgatggagcaaaacccgcaggctaccgcgcgcagccacgcgtggagctggtcgacgaagggtagcaaaggcatcttactgccgatggagatcgaaacccgtccgctgattaatggcctgccgggagcctataaccttggcgtggtctggactaacgcgccgcagagcgacctctacagcggtaaatccggcggcgccggggcgaccgatccgcaaggttacgccgagcacgacagcacctggtttatgtacgccggcctgaaccagcagatcacccgccacgccgacgacccgctgcggggaatgagcgtctcactgagcggcagcctcagcgaccagcgcagcaactatatccactccgccgtcgccgcctccatgcgctaccgcggtctgtttgacgcccgcccggaggactggattggcttcggcctgacgtggatcgacatgagcagccactacgcacgtaatcagcgctatatgaatcagataagcggcgccaccgactataacgatccggcttaccagccggtggccggtcattcgctgaacggtgagctctattatcgcttccgcccggtctcctggctggagctgcagccgggcctgcagtactggcaccgtccgggcggcgtcgcgcagacccaggacgcgtgggtagtggagtggaaaaccgtcgtgaccttctgatagtcgcgatcttaatcacgttttttcacttgtcaggttgagcgcgcagcagaagttgttacagtgcgggtgttggattgcaactgctgcggcaggcaaaacctgatcacctggcgtttcgtcgggggtcaggtttttttgtttctggggtctatatgcaaatcgccaaagtactcaataacaatgtggtggtggttctcgacgagcaccggcgcgaacaggtggtgatggggcgagggctggcctttcagaaacgcccgggcgacgtgctggacgacagtaaaattgaaaaagttttcgccttacaaagcgatgagctggtcggccgcttaggcgagctgctcagtcaaataccgttagaagtgatgaccacctgcgatcgcattatcgacctggcacgcggacggctgggcaagttacaggaaagtttgtacatcacgttaacggatcactgtcattttgctatcgagcggcagaaaaagggcatcgcactgcgtaacgtgctgctgtgggagattaagcggctgtatccgaaggagttcgcgctgggccaggaggcaagggccatcattgccaaaaggctcggcgtggagttggcggaggacgaagccggatttatcgccctgcatctggtgacggcgcagctcaacagcgaaatgccggaggtcatgcacgtgacccgggtgatgcaggagatcctgcagctggtgaagtatcagctgcagcttaactacgatgaagagtcgctgagctatcagcgtttcgtcacccacctgaagtttttcgcccagcggatgctgacgcgcacggtggtggaagatgacgacgtctcgctgcacagcgcggtgaaagataactacgccaaagcgtggaagtgtgcggaaacggtggcgacgcatctgcaaaagcagtatcagcggtcgctgaccaccgaagaaattatgtttcttgccattcatatcgaacgggtaagaaaagaggggcgttaattctccccaacaaaactggattgttactgcatgatgcaggcaaaacctgagcgcgacgcccaccggcgtggttctcgggtttttttattttttactactcagtcgccggttgtctgcgggcagcggcagtaaggaaaagagcatggaatataaagcactcgcgcaggatattctcaaccgcgtcggcggcaaagagaacattgtgagtctggttcactgtgcgacacgtctgcgttttaaactgaaggataacggcaaagccgatgccgaagggctgaaggccaatccgggcgtgattatggtggtggagagcggcggccagtttcaggtggtgattggcaaccacgttcacgacgtctggctggcggtgcgccaggaggcggggttaagcgatgacaacgaaccggttgccgaggaaaaagcggccaaaggatcggtgttaagccagcttatcgacatcatctccggcatctttacaccgtttatcggcgtgatggcggcaaccggtctgctgaaaggcctgctggcgctggcggtgacctgcggctggcttacgccggagcaggggacttataaaatctggtttgccgccagcgacgcgctgttctttttcttcccgctgtttcttggctataccgccgggaagaagtttggcggcaacccgtttatctcgatggtgattggcggggcgttaacccacccgctgatgattcaggcctttgaggccagccaggcgccgggcgcggcggtggagcactttctcggcattccggtgacctttatcaactacagctcatcagtgatcccgattattctcgcctcatgggtctcctgctggctggagcgcaagagcaatgcgctgttgccgtcatcgatgaaaaacttcttcagcccggcgatctgcctggcggtggtggtcccgctcaccttcctggtgattggcccggtcgccacctggctgagccatctgctggccaacggctaccagttcatttatgcgtttgccccatggctggcgggcgcggtactgggcgccatgtggcaggtgtgcgttattttcggcctgcactgggggctggtgccgttgatgatcaacaacatgacggtgcttggtcacgactccatgctgccgattattcttccggcggtgattgcccaggtgggcgccgtgctcggtattttcctcgccacccgcgatgcgcgccagcgggtgctggccggttccgccttctccgccgggctgttcggcatcaccgagccggctatctatggcctgactctgccgctgcgccgtccgtttatcttcggctgtgtcgccggggcgattggcggggcgatcactgcctttagcaacagttatgcctactcgtttggcctgccaaacatctttttcccggcgcaaatgatcccgcccggcgggattgacgccagcgtctggggcgggcttatcggcaccggcgtggctttcgtgctcgcctgcgtgctgaccttcttcgccggcctgccgcgcggtagcgccgcaccaggcgccgtgacggtagccccggcctcggcaaacgatattctggcgccgatgagcggcagcgttatcgccctcgagcaggtgccggatagcaccttcgccagcggcctgctgggtaaaggtgtcgccattatcccggcggtgggccaagtgattgccccgttcccgggcgaagtggcctccctgtttcagactaaacacgccatcggcctgcaaagcgacagcggcattgagctgctgatccacgtcggcatcgacacggtcaaactcgacggcgtgccctttaccgcgcatgtgaaagagggcgacagggtacaggccggcgatctgctgattgagtttgatcgccaggcgattctggacgccggctacgacctggcgaccccgatcattatcagcaacagcgacgactaccgggagattgatacggtggcgtccagcaccgtcgaagccggtcagccgctgttgtcagtcagccattaatcacaggagaaaaagatgaaaacattcccgacggattttttatggggcggcgcgaccgcggccaatcaggtggaaggtgcttatctggaagatggcaaaggcttatccacctccgatgtacagccgcacggcgtgttcggcgaagtggtcgagcgcgtaccaggcgacaacgggattaaggatgtggcgatcgatttttaccatcgctatccggaagatatcgccctgtttgccgagatgggttttaactgcctgcgagtctctatcgcctggacccgcatctaccccaacggcgacgacgccgagccgaacgaagccggcctcgcgttctacgacaagctgttcgacgagatggcgaagcacaacatcaccccgctggtgacgctatcgcattatgaaatgccatgggcgctggtaaaaaactacggcggctggggcagccgggaggtgattggcttctttgagcgctacgcccggacggtgttcagccgctataaaaataaggtcaaactgtggctgacctttaacgaaatcaatatgtcgctacatgccccgatgaccggggtcggcctgccggccggcagcagcaaaggcgaggtgtatcaggcgattcaccaccagctggtggccagcgcgctggcggtcaaagcctgtcatgagctggtgcctgagggcaaaatcggcaatatgctgctcggcgggctgatgtatcccctgagctgcaaaccggaggatgtgtttgagacgctgcaggagaaccgcagctggcagttcttcggcgacgtacaggcgcgcggcgcgtacccgggttatatgcagcgctatttccgtgacaacggcatcacgctcaccatcaccgacgccgatcgtgaagcgctaaaaaccaccgtcgactttatctccttcagctactacatgaccggctgcgtcaccgcagacgaggcgctgaaccagcaggcgcgcggcaatattctcagcatggtgccgaacccgcacctggcgagctcggagtggggctggcagatagacccgctgggcctgcgcacgctgctgaacgtgctgtgggatcgctaccagaagccgctgtttatcgtggaaaacggtctgggcgccaaagataaggtggaagccgacggcagcattaacgatgactaccgcatcagttacctgaacgaccacctggtgcaggcgcgggaagccattgacgatggcgttgagctgatgggctttaccagctggggaccgatagacctggtgagcgcctcaaaggcggagctgtcgaagcgctatggctttatctatgttgaccgccatgatgatggcaccggcaccctggcgcgcagtaagaagaagagttttgactggtataaagaggtgattgccagccgcggcgccagcctgaaagcgtaaagcatgcccgcccggccatcgccgggcgggggattagcccggtttacgcgcgcgcagtaaaaaggtcatcggaggttctttctcttcatccagagcgggcaggatggaaaagaggtgcggctcgttaaaagatgccggcttatattcatcccttgaattgataaggttgtttatttttagcaaactaataatttagtcacacgctttactaaacgcgtttaattcaattaacttatgataaccaacctgattaagttatctgacctgtccaatgaaattgatattaaataaaagcgtgctggcggcattgcccctggccatcgcgctggctggctgcgcgccatctcatgaggttgctaatccgccgcagcagcaaattccagcctcccatgtttccatggatctccctgccgccgtgaaaaatggctggccgcagactgactggtggaaagattaccatgacccacagcttaataatctgattcagcgagcgttggccaacgcgccggatatgcagattgccgaacagcgcatcaggcttgccgaagcgcaggcgcgaatgtcgcaggcgaatcttggcccggagatggatttctccgccgatattgaacgccagcgcatgtcggccgaaggcctgatgggaccgtttgctaccgacaccgacggcaataccggcccgtggtacaccaacggtacctttggcctgaccgccggttgggatctcgatctgtggggaaaaaaccgtgcgctggtgaaagcgcgtatcggcgagctgaaagcccaggttgctgaacaggcccagacccgtgagctgctctccggcagcgtggcgcgtctgtactggcagtggcagacggaagcggcgatcaaagcggtgctgcagcaggtgaaaaacgagcaaaataatatcgtgacggtcgacaaggccctgtatcagcgcgggatcactaactccgccgaaggggcggagaacgatattaacgtcagcaaaaccgaccagcagctggcggacgtgacgggcacgatgaaagagattgaagcgcggctgatggccctgaccaacagccagagccagtcgctaaacctcaaacccgccagcctgccaacggtcagcgcgcagctgccagataccctcggctatgagctgctggcgcgccgcccggatctgcaggtcgcccactggtatattgaggcgtccctgagcgaagtggacgcggcgaaagcggcgttttatccggacatcaatctgatggcgttcctgcagcaggatgccctgcacttaagcgatcttttccgccattcggcgcagcagatgggcgttactgccgggttgacgctgccgatctttgacagcggccgccttaacgccaacctggatatcgccagcgcgcagaatagcctgtcgatcgcccagtacaacaaagcggtggtggatgccgttaaccaggtggcgaaaaccgccagccaggtcgaaacattaatggccaaaagccagcagcagcaccaggttgaaaaagacgctcagcgggtagtagatctggcgcaggcccgaatggcggcggggatcttacctggctccagagtcagtatggcgaagctcccggcgctgcaggagcggatcaccgcattgcgcctgcacggccagtggattgacgccagcattcaactgacctcggccctcggcggcggctaccaccagacggtgaagtaaccgctaaccacggtgcgcccgcgggcgcgccgcttagtctttcttcttactttcgcgccgcctgagccaccagtgggcggccaccaccaccaccaccgcgaggatcagccagatccagtgcttcagatgggcgtccagatgatgcagccacgggccaaccacctcgccgccgagatagccaatggtagtaaacagaagggcccacaccagcgctccgacaatattcagcggcaggaaaatgcgcggcggcaggcggctggcgccgatcagcagggggccgattacccggaagccatacataaagcgggtgccgatgacaaacagccacggccggtgctggatcatacgctgcgctttacggatccgcgctttctgactggcgaaacggcgcaggatgcgtcccccgaagcggcgaccgaccagatagagcagctgatcgccaatcatcccgccgagggcgacggcgatcaccaccaggggaaatttcagtagcccctgatgcgccgcgacgccgcccagcagggtaatggtctcaccttccgccatgctgccgacgatcagcgccgcgtagccatactgggaaatcaggtgattgatatccataaaaagcttttctccttacctcatcacctcttaatcatacaccctgctgaccaaaacgcggcgacgcagaattttctgtgctgtacataaaataatctacagggtgaattatacttggatcagtgcagtacgaagccgtgacaagggggacgctatgaaccatgtctgggggctcttcgctcatcccaaccgggaaatgagcgtgattaagagcgagaatgaaaccatttctcatcactatacgcatcatgtgctgctgatggcggcggttccggtagtctgcgcctttatcggcaccacgcagctgggctggaacttcggcgatggcaccgtgattaaactgtcgatgctgaccggactggcgctggcggtgctgttttacgccgtgatgcttgccggggtggcgatcatggggcgggtcatctggtggatggcgaggcagtatccgcagcagccttccctgaaacgctgcatggtgtttgccggctacgtcgccaccccgctgtttctgagcgggattgtggcgctctatccgctggtctggctgtgcgcgctggtcggtactattgcgctgttctataccgggtatctgctgtatctcggcattccgaccttcctgagcattaatcgggaagaggggttaagctttgccagctcgacgctagctattggggtactggtgctggaagtgctgctggccatcaccgtggtgctgtgggggtatggctaccgactcttctgatcggacgtcacgggtaaatatgcattgccggcaaatatgtattttatgtcggcaatgcagcatttcttcacgattcttattaggcacagggccttacggcgcggtatgatggcgtttgccagcgaagttgcccacttaacctcgcggcgtacgttccataacgtgcaaaaatacttttcagaatgcccatgatgccgaaatttcgagtctctttgctcagcctgaccttgctgctggctgtgccttttgcgccccaggcgttagcaaaaaccccgacggcggtgaccgcctcgcagccggaaattgcctccggcagcgccatgatcgtcgatctggccacgaaaaaaatcatttatgccagccagcctgatctggtgcgcccgatggcgtcgatcaccaaagtgatgaccgctatggtggtgctcgatgcccatctgccgctggatgagatgctgacggtggatatcagccatacgccggaaatgaaggggatctactcccgcgtgcgcctcaacagccagattagtcgccgcgatatgctgctgctggcgctgatgtcttccgagaaccgcgcggccgccagcctggcgcatcactatccgggcggctacgacgcttttattcgcgcgatgaacgccaaagcccaggcgctcggcatgacccatacccgctacgtggagcccaccggcctgtcggtgcataacgtctccaccgcccgcgatctgaccaaactgctgatcgccagcgagcagtatccgctgatcggccagctgagcaccaccaaagaagagaccgccaccttcgcccatccggcctacagcctgccgttccgcaacaccaaccatctggtgtatcgcgataactggaacattcagctgaccaaaaccggcttcaccaacgctgccggccactgcctgattatgcgcacggtgattaaccaacgtccggtggcgctggtggtgatggatgccttcggcaaatatacccacttcgctgacgccagccgcttgcggacctggattgaaaccgggaaggtgatgccggtacccgcctcggcgctgagctataaaaagcagcgcgaagcgcagatggcggaggcgatgctgaaaggcggcgcgcagaccgcgcagaacgattaatctgcatgtctcccggatggcggcgcattgcgccttatccgggctacgtgatttggcgccgggttcgcccctttcgtaggcccggcaagcgcagcgccgccgggcaatcaggccgagtgccggtgtttgtgcaggatggcggctgacgcctctccggaaccgcgctgaacggtagcccggctaaggcgtttacgccgcgagccggggatttggcgccggatatcactccggcagcgtccagtctccgtcacccagcgcgcgctgcataatcaacgtatcccgccagtcgcccatcttgtagccgacgctgcgcagctgacccgccacggtaaaaccgaactttttatggatcgccagcgagccggcattgttatggccatcgccgatgatcgccagcatctgccgccacgggcctttctcgcactcagcgattagcctggacagcagcgcgctgccgatgccgcgtccgcccattccggattccacgtatatcgattcctcgagggtgtagcgataggccggacgcgggcgatagaaggtggcgtagcagtagccgacgatagccccgcgccacagcgctaccagccacggcagcccgttgtcgcgcacggtctggatccgtttacgcatttcgtcaacggtgggggggatctcttcgaaggaggcgcggccattaagcacgtgccagacatacagcgcggcgatggcgtgcgcatcgtcgggcagcgcttcgcgaatttctaaatcactgtcgagtaacggggcctctgcgggcatggcggcgctcctgaatctgccggagaaacattctccggcgtgcagcgtaatacagaagcgccaggctgaatagtcctgccgtcgattattgcggatccgccggagaggctggcgtcggggccgcttcaccccagtatttctgcttgctggttttaccaatccccgggttcatgctgttggtgggatcgttctggcgatagaactgctgcaggctctccggggcctcatacagatgacccacgttatgctccgccggatactgggcgccgcgcgctttcagtaactccagcattttttccttcagcgcgtgggcgtcgacccctttcctgacgatgtaatcctgatggaacacatggcacataaagtggccatagtagagcttatgcaccagctggctgtcgatttcgggcggcagatgttcgaaccactcggtatcgttacggcgcagggcgatatccagcgccagaatatcttcgacttcgtcggcatgcaccgcctgatagcggattgccgcgccggcggcggcaaagcgatggaggaacgccttgctgccttcctccggcgtacaggcgaagaaatccccctcggcctgctggaagtactccgtcagccaacgctgcgcttcttcgatgccgtcgccagccatcttcagcagcagatgatgttcatatttatcacgccaggttttcatccgctccggtaaatgcgccggaaagacgtggccgagcttctgcataaagcggtcggtaaagtgcggcttaaacagcgagactttctccagcatcgcgtcggtgcgccccttcatggtgaagaagaacggcattttgtcggtgccgagcttgtcgatcatcaggaaggtgtctttgccatacttctcggcgatatcgtaaatatcgcggtgcatatattcccccgccaccggaagatgctggaactcagcgaggatatgacggcggatctcggtcaatacctgcggctggttggtgccaatgtaaaacacctgctggcgcttttccgccgggaaagtatcgagacgcacggcgaaaaccgccagcttgccggcgcagccggaggattcgaacaggcggtccgggtcggcgttatagcgcgccggggtgtcggcatcgacatcgcgcacgcgggtgacatagtcgtgatcgtgggcgtggcggccgtcgtgcagcacatcgctatcgctaatccgttcgtcatcgaggcggctgaggatctgctccggcgtgctgccgagatcgatgcccagatgattgaccagcttcagcttgccgtcggcgtcaatctgcgcgaacagcgacatctcagtgtaggccggcccgcgctgcaccagcgagccgccggagttgttgcagatcccgccgatgaccgatgcgccgatgcatgacgaaccgatcaccgagtgcggttcgcgtcccagcggtttgagcgctttttccagcgaatagagggtggtgccgggccaggccagcacctgctcgcctttgtccagcagatgcagtttgtccaggcgcagggtgctgataatcacgatctcgcgatcgtaatcattgccgttgggggtcgaaccttcggtcaggccggtgttggccgcctgcatcagaataattttatcggcgtcaacgcaggcgttgagcacgcgccagagttccagcagggtgccgggaaagacaaccgccagggcctcgccctgaccggagcggaagcctttgcggtagcgctgggtttttgccgggtcggtcagcagatgcgaagggccaaccaggcgcgccaggtcagccagaaacgttttatgggtgtcagtgggtgcagatgacatgttccactccttgtggtggtgcgcgaaatatcgaggataagcatagcgctttgtatgacaatttgatgcatgaatgtttcgcaaaaatcagagaagaaccttagcattctgcgggcgcgttgtttatatatatggcaaactgcggtttttattatgttttaccgagtccccgtctgagataaagcgagataacaatgaaatggctctgcactgtaggcgtcgccgtgagtctggcgctgcaacccgcgctggcggatgaactgtttggtaaccaccccctgaccccgcaggcgcgggatgcctttgtcaccgacctgctgaaaaaaatgacggtggacgagaaaatcggccagctgcgtctgataagcgttggcccggataacccgaaagaggcgatccgtgaaatgatcaagaacggtcaggtgggggcgatttttaacaccgttacccgcccggatatccgtgtaatgcaggatcaggtgatgcagcttagccgcctgaagatcccgctgttctttgcctacgatgtgctgcacggtcagcgtaccgtgtttccgataagcctcggcctggcctcgtcttttaaccttgatgcggtgaagaccgtgggccgcgtgtcagcttatgaagccgccgatgacggcttgaacatgacctgggcgccgatggtcgacgtctcccgcgacccgcgctggggacgcgcttccgaagggttcggggaagacacctatctgaccacgatgatgggccaggcgatggtggagtcgatgcagggcaagagcccggcggaccgctattcggtgatgaccagcgtcaagcatttcgccgcctacggcgcggtggagggcgggaaagagtacaacacggtcgacatgagcccgcagcgcctgttcaacgactatatgccgccgtacaaagccgggcttgatgccggcagcggcgcggtgatggtggccctgaactcgctgaacggcaccccggcgacctctgattcctggctgctgaaagacgtcctgcgcgaccaatggggctttaaaggcatcaccgtttccgaccacggcgccatcaaagagttgattaagcacggcgtggcctccgacccggaagacgcggtgcgcgtagcgctgaagtccggcatcaacatgagcatgagcgacgagtattacagcaagtacctgccggggctggtgaagtccggcaaggtgaccatggccgagctggatgatgccacccgacacgtgctcaacgtgaaatatgatatgggactgttcaacgatccctacagccacctgggaccgaaagattctgacccgcaggacaccaatgcggaaagtcgtctgcatcgtaaagaggcgcgcgaagtggctcgcgagagcctggtgctgctgaaaaaccgtcttgatacgctgccgctgaaaaaatccggcactatcgcggtggtgggcgcgctggcggacagcaagcgcgacatgatgggcagctggtccgcggccggggtggccgaccagtcggtgaccgtcctgaccggcatcaaagaagcgctgggcgataacggcaaagtgatttacgccaaaggggcgaacgttaccgatgacaaaggcattgtcgatttcctcaatttgtatgagaacgcggtgcaggttgacccacgctcgccgcaggaaatgatcgacgaagcggtcgcggcggcgaagcaatccgatgtggtggtcgccgtggtgggcgaggcgcagggcatggcgcatgaggcctccagccggaccgatatcaccctgccgcagagccagcgcaatctgattgccgctcttaaagccaccggcaaaccgctggtgctggtgctgatgaacgggcgtccgctggcgctggtgaaagaggatcagcaagccgatgcgctgctggagacctggtttgctggcaccgaaggcggccacgccatcgccgacgtgctgtttggcgactacaacccgtcgggcaagctgccgatgtctttcccgcgctcggtggggcagatcccaacctactacagccacctgaataccggccggccgtataatccggagaagccgaacaagtacacctcgcgttacttcgatgaagccaatggcccgctgtatccgtttggttacggcctgagctacaccacttttagcgtctccgatgtcaacatgtcgtcggccaccatgccgcgcgatggcagcgtgaccgccagcgtgcaggtgaccaacaccggcaatcgcgaaggggcgacggtgatccagctctacctgcaggacgtcaccgcctccatgagccggccggtgaaaatgctgcgcggctttaaaaaggtcaccctcaaaccgggcgaaacgcaaaccgttagcttcccaatcgacgtcgacgcgctgaagttctggaatcagcagatgaaatacgttgctgagccgggcaaattcaatgtctttatcggcgtggactcagcccgcgtgaagcagagcgagtttgagctgctgtaaggcatcgctcttaagtccaacgtcacgatttaaaggccgattaatcggccttttctttttcgcatcgctggcaaatgggctacgcttttctcttaagcttctgtaagcgaagcgcaaaagaactgagggaagcgggatgaagatggcaacgacatggtccggcgcgctggcgctggccgccctgataagtttaccgctgcaggcggcggagccggtgaaggtcggctcgaaaattgataccgaaggcgcgctgctgggcaatatgatccagcaggtgctggaaagccacggcgtaaaaacgattaataaaatccagctcggcaccacgccggtggtgcgcggggcgattgtcgccggcgagctggatatctacccggaatataccggcaatggcgccttcttcttcaaagatgaaaacgacccggcgtggaagaatgcccaacagggctatgagaaggtgaagcgcctcgatcaggagaaacatcagctggtatggctcaccccggcgccggccaacaacacctggactatcgccgtgcgccaggacctggcggagaaaaataagctgacctcgctggccgacctcagtcgctacctgaagcagggcggcgaatttaagctggcggcttcggcggaatttattgagcgcccggacgcgctgccggcgtttgaaaaagcgtatggcttcaacctcaaccagaaccagctgctgtcgctggccgggggcgatacggcggtgaccatcaaagcggcggcgcaacagacctccggcgttaacgcggcgatggcctacggcaccgatggcccggtggcggccctggggttacagacgctgagcgacccgcagggcgtgcagccgatatatgccccgacgccggtggtgcgcgaggcggtgctcaaggcctacccgcagatcgccgactggctgcagccggtcttcgccagcctcgatgaaaaaacgctgcagcagctgaacgcccgcattgcggtggagggccaggatgcgaagcgcgtggcggcagattatctgcagcagaaaggcctgctgaagtaagccaccggtgaccattcgctgtactcatcgcgtcggcctgctgctgacaggtctgctgctggttacgctggcgctgccgtttgtcacttatgcgccgaatcgcttactctccggggaagggcgcgggctgtggcaggtgctgccctggctcgccggcgttcagctggcggcggcccttgccgggatgctgctttgctggctgccgggcaggatcatgccgtttctccacctgctgctggccgaactgctcttcccgctgcttatctggggcagcggccaggcggcgcttgagctctcccggcacggctcgccgctggcgcgcacctcgcccggcagcggcctgtggctgtcgctggcgctttgtctgttgctggccagcgaggccatccgtcatcttaccgtccggccgctctggcgctggctgctcaatgcgcaagtctggctgttgcccatcatcctgctcgctatcggggcgctcgatcagctctccttgctgaaggagtatgccaaccgtcaggaggtatttgatgacgccctgcgccagcatctgcttctgctgttcggcaccctgctgccgggcctgctgattggcctgccgctgggggtatggctgtggcggcgtccgcgctggcaggcgccggctttcaccgcgctcaatgtgatccagactattccgtcggtagcgctttttggcctgctgattgcgccgcttgccggtctggcgcgttatttcccgacgctgggcgagctgggcgtctccgggaccggcgtggcgccagccctgatcgctctcactctctatgcgctgctgccgctggtgcgcggggtggtgaccggcctgcagcaggtgccgcaggatgccctggaaagcgcgacggcaatgggcatgagcgccgggcagcgctttcgtcaggtgcagcttccgctggcgatgccggtactgctgcgcagcctgcgggtggtcagcgtgcaaaccgtcggcatggcggtagtggccgcgctgatcggcgccggcggctttggcgcgctggtttttcaggggctgctgagcagtgcgctggatctggtgctgctgggcgtggtgccgaccattgccctggcggtggtggtggatgccctgttcgccctgtggggcgcctggctaaaaggagaggccaatgattgaatttcaaggggtcagcaaagtgtttgccggccacccggcggtgaaggacctgaccctggagctgcgcgaaggcgctttctcggtgctggtggggacttccggctcgggcaagtcgacgacgctgaagatgatcaaccgtctgctggagccggaccggggcaccattcgctttgccggcgaggacattcgccagcagccggtcctgaccctgcggcggcggatgggctatgccatccagtccatcggcctgtttccccactggacggtggcgcagaatatcgccaccgtgccgcagttgcaaagatggccgcgggcaaggatcgccgaccggatcgacgagctgatggcgctgctggggctggaggcgacgctgcgcgaccgttacccgcatcagctctccggcggccagcagcagcgggtgggggtggcgcgggcgctggcggcagatccggaggtgctgttgatggatgagcccttcggcgccctcgacccggtgacccgcgaggcgctgcagcaggagatgctgcgcattcaccgtctgctgggacggacgattgtgctggtgacccatgatattgacgaagcgctgcgtctggcggaccacctggtgctgatggacgggggcgaggtggtccagcagggggcgccgctggagatgctcctgcgaccgaaaaatagctttgtacagaccttttttggtcgcagcgagctgggtgtgcgcctgctgtcgctgcgcgaggtgggggactatttgcgtcccgacgaacggctggcgggcgaggggctgaccgtcaccatgaccctgcgggaagcgctgtcgcagtttgtcgcccggcgctgcgagacgctgccggtggtcgatgccgaaggcaggccctgcggtacgctgcattttgccgatctgctgcgccaggagatgagccatgaaggcgcttcgtgagccgctgtggtggcttatcgcgctgtttatcggcctgctggcagggctgccctacagcgcgccgctgttcagtcggctgttcccggaactgccgcggccggtctaccagcaggagagcttctgggcgctcactctcgatcacggctggctggtggtggcgtccagcctcgcggcaacggcaatcgggctgggggctggggtggcggtcacccggcccgccggcagcgcgtttcgtccgctggtggagaccatcgccgctatcgggcagacctttccgccggtggcggtgctggcgatggcggtgccggtgctgggctttggctggctgccggcgctgatagccctcgcgctgtatggcatactgccggtgctgcaggggacgctggccgggctgggttcgataccgcctggggtgtcaggcgtggctgaagggatgggaatgaccggctggcagcgtctgtataaggtggaactaccgctggcggccccggtgatcctggcggggatccgcacctcggtcatcgtcaatattggtaccgcgaccattgcctcgacggtgggggccagtacgctcgggacgccgatcatcatcggcctgagcggctttaataccgcctatattgtacagggggcgctgctggtggcgctggcggcgattatcgtcgaccgcgcgtttgagcgtctgacccgctggatcagccgacaccgccacgcacaataaaggaatagccggccagcattacgccgctgatcccgccgatggccataagtaagaagagggtgacgaccgcgattttcgctggcttcataataggctcctgatgttaacagggggattatacggtgaagcgcaggtgttaatgaaacattaattgcggtttagcgcgccgcgccggggtttttgccgcgtttgctgcgcaacgcgccgcaaaaaagtgtgatcctggccgtcgtttttcatttttatgcagggcttcaaagaaagttttcgccaggcagggtatggtacgcgctttcaggcatgtgtggtttgcgggtatgtacgagtttgatctggtgttgctgctgcttcagcagatgtgcgtatttttggtcatcgcgtggttgatgagcaaaacccgactgtttatccccctgatgcaagtcaccgttcgcctgccgcacaagctgctgtgctacgtcactttctccattttctgcattatggggacctatttcggtctgcatatcgaagactcgatcgccaacacccgcgccatcggcgccgtgatgggcggcctgctcggcgggccggtggtcggcgggctggtagggctcaccggcggcctgcaccgctactcgctggggggaatgaccgccttaagctgcatggtctccaccatcgttgaggggctgctgggcggtctggtgcacagcgtgctggtcaaacgcggccggccggacaaagtctttagcccgctgaccgccggggcgatcaccttcgtggccgagctggtgcagatgatgatcattctgctgattgcccgcccgttccaggacgctctgcatctggtgcagagcattgccgcgccgatgatggtcaccaataccgtcggtgcggcgctgtttatgcgcattctgctggataaacgggcgatgtttgagaagtacacctccgccttttccgccacggcgctgaaggtggcggcgtccaccgaggggatcctgcgtcaggggttcaacgaggagaacagcatgaaggtggcccaggtgctgatccaggagctggacatcggcgcggtggcgatcaccgatcgcgacaagctgctggcgtttaccggcatcggcgacgaccaccatctgccgggcaagcctatttcctcctcgtatacgcaacgggcgattgagaccggggaggtggtctacgccgacggcaacgaggtgccttaccgctgctcgattcatccgcactgtaagctggggtcgacgctggtgatccccctgcgcggcgagaaccaacgggtgataggaaccattaaattgtatgaggcgaaaaatcgcctgttcagttcaatcaaccgcaccctcggggaggggattgcccagctgctgtcggcgcagatcctcgccggacagtacgagcggcagaaggcgctgctgacgcaatccgaaatcaagctcctgcacgcccaggtcaacccgcacttcctgtttaacgcgcttaacacgctgaaggcggtgatccgccgcgacagcgaacaggccggccagctggtgcagtatctgtcgaccttctttcgcaagaacctgaaacggccgacggaaattgtcactcttgccgatgagatcgagcatgttaacgcctatctgcagattgagaaggctcgctttcaggctaacctgcagatccagatggcggtgccggaagggctggcgcatcaccagctgccggcctttaccctgcagccgatcgtggagaacgccattaagcatggtacatcgcaacatcttggcgtcggcgaaattaccatccgcgccagccaggacgatcgctggctgcagctggatatcgaagataacgccgggctgtaccgggccaacccccaggccagcgggctggggatgaatctggtggacaggcggctgcgggcgcgttttggcgccgactgcggcatcagcgtcacctgcgagccggagcgctttacccgtgtcaccctacgtctgcccctggaggagaatgcatgctgagagtattgatcgtcgatgatgagccgctggcgcgggaaaacctgcgcattttgctggagacacagcgcgatatcgagattgtcggcgagtgcggcaacgcggtggaggccattggcgcggtgcataagctgcgtcccgacgtgctgtttctcgacatccagatgccgcgcatcagcggtctggagatggtcgggatgctcgacccggagcaccgcccctatatcgtgtttctcaccgcctttgatgaatacgcggtgaaagcctttgaggagcatgcctttgactatctgctgaagccgattgaagctgcccggctggagaaaaccctcgcccgcctgcgccaggagcgtaatctgcaggatgtgtcgctgctggatgatgctcagcagacgctgaaatacattccctgtaccggccacagtcgtatctggctgctgcagatggaggatgtggccttcgtcagcagccggatgagcggcatctacgtgaccgaccgcgagggcaaggagggctttaccgaactcaccctgcgcaccctcgagagccgcaccccgttgctgcgctgccatcgccagtatctggtgaatatggcgcacctgaaggagattcgcctggaggagaatggtcaggcggagctgctgatgcgcgccgggcaaacggtgccggtgagccggcgctatttaaaaagcctgaaagaggcgattggcctgtaaagctggtacactgcgccccattgcatcatcgacagtaaaaggccctcatgctcagtaatgatattcttcgtagcctgcgctacaccctgaaagtcaataataacgatatggtgcgcattctcgcgctctccgctatggaatccaccgccgccagcttcgacacctggacgacgaaagaggatgaagagggctttgttcgctgcccggacattatcctgtcgggtttccttaacggccttatctatgacaagcgcggcaaagatgattcggccccggagctggcgctggagcgtcgggtgaataacaacacggtgctgaaaaagctgcggatcgccttctcgctgaaaacggacgatatccaggcgattatgagcgagcagaaataccgggtgtcggtgccggagatcaccgccatgatgcgctcgcctgaccacaaaaactaccgcgagtgcggcgaccagtttctgcgcaatttcctgcgcggactgacccagcgggtgcataacccgaaggcatgattttttgccgggtggcggcttcgcctgacccggcctacaacgactgcccccgggcgcgtgctagcatagcgccgccgggcaaaaaaaagccggagatactctccggcttttttgttatttcacctgctgacccggcttggcgccgtcgtcagggcttaagaggaagatatccttcccgccagggccggcggccatcaccatgccctcggagatgccgaaacgcattttgcgcggcgccaggttggcgaccatcaccgtcaggcggccaatcagcggctgcggatccgggtaagcggagcggatgccggagaagacattgcgtttttcgccgccgagatccagcgtcaggcgcagcagcttgtcggagccctcgacgaattccgcgttttcaatcagcgccacgcgcagatcgactttggcgaaatcgtcaaaggtgatggtctcctgaatcggatcgtccgccagcggaccggtgaccggcgccgcggtggctttcacctcttctttagaggcttccaccagggcttccacctgtttcatctcgatgcggttgtacagcgccttgaacggattcaccttatgcgccagcagcggctgctgaatggcatcccagctcagttcgctgttgaggaacgcttccgcacgcgcggccagctgcggcaggaccggcttcagccaggtcatcagcacgcggaacatattcaggcccatggtgcagatggcctgcaggtcggcgtcgcggccttcctgtttcgccaccacccacggcgcctgctcgtcgacgtagcggttagccacgtcggcgagggccatgatttcgcggatggccttaccgaactcgcggctgtcccatgcttcgccgatgctttccgccgcgtcggtgaaggttttgtacagcgccgggtcggccagctcagcggccagcacgccgtcgaaacgcttgctgataaagccggcgttgcgcgaggcgaggttaaccaccttgttgacgatgtcggcgttcacgcgctgcacgaaatcttccaggttcaggtcgatgtcatcgatgcgtgaagagagcttggcggtgtagtagtagcgcaggctgtcggcatcgaaatgatttaaccaggtgctggccttgataaaggtgccgcgcgacttggacatcttggcgccgttaaccgtcacgtagccgtgcacgaacaggttagtcggcttacggaagttgctgccttccagcatcgccggccagaacaggctgtggaagtagacaatgtctttgccgataaagtgatacagctcggccgtggaatctttcttccagtattcgtcgaagctggtggtgtcgccgcgcttgtcgcacaggttcttgaaggaacccatgtaaccgatcggcgcgtccagccagacgtagaaatatttgcccggcgcgttgggaatttcgaagccgaagtacggcgcatcgcgggagatgtcccactgctgcaggccggattcgaaccactcctgcatcttgttcgcgacctgctcctgcagggcgccgctgcgggtccacgcctgcagcatttcgctgaacgacggcaggtcgaagaagaagtgctcggagtcacgcatcaccggcgtagcgccggagaccaccgatttcgggtcgataagttcggtggggctgtaggtcgcgccgcacacttcgcagttatcgccatactggtccggagatttgcacttcggacaggtgcctttcacaaaacggtccggcaggaacatgcctttttccggatcgtagagctgagagatggtgcggtttttaataaaaccgttctctttcaggcgggtgtagataagctccgacagctcgcggttctcgtcgctgtgcgtcgagtgatagttatcatagctgatgtcgaagccggcgaaatcggtctgatgctcctgactcatttcgccaatcatctgctccggtgtgataccgagctgctgcgctttgagcataatcggcgtgccgtgggcgtcgtcggcgcagatgaagttgacctcgtggccgcgcattcgctggtaacggacccagacatcagcctggatgtgctccagcatgtggccgaggtggatggagccgttggcgtacggcagggcgcacgttaccagaattttcttcgcgacttgagtcatagtgagcattacatcttctgttgtaaaaagggcttccgatattaccaaaagggctgtgggtgcgccataaatggctgcccatatatggataatcgttacctgtgataaactctgtgattactgaaagcatctcaaaacaacaaaggagtcgggatgaattcgcaatcccaggccaaatcccctgagcgcctacgtgcgatggtcgccgggacgctggccaatttccagcacccaaccctgaagcataatctcaccgcccttaaggcgctgcaccatgtcgcctggctggacgataccgtccatattgaactgcaaatgccgttcgtctggagcagcgctttcgaagcgctgaaagagcagtgcagcgccgaactgctgcgcatcaccggcgcgaaggccatcgactggaagctgacccacagcattgcgaccctcaagcgggtgaaaaaccagcccggggtcaacggcgtgaaaaacattatcgctatcagctccggcaaaggcggcgtcggtaaatcttctactgccgtaaacctggcgctggccctggcggcggaaggggcgaaggtgggcattctggatgccgatatctatggtccgtcgattccgaccatgctgggtgcggaagacagccgcccgacctcgccggacggcactcatatggcgccgatcatgaaatatggtctggccaccaactccatcggctacctggtgaccgacgacaacgccatggtctggcgtgggccgatggccagcaaggcgctgatgcagatgctgcaggagaccctgtggccggacctcgactacctggtgctggatatgccgccgggcaccggcgacatccagctgaccctggcgcagaacattccggtgaccggcgcggtggtggtcaccacgccgcaggacatcgcgctgatcgacgccaaaaaaggcatcgtgatgttcgagaaagtggaagtgccggtgctggggatcgtggaaaacatgagcatgcatatctgcagcaactgcgggcaccacgagcctatcttcggcaccggcggcgcgcaaaaactggccgagaaataccacacccagctgctgggccagctgccgctgcatattacgctgcgggaagatctggataacggcacgccgacggtggtggcgcgtccggacagcgaatttaccgacatctaccgccagctggcgggccgggtggcggcccagatgtactggcagggagaagtgatcccgggtgagattgccttccgcgccgtttaaggccgcggcgagcgcatcagccagtatctgccctcgggcgacgcgccctgtgcttcgatggtccagccatgacgctggtagaagcgcagggcgtttttattttccatcaggcacttcagcgttccgctggcggtaaaggtccgttcgacctgcgccagcagcgcgctgccgatatgtttgccttgccagtcggggtcgacaaacagatggtgaaggaaattatcggcggtccatacggcggcaaagcccaccggctggccgtcgcattccgcgacccacagctgttcatccgctgtggcggcatcgaaatcctccagccgccacgccgcggcgggaagccaggtccacgataaactgcgcgcccgcaggaagatctggcgcagcgccggagagtccgctggctcgccggggcggacgtggagattgcgcggatcagcgatgatagaagatctcgccatcgtacactttgaggattttgccttcggtatcggtgatcagcacgtagttaccgcccatataggtccagtggctgccggcgtccggcgcaggcaggttacgctgctgccactgtttgatgttgtattccggggtgaggtacatcgccggaacggtgtcgccgatgtgaaactgggtgaaatcggcggtgaactctttcagcgcatactgatcgatccccgcggcagtagccgtccagctggcgccagcggtggcaagaagtacgcccagaagcatcatttttgttttacgcatagtttcctcaatattacctggactcaaaatagcagcctcgtatcattcctgatgcgttgctgaaatggcaagcactggatttttaaaaagtgtaagcaaaacgcggcgcaagtcttgtgccgcttgcgttgcagcgacggtgatgcgtattttgggagcaatctgaagcaggggagaatcagcatgttcaggctggaagatctgaccttatttgtccgcgccgcggcgctgggcagttttagcgacgcggcgcgcgaggccgggcagcagccggcgcaggtcagcgcggcaattaagcgtctggagacgatcctcaatattcgcctgtttgcccgttcgacccgcagcctgcgcctgacgccggagggggagacctggctgccctacgccacccagatgctcgataccctcgaggccggtctgcagaagatccagaccccggatgatgaagttcgcggcatgttgcagattgccgtgccgtcggacctcgggcgtaacctgctcctgaccctgttccgcgatttccgccaacgccacccggcgctgcgcctgcggctgctcttttccgatcagctgaccgacgtgtttaaagatccggtggacgttgcgtttcgctatggcaataacgacgatgcctcgtttatctcgctgccggtggcgccggaaaatcgtcgggtgctggtggcctcgcctgagtggatcgcccgccatggcgaaccgcagaccctcgaggaactcagccagcacaatgcgttgatctacattttgcgcggccgtccgttcgaccgctggtcgctgagcctcgacggcgtggttcagcagcagaaggtttccggcacggtgatgagcgacgacgccgaggtgatccgtcggctggcgatcgccggggagggcattgcctataaatcgatgctcgacgtcagcgacgatctgcgggcggggcgcctgcggcgcctgctgccgcgttatcagggggatgtagtgccgttgaatctgatttgtccgcaccgcaaacagctctctgccgcggtgcgtttgttatatgaagaggtgaaatcacattgtgaagggcttaatgcctgactaaggtcgcgaagtaatacaccagcgggacggccaatacccacaggccaatcgggatctcccgccacttaccggcgatagccttgatcacaatgtaaaacagcagcccgccggcaatcccggtgccaaagctgttggcgataagggtgatcatcaccatcatcagcaccggcagcccgtcggtgaagttggcaagatccactttgcgcaggccgctgaacatgttcaggccaatcaggatcagcgccggggcggtggcttctttcgggatcatcaacgccaccggcgtgaacagcagcatcagcaggaacattaccgccgctgacagcgcggtgaggccggttttgccgcccgcttccgctgccgccgaagattcaatcagcgccgtagccgccggaatgcccacccacgggccgagcgcggcggcaatcgaatcgaccatgaacgggcgattaatctgcggcatgttgccttcttcatccagcagacccgcctcgccgcccaccgccagcgtcgtccccatggtggagaaaaactcagatgcgaaaaagacgaacaggaacggcaggaaggcgatgtttaacgcccccagcaggtcaacctgtcccagcaccggcgccagcgagtggggggcatcgataaaatgcgtcggcagtttagtcacgccgaacgggatacccaccagcgtggcgcacaaaatagcccacaaaatcgcgcccggtaccttacgcgcctgcagggctatcgccaggaacaggccgcacagcgccaccagcgcgccgggggcgagaaagtcgccgagcatcagggcgttggttttcgcattggccagcaccagcccggcattgcgaaaaccgaggacggcgacaaacaggccgatggaggccgtcaatcccagcttgatcgactgcggcaccgagcgggtgaccacttcgcgcaggccaaagcgggtcagcaggaagaagaggatccccgaccagcaggcaattccgaggccagtctgccagccaatcccttcgctaccggccagcgtcacccccaccagcaccgagccgccaatgcccgggccgacgataaacggcaggttggcataaaacgccatcagcagcgagccgacgacgaagaccagaatggtgccggtggtggcggcgcctttatccatcccgccgatcgccagcagccccgggatgaccaccagtaaataggcggcggcgagaaagccggtgatcccggccaggcattcggtgcgtagcgtgccgccgcgcgagcgcagcgcaaagcggcgctccagccagttagcgcgggcggaagagtgaagtgtgttatcggccatgctcaggctccctgaggattattgttgtgatcggttggctccgggatctcccggcaggctatcaacgggtcgactatctggcggctgccgccgtcggtcagacccaaatcggttaaatgcggcccggcgttacaggcaaggcaggtgccttcaatggccttgaagacccggtacggcggctcccagtcggcgacttggctgctcagatcgcgcagctcgcggaactgacgcgccagttccgcggccgggagatccgacagcatgccggcaatcggcatcgccacatgggcgaggatctcgccctgttgcgccagcgccatcccgccgccggaggcgataagctggttggccgccagcgccatatcattagcgtcgcgcccgagcaccaccagattatgcgagtcgtgggagtagctggtggcgatggcgccgcgcagctcaccccagccttcaagcagggcgatttgcggcgtcgcctgatggcggccgtggcggtgcttgacccagatcagactgaagccggcgggcagctggactatcccgtcacgaacctgcacttccacttcgccccactgggtgaagcgcgcgccgcggatatggcgcaggcgggcgatgccgtgacgaatgccctggacgcgcagaataaagtcatcggcgcggaggggggcgatctgcaaagtatcgcgcggcggcgtgacgcccgcggcgggcgcgatcggtgtcagcaggttgcccgcgcgggccagcagcttaccgcctacgtagacttcgcgggccaccagtttctccagggaatcaaacaccaccagatcggcgcgccgcccggcggcaatcagcccgagatcgtggcgctgcaggcgaatagcggcgttgagggtggcgaatcgcagcgcatcgaccgccggtaaaccgtgctcgatcagcaggttaagcagggcgatgatcccgcctttctccagcagcatatccggcggcacgtcatcggtgcagacggtgatctgcgaggagaggtgcggcagcgtttttaacgccgcgacgatatctggcagcagataggggtgcgagccgcggatctcgatcgtcagcccggcgcgcagtttttccagcgcgtcgtccgccgaggtaagttcgtgatcggaggtgacgccggcggcgaggtaggcctgcaggtcagcgccgctcaggccgcgggcgtggccttcaatcagtttgccgctgttgagaccggcctggacaatctcctgcatccgctcgctaccgtgcagcacgccgtgcatatccatcacctccgccacgccgcgcacttccggccagccgagcatggtctccatctccgcgccggcaaaatcggcgccggacatttcgagacccggcgtggaggggacgctggacggggcggcgaccatcacctgcagcggcagatggcggctggcgtccaccgcatagcgcacgccagcgacgccgaggacgttggccagctcatgcggatcccagaacaccgcggtggtgccctgggtgaggacgatttccgcatagcgctccggcggcaggtgcgagctttcgagatgcacgtgggtgtccatcaggccgggggacaggtagccaccggccatggaacgcacttcatgggcgtcttcgcgactgccgcgcgggtggacgctggcgatcatctcgccgacgataccgacgtcagcggggcgaatttcgcccgtggccatatcgacgatctgcgcatcgatcagcagcagatcaaacggggattcaccgcgcgcggcctgcacggcgcgacggcggacttgagcattgctggacataaccactccggcacaaggataatgcggatactctaggggcacagcaaacgtttgcccagatgaataaatttatcacccgataagctcgggttattgtgcaggaccaccgtagcgaacccgatgatgaacgaaccctggcagcggctgcccgcgctctctcttaaacagcttcagtatttcgtcaccctggcccagctgcgccattttaccgataccgccagtcggctggcgattagccagccggcgctgagcagcgccctgcggcagattgaaacggtactcggcggcaaactggtcaaccgtaccgctgcgacggtcactctgactgaactgggggcggcgattttaccccacgcccagcggatcctcagcgtggcgcaggcggccttttccgatatgcagcagattgtcgaggcgggcggcgacgggacggtgcgtatcggtctggtgccgtcggtcagttcgctgctgtttccgctgctgccgcagaccctggctgaggcctttccgcgtctgcgcattgaatttcacgatcagaccaacgatgcgcttatccaggcgctgcagcgcggcgagattgatttcggcatcggggcgatcgacagctcactgcccgcagaactgctggtctatccgctgcgcgaagatcccttcgtggcggtgctgcaccgcgacgatccgctggccgcgcaggcacatctgccgtggaaacagctggtggggcgggatattgctgtgttctcgaagggcaatatccagcggctggtggcggcattagtggagagccatcgcctgacgctgaccacccgctaccaggtggactatatcgaaaccctatatggtctggtgcgctcgcgcttagcggtggcgattctgccggcgctgtacaccacccatctgcaggacccggcgctcagggtcgcccagctgcagcagccggcgctcgcccgcacagtggccctgatgcgcggcccgcaggcgctgcccccgcttattgaagactgtttttccctgctgcaggccgccttgcgctagggcaggtgcttgatcagcacgtctacggttaagtggttgatgtactccagcgagtgtgaggagaggacgcccagcagccggttatggtgtccggcaataattaaatcgatctgccgctgccgaacgcaggtttctacgtcttcaaaccggcgggtggtcaccagcgagagggtatccaccggcagggagacggtgcaggccagctcgttgagcagggctttggcctggatcacctcctgcgagacccgatcgtcgcgcaggctgtcggaaacatagttcagcgcccggtaatcggtgctgatgtgggcgatggtgatgcgcatgccgttctcttctgccattctggcggcatgctggagcagcgggacgccgtcctgactgctgttaatcagtaccagcgcatggtgataaacggccatggcgtatatcctcggtaggctaaatagcgcatgatgtcattattttccgcccgccagcagcggaatgcaatcccgtccggttgcctgatgagcatgatggccgcgaaggtgtcgtatccagggctaaaggcttgttgtatgaaccggtgagttgcggtaaattccacaacgcttaacaatttcactattttgactcggggtgcccttcttcgttgaaggctgagaaatacccgtaccacctgatctggataatgccagcgtagggaagtcagagaccgcagggtcattgcttctacctcgtctggcgggagcaaaccatgcctgagctgctgaatcccgcgcctgtcgcgcacctgcgccatctgctgcgcgcccattccccccttgtgcactgcatgactaatgacgtggtgcagacctttaccgccaacgttctgctggccgtcggcgcctcgccggcgatggtgatcgatccccgcgaagcggcgcagtttgccgctatcgctgatgcgctgttaattaacgtcggtaccctgaccgaagatcgcgccgtggcgatgcgcgccgcggtggagcacgcccgtcaggccggcaagccctggacgctggatccggtggcggtcggcgccctgaccgtgcgcactgccttttgtcacgagctactggccctccagccggcgaccattcgcggcaatgcctctgaaattctggcgctggccgggatgagcgccggcgggcgcggggtggataccaccgatacggccgccgcggcgctgccggcggcccaggcgctggctcgtcggctggctaccgtggtggcggtcactggcgaggtggactacgtcaccgacggcgagcgggtgctcagcgtggcggggggcaatccgctgatgacccgggtggtgggcaccggctgcgcgctgtcggcggtggtggcggcgagcgcggcgctgccgggagaccggctggaaaacgtggccgccgcctgcgggctgatgaagcaggccggggagatcgccgcccgtcagggaggcccgggcagctttattccggcgtttctcgacgcgctgtatcaggaggtgcagggatgaaacgcatcaacgccctgaccatcgccggcaccgatcccagcggcggggccggtatccaggccgatctgaaaaccttctccgcgctgggggcctatggctgctcggcgatcaccgccctggtggcgcagaatacccgcggcgtacagtcggtctatcgcatcgaaccggattttgtggccgcgcagctcgactcggtgttcagcgatgtgcgtatcgataccaccaaaatcggcatgctggcggagaccgatattgtggaagccgtggccgagcggctggcgcgctaccgggtggccaacgtggtgctggataccgtcatgctggcgaaaagcggcgatccgctgctgtcggcctcggcggtggagaccctgcgtcaacgattgttgccgcaggtgtcattgatcaccccgaacctgccggaagcggccgcgctactcgatgccccccatgcgcgtaacgaacgggaaatgctggagcaggggcgggcgctgctggcgctgggctgcggcgcggtattgatgaagggcggccatctcgacgatgccgaaagcccggactggctcttcacccgcgaaggggaacagcggttcaccgcgccgcgagtgcagaccaaaaatacccacggcaccggctgtacgctctccgccgcgctggcggcgctgcgcccgcgtcacgcggactgggcggccaccgttatcgaggcgaaggcctggctgtcggcggctctggcgcaggccgactctctggaggtaggccacggtatcgggccggtgcaccatttccacgcctggtggtaaatggcagcgcaacgggacagcagaatctcctgaaaaaatggccccccggctggaaaataggctaagtcggtaccaggcttaacctgcccaaaaaaattgggttgggataatgcacgccggcttcggccggccttacgggagattgctatgactgatattacgcagttgctgggcaaagatgccgagagcctgttgcagcaccgttgtataaccattccgtccgaccagctgtatctgcctggcgcagattatgttgatcgggtgatggtggataacaaccgaccaccggcggtgctacgcaatatgcagaccctgtacaataccggacgcctggggggaaccggctacctttccattctgccggttgaccagggcgtggagcactcggcgggcgcctcctttgccgccaacccgctgtactttgatccgaaaaatatcgtcgagctggcgatcgaagccggctgtaactgcgtggcgtcgacctacggcgtgctggcctcggtgtcgcgccgctacgcgcatcgcatccctttcctggtgaagctcaaccataacgaaacgctgagctaccccaccgaatacgaccagaccctctacgccagcgttgagcaggcgttcaatatgggggcggtggccgtgggagcgacgatctatttcggctcagaacaatcgcgtcgtcagatagaagagatttccgccgcctttgagcgggcccatgagctgggcctggtcaccgtgctgtgggcctatctgcgcaattcggcgttcaagaaagacggcgtcgactatcatgtttccgctgacctgaccggtcaggccaaccacctggcggccaccatcggcgccgatatcgttaagcaaaagatggcggagaataacggcggctacaaagcggttaacttcggctataccgacgatcgggtatacagcaaactgaccagcgataaccccatcgatctggtgcgctaccagctggccaactgctatatgggccgcgccgggctgatcaactccggcggcgcggcgggcggggagaccgaccttgccgacgcggtgcgcacggcggtgatcaataaacgcgccggcggcatggggctgatcctgggccgcaaagcgtttaagaaatcgatggccgacggcgtgaagctgatcaatgccgtgcaggatgtttatctggatggcaaagtgactatcgcataaggcaaaaatccgggcggcaccgcccggattgcgcattgtttgtaccagatgcggtttattaagactctgccgcgttggcggtaaacggtttcgcatgctgatcgctggtaaagccaggctgttcaacgcggattaacgggcacaggaagaaggccagaatatataaggcggtataggctattaccacgccgatagtgctgaaatagggcagcagtaccacggcaatcgccggcgccagaaagttcgacagcccggctgacaggttatagaccgaaatcgccgcgcctttatggttcggctccagcgccgggaacaccgccgccatcggcacaaacgcggcgacaaaaatccccagggcaatagccggtaccagcgccatggcaaaattatggccgaagtgctggggcaggtaatagaacgccaggctggaaagcgccatcccgatgcagccgaaccagcggataaccttcatccagcccattttctccgccacaatcccccagaaaacgttcgaaaagatcgtggtgaagaagaatgccgcccatacctgcagccattccgaggtggtaaatcccagctcatcaacaaacatcatcggcatgatcaccgcaaaaccaaacagcgacagggtgttgataatgcgcacaatgctcgagaacagaatgctgcggttggtatagagcagcgtcgccgcgcgccccagttcggcgaatttttcacgagtggtcaggttctgcatatggcgcggcgtttcggtatgacgcatcgacaccagcgcaataatgccgccggtggcgcaaaagagcagcgccagccacagggtgcccatttcgccaatgtggggaatggtaaaactcggaatatagctgccgaacacgccgatacccaccgagtagaccgcccagaaccagcccagcgcggagctggaactgtcgctgcggacgttgtggataatggcgacgataaaggagtagaggaacagcgggtaggccaggccgcggatgccataaaacagcaggatcagcgcatagttggcgcgaccgaggccgaagacgaggaacagtacgtggaatacacaccacagcacgaagccaatcagcatggctttacgtggggtgatgatttccgccaccacgccggagacccacgccgacagggcggcagccagaccgtagagagtaaaggcaaatgaagcctgcgccggggtgaatccgagtgctttgatgtagtgcgacagaaaagccagctcaaagccgtcgccggtcataaacacggcgatggcgacatatccccagatgaggttgagcggtagaccgtaccactgtttgttattaacggacatgttgacctcgatttcagagtgcagatgagtgtctccgctgcacagcagcggagcattattgttataaaataaggaggtatgttattcgcgaatcagcctgccggcctgttgtagcgccttataggccgcatacctgcgctgatgaagcgggctaaacgccgtctcgctgtgataggtggcatccacctgagtaaactgcttcatggcctccggcagcgaagccgcgactctgcccgccaccgcgccgaggatggcggaacctaacagcaccggctcgcggctggcggtgctcacgatgctaacgccgcaggcgtcggccaacagctgacgcaccagcggatgctgcccggctccgccgctgatgacgatattttcactctcaattccgcaggcgcgctgggcgtcaatgatctgtcgcagaccatagccaatcccgcatagcccggcaacgtacagcgcggtcaggttatccaggtcccgctccatccccagcccggcaatcagcgctttcgcgtggggatcggcaagcggcgcgcgattaccgagaaactccggaacgacgtgcagaccggcggccagcgttaccgcttcagaaggggaagcaacttgcgtcagaacgcgatccgccagccagaccggcagagggacgcctgcggctttcgcttgctcgcgcgcttccgccgccgccggatggaagctcagcagctggtcgatagccgcgccggcggcgctttgcccgccttcacttagccagtagcccggcaccatcgccgaatagtaagggccccagacgcccgggacgaataccgcttcctgagtggtggtcatggtgcaggaagaagtgccgaagacataggccatattgttgaccgcgccgttaagcacgccgacggtaccgatgccgcccgcgtgggcgtcaatcatccccaccgccaccggcgtaccgatcggcaggcccatctcctctgccgccgtggcgcaaaggccctcgccgcagggggtgcctggatcgacaatccgctggccgatgcggacaaaattttcatccgccagctctgcgaggccaatctggcggaagtaaccggcatcccagcgttgttcatgcgccaggtaggtccatttacaggtcaccgtgcagaccgagcgggcttcatcgccggttgagcgccaggtgaggtaatcggcgaggtcgaagaagtggcgcgcctgctgatagatgtgcgggcgattctccttcagccacaaaattttcggcgtttgcatctccggcgagattttgccgccaacgtaccgcagtaccgggtggcccgtggcattgatcttttctgcctgcccggtggcgcgatgatccatccagacaataatgttgcggtccgcatcgtccgaaggcccgaccgccagcggcgcatcgttatcgccaatcaccaccagcgagcaggtggcatcgaagccgatcccggctatcgacgacggcgaaacgccggcgttggccaccgccgttttaatgcagtagcacaccgcctgccagatctcacggctcgactgctcgaccttgtttccggcgctgcgaaacagggttatttcccgggtcgcgtgggcgaggagctcgccccgcagattgaataccccggcgcgcacgctgcccgaaccgacatccacgccaataatgttttgcgtatcgttttgcatcacatcctctcacaggctggccagggtcagagatccacgctgttcggcaggatcacaatgtcgcgcacggtgacgtttttcgaacgcgtcaccataaacagcaccgactccgccacttcaatcggctgcatcaggctgccgttggccagcgcttcgtccattttggcttttggccagtcgtccagcagagcggtaaccaccgggcccggcagtacggcgccgacgcgcacgccatactgcgccacctggcgacgagtggtgtgcacaaatgcctgcaccgcgaatttcgacgcggtatagacaggctcccagatcaccggcaccacgcccgcgatcgagctggtgaagataatatccccggatttttgcgcgatcagatgcggcaggacgctgcgcacgcagcggaaggcggcgttgatattgaggtgcagcacgcggtcccagacgtccgggtcgccctcggccaccggcccgccgatataggcgccggcgttggcgtggaagatatcgagacgcccggtaagctgcaaaatgccctgcagtaggttatcgacctggtccgcctgcatcaggtcgacctgcagggcgaaggcgttttcgccaagttcggcgaccagtttgttgagcttttcgccttcgcggtcgattagcactacttttgcgccagcccccagcagggtcctcgcgcactcgaggccgataccggacgccgcgccggtgatcgcggcgactttaccgctgagggaagtattcatagaggagacagagtgcttcattttataatcctttgccgtgtctggttaaaactatcgaacgcgagggcatcacgttcgaggtgatagactaaaactggtaacatattgaatatcagcatcttaattcaggcttgctggcatgttgaggcggtatgcgcgcgtacttcctggcgtgaaaaggatgctcaatcgatgaagctatgttgctctcgcttcatcgattgagcaagtggggaaattaacagcgacatgattttgtgacgcaagttggaaaaatgaagaagataacgatttacgacctggcggaactttccggcgtttcggcgagcgcggtgagcgctatcctcaacggtaactggaaaaagcgccgcatcagcgccaagcttgcggaaaaggtgacgcggattgccgaggagcagggctatgcgattaaccgtcaggccagcatgctgcgcagtaaaaaatcacacgtcatcggtatgattatccccaaatatgataaccgctacttcggttccatcgccgaacgctttgaggagatggcccgcgagcgcggcctgctgccgattatcacctgtacgcgccggcgtccggaactggagatcgaagcggtaaaggcgatgctctcctggcaggttgactgggtggtcgcgaccggggcgaccaatccggataaaatttccgcgctatgccagcaggcgggcgtgccaacggtcaatctcgacctgccgggctctctctcgccgtcggtgatttcggataactacggcggcgcgaaagcgctgactcataagatcctggctaatagcgcccgccgccgcggagagctggcgccgctgacctttatcggcgggcgcagcagcgaccataacaccagcgagcgtttacgcggcttccacgatgcgcatcgcgagctggggcttagcgtgccgcaggcgaatattctggcccccggctattcgaaaggccacgttgaggactgcctgcaggagcggtttggcagcgcgaagacgttgttgcaggggatatttgttaactcgacgatatccctggaaggggttgtgcgctggctgtcgcaggtggggctaaccggcagcgagcagccgccgatgggctgcttcgactgggatccttttgtctacctgctggggcacgatatcgacatggtgcagcaggacgtgccggcgatgctggacgctgttttttcgattattgacgccggcgaagccagccagcagcggattgaaattcccccgcgactgatgagcagcagctgagtcgctgtctggctgttaaacgttaccgcgtcagcagccagcgggcggtatgctcatcggtcaccaggccattgatccagccgcctttaagggcggccaggatcgccggtcgtttatgttctccacaggcagcggcaatccgcgggcagtggctctggcggatatcatagctggtgatcatgcggttgatctcgctgtctaccacgtcgccttgcgcatcaataaaccgcccgaggatctccccaatgccgccgcgggcggtcagctcatccatctgcgcctgattgataaagccgtctttaaagatcggactttgcgtgcccagcggaccaataccgacaaaaatcacgtccgcctcacgggcgacgccggagacgctgcggaataagcgattggtgcaccacatttcatactcatctgcgctttgggcgtagcgcggcgccggccactgatagtacttggccttaattttgcgggtcagcagcaggggcacgtcatcgtaataattgcactgcccgtcggcgttcatggcgctgatcagcgccacgcagcgggtattcaggctgtcaaaatcgatgcgctgcagcgcttttttcagggtcaggcccgagcccagaccgatgattttctctttatcatcctgcagatagcgagccatcagctgatagcagccaaatgacacactgtcgagggtgctttcttcgctaaaggcggggaccacattgcactcgatcaagcggtatttttcctgcagcaactgcgcataatcgaggcagttcgctaccggatggtgcagattaatcgacacaatcccttcttctttcgcggcggcgatcagccgttgcaccaccggtctggaggtgcccagtaggctggcaatctcgctctgattctggccggcgatgtagtacatccatgcggcacgcaccttctgatccaaccggatatcgtcttctttactcatggtttcccgccctaagttgctggccagggcacgcaattggcccggcgaatacccgcattctcgccgtggttggcataactggcaagcttttgctctttactggtcatttgtaatttaattgggtaattgctcttttgtgatccatggctcttattttggtcaaatgatcaattacagtggcgccatcaactcaaggagagcagaacatgaacaatcaattcacatggcttcatatcggtctgggttcttttcatcgcgcgcatcaggcgtggtatctgcatcgtctgattgcttccggggataatcgctggcgcatcgcagcggggaatattcgcaacgacgccgagcaggtggtccaggcgctggcggcgcagggaggacgttacgtcctcgagaccgtcagcccggaaggggagcgcgaatatgaagagatcacctcaatccagaaactgctgccgtggcaggccgggctacagccgctgattaacgaaggggcaaacccgcagaccaaagttatcgcctttaccgtgacggaaggggggtactacctgaacactcgccatcggctggaaaccagcaaccccgatctgcaggccgacctgcaaggcgagtgcaaaaccatttacggcaccctcgcgcggatcctggaaaagcgcatggccgacaacgccgggccgctgaccctgctcaactgcgataacgtgcgtcataacggcgagcgtttccacgacggcatggtcgagttcctgcagctcaccggcaaacaggcggtgattgactggatggcggccaataccacctgtccgaacaccatggtggaccgcatcaccccgcgtccggcggccgatctgccggcccgcatcaaagcgcaaaccggaattgatgacaaagcgccggtgatgggggagacctttatccagtgggtagtggagaacaacttccgcgatgcccgcccgaatctggaggcggtcggcgtggagatggtggagtcggtcatcccgtatgaagaggcgaaaatccgtattctgaacgcgtcgcacagctgcattgcctgggcgggaaccttaatcggccagcagtatattcatgaaagcacgctgaccgatgttatctacgccattgccgaccgctacgttacggaggacgttattccgtgtctcggcgataacggcattgatctgccgacctaccgggatgtggtgcttaagcgctttaccaacccctatatccaggacaccaaccagcgcgtcgccgccgacggcttctcgaaaattccggcgatgatcgcgccaaccttgcaggagtgctaccaacgcggcgtccgccctgaggcgaccgccatgctgccggcgctgttcttcgtctttatggagcagtggcacaagggaactctgccgtatcagtaccaggacggcatcctggatgcgcaggcggtgcatgagatgttcgaggctcaggatccggtggctgtcttcgcccgtgataaagccctgtttggtgatctcgccaacaacgcggatttcctggcgctgatgcgcgagaaagtcgccgccgtttacacgctgattaactaagaggtggctatgtatctgggtatcgatctcggcacatcggaagtcaaagcgctggtcattgatgagaaccatgaggttatcgccagccatagcgcgccgctgagtattcagcggcctcatccgcactggtcagaacaagcgccggagctatggtgggaggcgacggagtacctgatggccacgctacgggaaaaatgcgcccagcattggccggccattaaggcgattggcctctccgggcagatgcacggcgcggtgttgctggatgcagaggggcaggcgatccgtccagccattctgtggaacgacacccgctgcgccgcagagtgcgccgagctggaggcgatggcgccggagctgcatcaggtggcgggcaacctggcgatgccgggctttaccgcgccgaagctgttgtgggtgcgccgtcacgagccggaacactttcagcgcaccgccacggtgctgttgccgaaggattatctgcgctaccggatgaccgggaagaaagtctccgatatgtcggacgccgccgggacgctgtggctggacgtggcgaagcgcgactggtccgacgctctgctggacaagtgcggcctgtcgcgtagccaaatgccgacgctggtcgaaggctgcgagatttccgccacccttgacccgcaggtggctgcccgctgggggctgaacgcctcggtggtggtggccgggggcgggggtgataacgcggtcagcgccattggcgtcggcgcggtctcgccgggagatgcgtttatttcgctcggcacctccggggtgctgtttgtggtgaccgacgcctatcgtccggcgccgcagtcggcggtacatgcgttttgtcacgtgctgccgaacctgtggcaccagatgagcgtcatgctgagcgccgccagctgtttgcagtggttctgccgtctgaccggcaccacggaggtggcgctgctggcggagattgccgagctaagcgaggaggataaagccaacgcgccgttcttcctgccctatctctccggggaacgaaccccgcataacgatcctgacgcccgcggcatcttctggggcatgacccatgccagcctgcgcgcgcagctcggctacgcggtgctggagggggtgagctttgggatcaacgacggcctgcaggcattgaaagagagcgggacgccgatcgcgcagtgctcgctggtgggcggcggcgcccgcagtccgttctgggcccagctgctggccgatattctcgctatgccggtggtgacccacaaaggcggagagaccggcggcgcgctgggcgcggcgcggctggcctgcctggctgcgggcaaaccggttgccgcggtgtgtgaaaaaccggaagtctggcagacctggcgtgcggatcccattcgccaccacaccctgatgcaacgctacgcgcagtttaaagccctgtatttaaacgatctgcactatcgacagcactgattttcatcataaccgccgcttcgttgcacgtcgcggagcggccaccctgtaccctgaaaacgaggtcattatgtctatcaataataaacagtggctcggtttacccctgaacctgctctggggatacatcgccattgccgtatttatgaccggcgacggttttgaattagcctttctgtcgcactatatcaaagcgctcggcttctctccggcggaggcctcctttgcctttaccctctacggcctggccgccgcgctgtcggcgtggatttccggcgtggtggcggaaattatcaccccgctgaaaacgatgatgattggcttcgtgctgtggtgcgtattccacgtgctgttcctcgttttcggcctcggtcacgccaactatgcgctgatcctgcttttctacggcatccgcggcttcgcctatccgctgttcctctactcgtttatcgtggcgattgtccataacgtcaaaagcgacaacgccagctcggccatcggctggttctgggcggtgtattccatcggcatcggggtcttcggcagctatattccgagctttaccattccgcacattggcgaaatgggcaccctgtggctggcgctggccttctgccttaccgggggcgtgattgccctggtttccctgcgccatattcaaacgccgcagcatatgcagaatctcaccacccgtgagaagttttccgagctgggacgcgccgcgacgctgctctataccaaccgcaatattctgctgtcgagcatggtgaggattatcaataccctctcgctgttcggctttgcggtgattatgccgatgatgtttgtcgatgagctgggcttcagcacttcagaatggctccaggtatgggcagtcttcttcttcaccaccattttctctaacgtgctgtgggggatcctcggggaaaaactgggctggatgaaggtggtgcgctggttcggctgcatcgggatggcgctctccagcctggcgttttactacattcctcagcactttggccatagctttgcgatggcgctgatccccgccatcgccctcgggatctttgtcgccgccttcgtgccgctggcggccgtgttcccggcgctggagccgaagcataaaggcgcggccatttcggtctataacctatcggcggggatgtcgaactttctcgcgccggcgattgccgtggtgctgctgccgttcttcagcactatcggggtggtgatcgcctataccggattgtacgtggtggcctttttcctctgcgcctttatccgcgtggagcagccggggttctcccacaaggaagcaaccgcccgcgagcaggttgaattctcataggtactgcggctggcatgcgcttcatgccagccttaatgaggtgaacgaatgagtatgcaggcggttatttttgacatggatggcgtgattattgattccgaggcgctgtggcgtcaggcgcagattgacgccctcgcgcagtggggggcaacggcgagcgttgctgaatgtgaaaccctgaccaagggcaagcgcctcgacgacattgccggcacctggtgccgctattttcagcttgatctcgctccgcagcggcttgaagacgccatcctgcagcgcatcacccgcctgattgccgcgaaaggcgaaccgatgcgcggggtgcaggaggcgttacgctattttcgcgaagcgggttataagattgcgctcgccacgtcatcatctcgtcaggttattgccgctgtgctgaacaagctttcgctctggcacttttttgacgcgatctccagcgcggatgatgaaccacgcggcaaaccgcacccggcggtgtacctcacgacgctgcggaagctcaatctcaacgccagccagtgtctggtgattgaggatagctttaccggcttttgcgcggcccagtcggcggggattgccacgatagtgattgcagaagatagccagcacgcgcgttttcaggccgccgctggccgctatcaaaccttacctgaactgctggaagcgcttagcgcggagccagcggcggcggtttaagtcagccatttgtgggcgcagaaaatcccgggatgtacacggtcggtcactctcttttctgcgctcacgcccttttttctccatgccgatccgcctcacatttcgctcatcttttgtgaaaacagtcacgtcttgttgtgccaatgcccaaatttatggccttgcttagcggtgtttgtccgaggcactgctacgtaattgtgcttagattatatattgaaacgtattttcaataatgtgaaaccgctttgccgatttgcctctgtcgatcggatttggccgtgataaggattgagcatgaaaattgaatctgtgaatgtcaccgttttccaatatcccactcgtcgggtttccgacagcgccgggcactcccatccgggggttgaaagcatggccaaaatggcgatgctgaccatcaccgctgatgatggggcgcagggcttttcgtttgcgcctccggaagtcgtgcgcccgttcgtggtgaatactttttttcgcaaagtgctggtgggacaggacccgtttaaccgtgagcgtatctggcaggatcttaaccactggcagcgcggcagcgcacatcagctaacggagcgcgcgctgtcgtttgttgaacaggcgctgtgggacctgatcggccgcagccttaagatgccggtttataagctgctcggcggctatcgcgacactgtcccggcttacggtagcaccatgtgcggcgacgatctgccgggcggcctgtcgaccccggaagagtatgccgcttttgctgagaagctggtcgcccgcggctacaaggccatcaagctgcacacctggatgccgccaatctcttttgcgcccaatcccaaaatggacattaaagcctgcgcggcggtgcgcgaagccgtagggccggatattgacctgatgattgatggctatcattggtacagccgcgccgaggcgctgtggatcggcaaagagctggaaaaactcaatttcgcctggtttgaagagccgatggaggaggattcgatgtcctcctatgcgtggctggcggaaaacctgtcgattcccatcgtcgggccggagagcttcggcggcaagcaccacatgcgcgccgaatgggtgaaagccggggcctgcgacattctgcgcgccggcgctaacggcgtgggggggattacaccgaccatgaaggtggcggcgctggcggaatctttcggcatggattgcgaagtccacggcaacggagcggcaagcctggcggtggtgggcgcgatccgaaactgccgctggtacgagcgcggcctgctgcatccgttcctcgactacgatgaaccggcggcctatctcaacagcattgtcgacccgatggatgaccagggatttgtgcatttgtcacaacgtccgggtctcggtgaagacattaattttgcgtatatcgaagccaataccgttagccacgactgatttaaaaaaataaatacccgatggcgctgcgcttatcgagcctgcggcccggtagaccggataagccgaaaatgccgccatccggcaacatgtaccctacagtacaggcaaacagagatatgaaaaaaacctccttactgggagcgtgtattctcgcgctcgccatgtcgatggggagcggggaggcggtggcgaaaacgccgcccgaccagctgatcatcggcatgaatatgaataacctgctcacccttgacccggcggcgatgaccggtaacgaagtggtggggatcgtggtcaacctctacgactcgctggtggagcttgaccctgagcagctcaccaccgtcaggcccgcgctggcgaaatcctgggatatcagccccgacggcaaaaccctgacctttcatctgcgcgatgacgttaagtttcactccggcaacccgctgaccgccgccgacgtcgtgtggtcaatgcggcgcatcctgcacctcaacctggcccaggcctcagtatggaaatcctatggcttcagtaagaaaaatatcgacagccaggtcagcgcgccggaccgcttcacggtgcaaatcgtattacccaaagataacgatccgcagctggtgatttactcgctggcggcgctgggcaacctcggagtgctggacagtaaaacggtgcaaagccatcagcaggataacgactggggtaaccgctggctaaccacccatgaagccggttccgggccgtttatcctcgaaacctggcaggcgaaagatgtgctgcgcatgaagcgcaaccctgactactggcgcggcgaggcgaaaatgagccgcgtggtactgcgtcatttccaggagtcgcaaactctgcgcctgatgatcgaaaaaggcgaccttgatattgccaacaatatggcggtttccgatatcaacgccctgcgcagcgatccgcagctgaccgtcgatgcggtgcagcgcggcaccatgtactacgtggcgatgagcatgaaagaggcgcacttcgccaatccgaaagtgcgcgaggcggtgcgctttctgattgattaccagggtatcaataaagcgctgatgccgggctatggcgtgctgcaccagcggcctatcaaagcgggaatgccgtccacgctacccgatcccggctacaggctggatgtggcgcgggcgaaaaagctgctggcggaagcgggatatcccaacggctttgataccacgctgcgggtactctccgatcagccatttcttaacatcgctatcgccgtgcagtcgacgctgatgcaggcggggattaacgccaaaatcatcaccggcactggtaaccagatctacggcgcaatgcgcgagcgtaaatttgacctgctggtaggtcgcggcggcagcgggatggagccgcatccgcactccagcctgcgcgcgctggtctataacccggataacagcgataaggcgcgcctgaccaacttccagggctggcgtaccggtttttacgacccgcaactgaatacgatgattgaccaggccctgctggaacgcgatccgcaaaaacaggtggctgactaccaggccatccagacacgctacgaccagctggttccggctttaattccgctttcgcagatggttgattcggtcgtcgtgcgcaacgaggtacgggagtatcagccgcacccctccgccaccacttttctgcgtgacgtctataaagtccgcgaaggagagaaaggatgagtaccgcaatccttgcgcccggctcacgcggccggtgcttatcaaaacggctactgcaggtggtgattacactgttcggcctgctgctgctgacctttaccattggccgcgtcatgcccatcgacccggtgctggcgattgtcggcccggatgctgaccagagtacctatcagcaggtttaccagcagctggggtttgataaatcgctgaccacccagtttggcatctatttcgtcaaccttttgcacggcgatctgggcaacgcgctgctgaccgggaaaccggtggtggacgatattatccgcgtcttcccggccaccatggagctggcaacgatggcgattattgtcggcgcgggtcttggtattccgctgggcgtgttggcggcagcgcggcgcaatagcgtctccgattatgtggtacgcattatcagcctggcgggctactcgacgccgatcttttgggtcgggatgatggggctgctggtgttctatgcctggcttggctgggtaggcggcgccgggagggtagatctcgggctggatggtatggtgccgcgccgcaccgggctgatcaccgttgatgcgctgctggccggcaacggccaggtgttctggaacgccattaatcatctgattcttcccgcctcgctgctgggttttcactcgctggcttatatcagccgtatgacccgcagctttatgctggcccagctgtcgcaggagttcattattaccgcccgggtgaaagggctgaccgagcgccaggttatctggaaccatgcgtttcgtaacatcctcgtgcaactgctgacggtggtggcgctggcctacggcgcgctgctggaaggcgcggtgctgattgaaaccgtcttctcatggccggggtttggctcctaccttaccggaagcttgctgctgggcgatatgaatgcggtgatgggctgcgtgctgctggtgggggtgatcttcgtgatgctcaacctgctctccgacatgctgtatcaattctttgacccgaggacaaaatcatgaccgtttctctggattcgccgctttcgggtggtgcgggcgaaggccgtcagcggctgcaacgcgcggcggcgcgggccgtcgggtttatcggcaaaatggcgcgcaatccgctcacggccatcggcggaggaattatctttctgctgctggtggtggcgattttcgcgccgctgattgcgccttataacccgctggtacaggacctgaatagtgcgctggtcgcgccgaatgcgcagcactggttcggcaccgatgagtttggccgggatatctttagtcgcctggtgtacggctcccgcatcacgctctatatcgtgctgctggtctcggtgactgtcggtccgctcgggctgctgctgggcgtcagcgccggctatttcggcggtaaagtcgatatggtgctgatgcgcgtcaccgatattttcatctccttcccgagtctggtcctggcgctggcgtttgtcgccgcattaggaccggggctggagcacgtggttatcgccatcacgctgaccgcctggccgccgatagcccgtctggcgcgcgccgaaacgctctctctgcgccaggccgattttatctccgccgtgcgtctgcagggcgcttcatcggcccgcgtcctctggcgccatatcgtgccgctgtgtctgccctcggtcattatccgtatcaccatgaatatggccgggatcattctgaccgcggccggcctcggctttctcggcctcggcgcgcagccgccagagccggagtggggagcgatgatctccagcgggcgcacttatatgatggagtgctggtgggtcgtaaccattccggggctggcgattttgatcaatagcttagcgttcaacttcttaggagatggcctacgtgacatcctcgatccccgtagtgaataatgcaccgctgctcgacgtgcgcgatttgtgcgtcgactttgttaacggtagcgcggtgacccacgccgtgcgcggcgtctccttccagttggggcatgagaagctggctattgtcggcgagtccggttcgggtaagtccaccgttgggcgcgcgctgctgcagctgcatccgaaaaaggcccgcgtcagcgccagccggatgcagtttgccgacctcgatctgcagcatcttagcgaagcgcagatgcgcggcgtacgcggcaaacgtatctcgatgattatgcaggatccgaaatattcgctgaatccggtggtcagcgtgggtaagcaaatcgccgaggcctggcttactcatcatcccgggcgtaaagatgaggcgaaagccagggcgctggagatgctggaggtggtgcgtattcgccagccggagcgcgtttatcagctttatccgcatgaaatatccggcggacaggggcagcgcatcatgatcgccatgatgctgattaccgacccggagctgatcattgccgatgagcccacctccgcgctggacgtgtcggtgcgcctgcaggtgctgggcctgctggatgacctggttcagtcgcgcgggttggggctgatttttatcagccacgatatcaacctggtgcgcagcttctgcgaccgggtgctggtgatgtacgccggacgggtagtggagtccatcgccgctaaagatctcgataacgcccgtcacccctacactcagggattgattaactcgctgccggatatgcagcatcgtcgcccgatactgccggtgctgcagcgtcaggccagctggttaacggattaaggagcggataatgattgaagttcaacatctcaacctcgcgtttggcgagggggagaagcgtaaccaggtgctgtatgacgtcagtttccacgttaagcccggcgagatctacggtctggtaggagagtccggttccggtaaaacgacggtgctcaagtgcctggcggggctgtttacccactggcagggggaactgaccatcgatgctcagcccttagggcatgaaattagccgcgagcgctgccgtcaggtgcagatggtatttcaggacccctacggatcgctgcatccccgtcacaccattggcgatatcctcgaagagccgctgcagatccatcgtatcaacgaccgcgaccggcggatcaatgtgctgctggataaagttggcctcaaccgcgcctttcgcgagcgttatccgcatcagctctccggcgggcagcggcagcgcgtggcgatagccagagcgctgattcttgagcctcaggtgctgctgctggatgagccgacgtcggcgctggatgtgtcggtgcaggctgagatccttaacctgctggcggaactgcagcgggaggctaagctcacttacctgatggtcacccacgatcttggggttattgcccacttatgccagaaagtggcggtgatgcagtacgggaagatcctcgaaaccctgacggtcgatgcgctggtcagcggccaggcgcagatggcctatacgcagatgctggttaacgccagtcggcaatatacgcgcgaaatggcgcgcgaggtggcggaatactaagctttatggcgcattgtctcacggcagatgcgcccattttaataggtaactatttgatgttataggttttttgtggttgtgggtatcgtctattaatgtaagcgcggtgcttggatcgatatcctgcccaggtttttcctgcagccgcaggtgccgttttaccttaacattcagaggctcaatcaacgaacccggctgctgtataccagccgggcgccgtctttgctttgcgaagcctgatcagcgtagcagcgggcagtcgggcggcagccggcagcgcagagccgccggtaacagctccatacggaaggttttgccgctgagcggctcgccgtcaaggttaaacgtcatctcatggggggcggtgatctcaaaccatgaggagacaccgtcaacaatattcggcgagttttccggattcgccagggtgctgaacagggcagggatcagctcttcgccggtgaaaatgcgcagatgcagcagaccatcgttaatcaacgcctccgggcatagctgctggccgccaccggcctggcggccgttgccgatgccaatgaccagcgcatcgccctgccagtgaaagttctctccgcggatctcgcagcggtccggcttcagggtatccatacgcatcaggccatggattaaataagagacaccgccgagcgcggctttgagtttttccggcgtttcggtggtgatccgggtgccgaacccgccggtcgccatattaataaagccggttttatcattcacccgggcgatatctatcggcacatcgcggccgacgatcgccagcttgagggcgctggccagatcctgcggaatgccgacgctggtggcaaagtcgttggccgtgcccagcggtaaaatccccagcgccatcttgctaccgcgctccaccagcgcggtcgccacttcattaatggtgccgtcgccgccgccggcgatcaccgtttcaacgttcagctgcagggcttcatcgataaaccgcacggcatcgcccttttcccaggtcacgcggacgtgaatatcgatcccttcgtcgcgtaacaggttaaccgcctcgcgtaactgcggttcattggcacctttgccgttaaggatcagtaagctggcaggaaacgtagacatcatcaagggaacctttattgctcaatgttgcataaagtgtaccgcatgacgaaagcgaagaccggaggagaggcaaaaaaataagcccgcgtaagggagattacgcaggctaaggaggtggttcctggtacaactagcatttatgggttatgtttttcagcgaaatggatgatacctgtttcgatcgaaacggtatgtgatccgattctaatatccttacatcgtgaaaaaataacgcaaattaactagttaccgtgcggatttctggttgtttgaccagtaaagttgcgcatcagcagggcatactgcaggggcaggtcgtccggcacaggcaaccagacggtatagccatcgcccggggccaccggcatggtttcgcctttgccattctccatatgctcaagggtgaaattgacgttaccctgcggggtcatcagctcaaggctgtcgccgacgctgaacttatttttgaccgccacggccgccagcgggccgttacgctctccggtgaattcgccgacaaactgctggcgctcggagacggagtagccgtactcgtagttctgataatcgtcatgggtatggcggcgcaggaagccttcggtgtacccgcggtgggccagcccctccagggtctccagcaggctggtgtcgaacggtttgccggcggcggcatcgtcgatcgccttgcggtaaacctgagcggtgcgcgcgcagtagtagaaagatttggtgcggccttcgatcttcagcgagtgaacgcccatctgggtcagacgctcaacgtgggcgatagcccgcagatctttcgagttcatgatgtaggtgccgtgctcgtcctcaaaggcggtcatgtactcgcccggacgtttggcttcctcaatcataaagactttatcggtcggcgcgccgatgccgagggttggctccacggtctgcaccgggatcggctcatatttgtggacgatgttgccgacgtcgtcctctttgccttccgccacgttgtattcccagcggcaggcgttggtgcaggtcccctggttcgggtcgcgcttgttgatatacccggagagcaggcagcggccggagtaggccatgcacagcgcgccgtggacgaaaatctcaatctccatctccggcacctggcggcgaatctcttcgatttcatccagcgacagttcacgcgacaggatcacgcgggtgagccccatctgctgccagaatttgaccgtcgcccagttgacggcgttggcctgcactgaaagatggatcggcatctccgggaagtgttcccgcaccagcatgattaaacccggatcggacatgatcagcgcgtccggacccatctccaccaccggcttcagatcgcgaataaacgttttcagcttggcgttatgcggggcgatgttgaccaccacatagaattttttacccagcgcgtgggcttcattgatgccaagctgcagattttcgtgattgaattcgttgttacgcacgcgcagcgagtagcgcggctggccggcataaacggcatcggcgccataggcgaaagcgtaacgcatattcttcagcgttcccgccggggagaggagttctggtttaaacatggtgttctcgttctgatgacaggtcagattcgccgcacctggtgcggcgagttggggagtgtccccacattaagggcgggcattgtagcgccgcggcgaaggggagtaaatatcagataggtatctttcagtatggctaatttgtttgccattttgaacctgggcagtgctcacactgacagcgttaataacgcctggtgggataggctctagggagttccccgggttgcggcgtaaacgccttacccgggctacggattgcagatggcggtgaacgtgtagcccggcgaagcgcagcgcgagccgggaaaaggctaactacgccagccggcaggcgtccgcttcccagcggtagccaacgccatacaccgcgcggataaacgactgctcggcgtccagcgcctccagcttgcgccgcaggttcttgatgtggctgtcgatggtgcgatcggtgactacccgataatcgtcatacagatggttgagtagctgttcgcgggagaacactttgcccggctcctgggagagggttttcagcagccggaactcggcgggagtgaggtccagcagcttgtcgcgccaggaggcctgaaaacgaccttcgtcgacaatcagcgggctctgggcgtccagcgcctgcagatcgcgctgcggcttgcagcggcggaggatggtttttacccgggcgaccacttcccgcgggctgtagggcttgcagatatagtcgtcggcgcctatttccagccccagcaaacggtcgatctcttcgattttcgccgtcaccatcaccaccggaacatcggagaagcggcgaatttcccggcacagagtcagaccgtcggtaccgggcagcatcagatccagcaggatcagatgcggcggcgtctggcggacgtagggcaggaccttgtcgccgtggttaatcaaggcaggcgcatagccggcggcctgcagataatcaatcagcagctggccgagcttcggttcatcttccacgataaggatgcgtggggtgttttcatctacaggcaattcagtcatacgtctctcggtaaatcatgttccagaggtaactcaactttaatgctaaccccgccaaaaggcgaatggtcggcacgcagggtgccgccgtgggccgctacgatattgaggcaaatcgccagtccgaggccggagccgccgctggcgcggttgcgcgatccttccgcccggtaaaagcgttcgcacaggcgggccagctgctcatcgctgacgccgggggcgctgtcggcgaagtcaatcaccagcatgcgaccgctgcggcgggcggtaatgtgcaggctgccgccgctgtcggtatagcgcaggctgttctccagcagattgttgaagagctgcatcaggcggtcgcggtcgccgaagatcatcgcctgctccgggagcgacacctgaatgcttagctgccggctggcgaagcgctcgcgaaaagcgcccgccgccacttccagcagggtgatgatatccagtgaggttttctggtaggccagcgccccctcgtcggacatcgacagctgatggaggtcgtccaccagcttggtgagggtagccacctcggcctgcagagagggaatcgactcgggggtaaagcgccggaccccgtcctgaatcgcctccagctcgccgcgcagcaccgccagcggggtacgcagctcatgggagatatcggccatcagatcgcgacgcatctgctggttgcgctccagggtgctggcgagctggttaaaatcctgcgccaggcggccgagctcatcgccgccggtcaccgtcacgcgggtggaaaagtcgcctgccgccagcttatgggtgccttccaccagccgcttcaccggcgccagcagaccgcgggccaacgggaaagtggccagcgcggcaagcagggtggcaagggcgacgatcagccagctggtgcgcttttgctgccggtcgaagttaatgtcggtattgcgcgtcagccgctctaccggcgaggcgataactttgcccacctccgcgccgttgaccacgatgctgcgctgggtgccgtcctccgggacgcgctcacgcggccccaccagcacgcgccccgactgatccaccacccagaacatggtgcgccagccgtggggcggcatttccggcctcgggcgcgggccgtcaggggggccatccggcggcggcccgtccggggcggcgtccggcttcatggcgtgccccggcggcgagcggtcgtcgttatcccgttcgaaggtgcgcagcagctggaagataaagcggtcattattgcgcagaaacgcccagctgccatgctgggcatactgctcgctcagcgcgtcgctgagcatggttaagcgttgctcattgccgcgcttgatatagtcgataaacccgcgttcaaaactaatgcgcaccgcccagtgcatgctgatcagcagcacgatgcaggtggcgaatatagcgaggaacagcttgccggtaatacccgggcgccataatttcacgatccactcctgttgcctcgacggaggacggtattgctgccgacgtcatccggtaccctggaaaagatgagcgccggcagggcgatgatcgccgccatgctcagataggtgtagagaaagacctgatgggtgctggcggcgtcgagactcatatgctgctggccatacagccccagcagcagcccggcgatggtcacgccgatactcatcgacagctgcatcaccatcgacagcaggctgttgccgctgctggccagatcgtccgggagatctttcagcgtcagggtattcatcgaggagaagcggctggcgttgatcatcccctgcagaaataggaccagcggcagcacgtaataccagccggccagggcgctaaacataaacagcaggctgaccgccgccaggcccagggtgctggcgaccagcacccgacggtagccaaagcggttgaccacctggaccacgatccgcttcatgcccatgctgccgagcaccatcgggatcatcatcagcccggcgtgaaagggggagaagccgaggccgatctgcagaaacaccggggtcataaacggcagcatgccgctgccgatgcgtcccgcgaagctgccgccgaggccgagagagaaggtgcggttgcgaaacaggttaaggctaaacagcgcccgggcgttgccgcgggcgtgccacaggtagagcagcagggcgcagaggccgacggccaccagccccgccagccaggcaggggaaatgccgagccctttctggccgtcgagcgccagggtcagggtcgccattccggcggccagcagcagaaagccggagagatcgaagcgccgggtctgcatggtgtagttgggcatcagacagagggtggcgatcgcgccgacgatccccaccgggatattgatgaggaagatccagtgccaggaggcgtactccaccagcaccccgcccagcgccgggccgagcagcgggccgacctggcccggcagggtgacgaaggtcatcgccgccatatactgatcgcgcgggacgatcttcatcaccgtcaggcggccgaccggcaccatcatcgcgccgccgactccctgcagcacccgcgccatcaccagctggtcgagggtgctggcctgggcgcaaaacagcgatccggcggtaaacagcacgatggcggtgaagaagatattgcgcaccccgacccggtcggccagccagccgctggccggcagcatcaccgccaccgttaacacataggagacgataatcatatgcatatgcagcggactctccccgaggcttttggccatcgaggggagggcggtgttaacgatggtggtgtccagcgactgcataaagaagccgaacgccactatccatagctgccagcgcacgctggccgggaggtctgtcatgttattcgcttaccggttgagaggagtgacgcgaaaaacgcagccgcagacggtcaaagaaaagatagaccaccggcgtggtgtagagcgttaacagctgactcatcaccagaccgccgacgatggtgatccccagcggctggcgcagctcagagccatcgcccccggagagcaccagcggcagggcgccgaacagcgcggcgagggtggtcatcataatcggccggaaacgcagcaggcaggcctggaaaatcgcctcttccggcgtcaggttgccgttgcgctgcgcctccagggcaaaatcaaccatcatgatggcgtttttcttaacgatgccaattaataacataatcccaatcagggcgattaggctgaacggggcatcgaagatctccagcgccagcagagcgcccaccccggcggagggcagcgtcgagaggatggtcaacggatgcacatagctctcatatagcacccccagcacgatatagaccgtggcgatagccgcgaggatcaggatcacctgcgcgttcatggtctgctggaacacctgagcggtaccggcaaaggagccgcgcacgctcgacggcaccccgagctgggtcatcgcgcggtcaatggcctcgctggcttccgacagcgagcggccggtgggcaggttaaaggagatagtggatgccgccgacagcccctggtggttcaccgacaacggggcattggccggctgccatttggcgaagtaggccagcgggatcggcttgccgtcgctgttaatgacgaacatcttatccagggcgctgacgtcctgggtgtaggccggatccacttccatcaccaccttatactggttgagcggctggtagatggtagagatctgccgctggccaaaggcgttgttcagcaggttgttggcgtcctggacgctgatgccgaggcgcgacatggtatcccggtcatagaccaggtccatttcggcgccattgtcctgttgatccgagttgacgtccgccagctccggcagcgccgccagcgctttgcggatcttcggctcccactcgcgcagcgccgacaggtcgtcggacagcagggtgtactgatagctggcgttcgactgccggccgccgacgcggatatcctgcaccgccatcaggaacaggttggccccgggctcgttggccagctttttgcgcagccggtcgatcacctgctgcgccgtctcgtggcgctggtcgcgcggcttgagggtgataaacatcatcccgctgttgacccgcgagccgccggtaaagccggtgacgttatccaccgccggatcttcgcgaatgatcttcataaagtcctgcagcttgccgcgcatcgcctggaaggagatgctctggtcggcctgaatgccgcccatcagcaccccggtgtcctgttccgggaagaaggttttcgggatcgaaatgtagagccagacgctgagggcgatggtgcccagcaccaccaggccggtcaggcggctatgcttcagcacccattttaacgatttaccatagccgccctgcacggccaccagcaggcggccaaagccgcggttgcgcgtcggctggtggggcttgccgcttttcagcagccagccgcacatcatcggcgtcagggtgagggagaccgccagcgagatgccgatcgccaccgacagggtgacggcgaactcgcgcagcaggcggccgggcaggccgcccatcagcagcagcggcaggaacaccgccaccagcgacaggctcatcgacagcacggtaaagcccacctcgcggctcccctgcagcgccgcctgcagcggtttcatccccgcctcaagatggcgggagatattctccagcaccacgatagcgtcatccaccacgaagccggtggcgatggtcagggccatcagcgacaggttattgaggctgaagccgcacaaatacatcgcggcgaaggtgccgattaaggaaaccgggacggcgacggccgggatcagcgtggcgcgtcccgagcgcaggaacaggaacaccacgaggatcaccagcgccaccgaaatcaccagcgtctgctccacctcctccagcgaggcgcggatggtcggcgagcggtcctgggcgatctgcaggtcgatagccgccggaatggtctgctgcagctccggcaggcgggcgcggatgctgtccaccgtctgaatgatatttgcttccggcagtttgcggatcatcagcaggatcgccggtttggcgttggtcatcccggcgttgcgtacgtcctgcaccgaatccgagacggtggcgacatctcccagccgcaccgcggcgccattttgatagtggacgatcagcggctgatagtcggcggcggtcttcagctcatcgttggtctgcacctgccagcggtgcgcgctgtcctccagcgccccctgcggtttgcgcacgttggcgtcgctgatggcggtgcgcaccgcgtccagcgacacgccctggttgaacagcgcctgcgggttgaggtcgacgcgcaccgccggcagggagctgccgccgacgtcgacatcgccgacgccgtcgatctgcgcgatggtctgcgccagctgggtggaggcgaaatcatacagctcaccctgggagtaggtgtccgaggtcagcgtcaggatcatgatcggcgcatccgacggattggctttgcgataggtcggccggctgggcattccgctcggcagcaggctttgcgcggcgttgatcgccgcctgaacgtcgcgcgccgcgccgttgatatcgcggtcgaagttaaactcgagaatgatgcgggtgctgccgagcgagctggaggaggtcatctcattgaccccggcaatccgccccagggagcgctccagcggggtggccaccgacgaggccatggtctccggcgaggctcccggcagcgaggcgctaaccatgatcaccgggaagtccacctgcggcagcggggctaccggcagcagccggaagccgagaatgccgcacagggtgatggccagcgagatgaggatcgtcgccaccgggcggtaaatgaagagggcgaaaaacttcacttacgcctcctcttcctgacgcgggaagcggcgcttcaggtgcagcgacaggcggtcgaacagcagatagatcaccggggtggtgaacagggtcagcacctggctgagcatcagaccgccgaccatgccgatccccagcggacgccgcagctcggcgccaacgccggtgctcagcatcagcggcagggcgccgagcagggcggcgagggtagtcatcaggatcggccgaaaacgcagcagacaggcctggtagatcgcttcccgcggcggcatcccctgctcgcgctcagcggccagcgcgaagtcgatcatcatgatggcgttcttcttcacgatgccgatcagcagaatgatgccgatgatggcgatcacgtccagctcgctgcccgccagccacagcgccagcagcgccccgaccccggcggtgggcagggtggagagaatcgtaatcggatggataaagctctcgtacagcacccccagcacgatatacatcgccaccaccgcggcgaccaccagccagacggtgctgccgagcgccgactggaaggccagcgagctgccctggaactgggtgcgaatatcggtcggaaaatcgagcgactgttcggcggcgaggatcgcctccaccgcttcgcccagcgagtagttgtccgggacgttaaacgagatggtggtcaccgggaactgatcgaggtggttcaccgacagcggggtaaagcgctgctccaccgtggcgatggcggtcaacggcacgatgccgccgtcgctgctggtgagacggatattctccagcgccgccaggcccggcgtcgcctcggtatcctgctcgagcaccacgcgatactgattcgcctgagtgtaaatagtggagatcagccgctggccgaaggcgttgtacagcgcattatcgacatcggccattgagataccgaggcggctggcgctgtcgcgatccaccttgatataggcggccaggcctttgtcctgccagtcgctgctgacgtcggccagctgcggctgggcctgcaggcggctgagcagcggcggcacccaggtgctcagcgcctcgagggagtttgcctgcagggtgaactgatactgggtgcggctcaccgtggtgtcgatggtcaggtcctgggtcggctgcaggtagagcgccacgccggggacgccgtccaccgcctgctgcaggcggctaatcaccgtctggacgcggtcgtcgcgttcgtccagcggcttgaggttgatctgcaggcgggcgctgttcagcgccgggttggtgccgtcgacgccgacgaaggaggtcagactcttcaccgccggatccttaaggataatgctggccacctgccgctggcgctcggccatgctggcgaaggagaccgactgcggcgcctggagggtaccctggataatgccgttatcctggatcgggaaaaagcctttcgggataaagacccacaggataatcgacagcgccagggtgctcagggcgacgccgagcgtcagccacggatgattcagcacccggctcagccagcggccgtagacggcgatcacccgttcgaagaaacgctcgctggctcgcgagaatcggttctgcttacgcagcgattcgtggcttagcatacgggcgcacatcatcggcgtcagggtcagggagaccaccgccgagataagaatagcgacggcaagggtgacggcgaattcgcggaacaggcggccgacgatatcgcccataaacagcagcgggatcagcaccgcgatcagcgagaaggtgagggagatgatggtgaagccgatctcccccgcgcccttcagcgcggcggccagcggcttctcgcctttttcgatatagcgcgagatgttctcgatcaccacgatggcgtcatccaccacgaagccggtggcgatggtcagggccatcagcgtcaggttattgatcgaaaagtcgaggaacaccatcaccgcgaaagtgcccaccagcgacagcggcaccgcgacgccgggaataatggtcgccggcacgttgcgcaggaacagatagatgatcatcaccaccagggcgatggccagcatcagctcaaactgggtgtcgcgcaccgaggcgcggatgttggtggtccggtcggagaggacctgcaccttcaccgatttcggcaggctctcggtgagctgcggcagcatctggcgaatgctgtcggcggtgtcgatgatgttggcccccggctggcgctggacgttcatcacgatggcccgctgctggttggcccacgcccccagccagctgttttcggccccttgttcgacgctggcgacatcgccgagccggatcggcgccccgttctgataagcgataatcagccggcgataatcctcagcggactgcatctgatcgttagcggaaagcgtcaccgcgcgggccggaccgtcgaggctgcctttcgcggagttaacgttggcgctggtgatagcggtgcgcacggtttcgctggtcaggccgagggcggcgatggcctgggcgttaagcttcacccgcaccgccgagcgctggccgccggcgagggtcaccagaccgacgccggaaacctgggagatcttctgcgccacccgggtctccaccatatcctcaacctgggtcatcgggatggcggaggaggtgacggcgagagtcatgatcggcggatccgccgggttcaccttgctgtagaccggcgggttgggcagatcgctcggcagcaggttggtggcggcgttaatggccgcctgcacttcctgctcggcgacgtccagcggcagggtcagctggaactgcagcgtgactaccgaggcgccgccggagctttgcgacgacatctgcttgaggcctgacatttggccgaactggcgctccagcggggcggtgatggcggaggtcaccacgtccgggctggcgcccggatagagggtgactacctgaatggtcgggtaatcgacctccggcagggcggagaccggcagaaagcggtagccgatgatcccggccagcaggatcgccaccatcagcagagtggtggccaccggacgcataataaacagccgggacgggccgccggtgcggcctgggggtaacacctgcatcaggaacgcgctccgtgtttaccgctctggcgcggggcgggctgcgcctgctcgccgctgctggcggtgacaacttccaccttcgctccctcggtcaggcgatcaatcccgtcggtgaccacgcgatctccggcggaaagcccggcgctgatgactactttctggctgtcctggatgccgggcgtcacgctgtgtttgctgaccttattctcatcgttcagcacccatacgaaatgcccttcgttgcccatctgcagcgcggcggcagggatcaccaccgcgttctgctgggtgtccaccagcaggcgggcgttaacgaactgattggggaacagcgcgtcgtccagattactaaagcgcgccttcagcttgatggtcccggtggtcgcatcgatctggttatcgaggctcagcagctcgccgacgctgattttctgcttattggtgcgatcccaggcttcgacgctgagcgttttgcccgctttctgcgcctgcaccaccgtggcgatgctgctttccggaagggtaaagaccacgtcgatcgggtgcgtctgggtaaggaccacgatcccggtggtatccccgctggagatctggttgccgatatcgacctgctttaagccgacgcggccgtcaattggcgcggtaatgcgggtccagtcgagctgcagctgggcgctggcgacggccgcttcatcagctttcaccgtgccggcggattccaccaccagcgactgctgagtgtcgagctcctggcgggagacgaggttggtcttcaccagctgctggtaacgagcgagatcgcggcgggcattggcaagggtggcctgatctttcgccagctgaccctgcgcctgggcgagggcgactttaaactggctggggtcgatctgcgccagcaggtcgccggctttgacctgctgtccctcctggaagtgaaggctcagcagttggccgtcgacccggctgcggacggtgacggtgttggccgccgtcaccgtacccagcccggtgagatagcgcgggaccgcttcttcggtggcggtggccgcctgcaccggcgccagcgcggcgccaaagcggccatggcgtgcgccgcccggcccctgcgggccctgcccggcggcgggagccccgctgccgctcgtcccgcgatcgtgccagaaccagtaggcggccccggcgataatcactaccgccagcgcggcgccccaacgacgtatgttactgcctttcattagtttacggtctcatcctgaagcgtttcgctgaatgatactagtttagtgagggaaggggccgtaaaaatggaggaattatgaaaagaaggttgagaaatgtctggataaccgccgcgacgccgggcgctcccgcggccgatatccggggtgatatcaacttttagtttaaaaaagcaaaaaatagttgtatccgcgggggctttaattagatttatgcggtgaataaatcagtgcattcccataataataaaatatgcacttaaaaatcaacgtgttaaataatcaggggtcattgctgtggcaaacgcaaacaaactcacgctcttcatcgtcatttttatgctgatggggatcctctccggcgcggctatccatgcctacgcgacgccaaccaccgtctccgcctgggcggacaatattacgctgctcaccgatctgtttctgcggttgatcaaaatggtcatcgcgccgttggtgttcagcaccctgacggtcggcattatgcgcctcggcgagacggcgaccatcggccgggtaggcggcaaggcgatggtctggttcatcacctcctcggtattatccattctcgtcgggctggtgatcgtcaccttccagcacccgggcgccgggttaaacttggcggtgccgaaagaggcggtggataccggcctggcggtcagcggcatgagcctgaaagggttcctgtcgcacactatccccaccagcatcaccgaggcgatggccaacaacgagatcctgcagatcgtggtgttctcgatgttcttcggcatcgccggcgcgtcgctgggggagaagtttaatgctccgctggtggcggcccttaacgtggtgtcgcacattatgctgaaggtgacgggctatgtgatgtacgttgcgccgctggccatcttcgccgccatctcgtcggtgattgcctcccaggggctggggatcctgctcaactatgcttcattcatcggcggctactacctggcggtgctgttgaccagcgcggtgctgattgccgtcggctatatggtgctgaaaaaagaggttttccgcctgctgaacatgctgaaagatccggtgctggtggcctttaccaccagcagctcggaagcggcctatccgaagaccctcgagcgactggtgaagtttggctgctcgcgcaatatcgtctcgttcgtcctgccgattggctactcgttcaacctcgttggctcgatggtctactgctccttcgccgcgatgtttatcgcccaggcctataacgtgccgctgagctttagcgagattacggtcatgatgctgaccctgatgctggcctcgaaaggtatcgccggggtgccgcgttcggcgctggtggtgctggcggcgacgatccccagcttcaatataccggtcgccgggatcctgctgctgatgggtatcgaccatttcctcgacatggggcgctccgccatcaacgtgctgggtaatggcatcgccaccgcgatgctgtcgaaaaatgaagggttgctgaccgacgaggaagcgcagccggactgggaagtggagaaagcggaagcctgatcctgccgcgccctttcactgagggcgctattccacacggaaaaaaggacccctgacaggcacgtcaggggcaatgtgacgaagtatcagttttcctcgtgtagcgtgttttttattatataaagacgggcggtaacgtctttataccgaggaagcgtcagagtttaacgttatgtccgccagcgctggatattttttagcatcctgtggctattttcggatttacgacaatatcgccaggcgaatatcttattctcttctgctcgctatttacctaccagcgctctcgtaacagattcataaactggaaaaagtcatggttattattcagactgtatttttccataatcttatttttatgataggcggcggtgcggggactgacgcgctgcagggcggcgattttactcatatccagcccttcgagaataccgtgcaccacggcggtctgcgagcgcgacagcacgcgatgcgggcagctggcgcagctgagttcccgactcgcggcgtcggtggctgacgggctcatacaatgctggagctcgcttttaatgatcgtcagcaattgcggaatactggcggtttttagcgaaacaaaaataacccctttcaggcagttaatcatgaaatcatcttccggcaactggtcgtagctatggaggataatcagcgaactgccttttttcctgtttttaatcagcgtattgcacaggtagatttcgccggggatcacttcgcaaatgatgatatcttcccctgacaggtcattattacgccaggaaaaacgcgcccgtatttcgccctgcgtgaggtcattgaccatggccaccagcgattcacggacaaaggcgttgcgggtgttgatggtgacattaatgtttctcatggcgttatttccttacgcaaaacataacgccatgctgtgacaaatcctccgggcgtatgcggtgtgttgaagatataaaagtacctacaataattttttattattttaaagtgaattatttacgacgcatcgaacgcttatcgttaaaagtaaatttctgccgcctcctgtctttcagataggaaataaaactgtatacagagatgctgaagaaaaaaatgcatagcaataaaactaaccacgtttgcatggccatcgtttttaccctgattgtgttgcatggtgtcagaatttgccgcgaacggctaatacgttttgttatatgcttttctgtcccgtgaaaatcttacgccatcatcctgatgtgctagcactataagaaagttcttaaggtcatcgtcagtctcattcctctcatttctctcagaaaatgagaaaaattaacacttacgagttttttatatcccgcgcggccgccgacgcgccccgtcgttcaggaaataaaggccagtcccttaccaaagattgcgcgaacgggcaggtggatcccctgctggcgtgccttgtgacgcaggcggctaaccaccacgtcgatccggtgcaggtcaggctcgctttcatgggaaaacaggcaggcatggagatccagtttgctgcacacttcgttgcgattgcgcatcaggagctccaccaggcgatattcctgctgggttaattccagcgtccgggcgtcgggtgaaatcagtttatcctcttgcagacgccagctgccgggggagacggccggcggcgtgccgatcgcctccgcaggcggagccgccggacggtcctggcgcaggcgcgcgccgagggcggtgagggtctcggcaagatgggcgaagtttaccggtttgatcagataggcatcggccccaaggctcagcgcctgtagtttatcctgctgctggccgcgggcgctgaccaccaccagaccgtagtgccccagctcatgcagatagttcagtacgctgaagccatcctcgccgggcaggccgatatcaaccagcacgatatccaccggatggctgtgcagttgccgccagaaggcttcggcgctacgcgtcccccacacctcgaagccgcgatagcccagccaggccagcagttcatccagcagatcggcgttatcttcaattatcgccagccgtaaagccatacgtcgttctcctcttaagcaaccgtggggagggtgagaataaaggtgcagccgtccgggccatgctcggccagccacagtttgccatcatgagcctgcactatctgacgcgcaacatacagtccgagaccggtgccgcctggcaccggcgatgtgtgctcgccgcggcggtagcgctcaaagatcagttccgcctgtccggcggggagtcccgggccgtggtcgcgaatgcgtagctccgtttgcccggcatcggaatgaatatcgatggcgatttcaccggggggcgaatacttgacggcgttatccagcagattagcgatggcgatgcacagcaggccggcatcggcctgcagctgcgggctttccaccgcgccgtgctggcggatgttcaggtagtgatcatgggagatggccaccaccgaggcggccatgttgatcaccgtcagcagggcggtctgctggcgctcgacgtgcagatcgtgggaggcgagccgggcgtcggcaaggcagttatcggtgagctgcaccaggcgggtggcggcgcggccgatgcgatcgaagcgcgcctcctggctggtcgaggccgccgagaggcgaagattctccagcgccgcctggatcaccgccagcggggtgcgaaattcgtgcgccaccatgcccataaactgccgctggtggaagctggcttcacgctcaatctgcagttcgcgcgccaggcgctgcttctgctccagctggcggttttcagcacgcacccgcaggatggcaatgatcagcaccgtaatgatgtggacgatcagcgcgtactgccagagggaatagatcgccatatggaacgggataatcccatggatcgacaactgcaccagcaccgcggcgacgacatagaacggcggcagcagacccagcagcagggtggtacggtcgatagcttttttgcgccacagccaccaggaggtgaacagcagcaccggggtgataatgatgaatactaccccttcaatctgcatcgcgaagccgtaaaacccgagcggaatactgacctgcagcaccaggttgagcaccaccgcggcgatcagtagctgatgaagccgcggcatattcttcttcaaatcaaaaatctcgctgtgcagccagagggcggtagcatagctgaacagggagaggctgctgatcatgaagtcctggaacggcagcgccgcgtggccgaaaaaccactccgggaagccgtgcagggcggccaccagcggataattgagcgagaaaagacagatgccccatagcagacgccggcgcagggccagcgccagccacagcgccacgccgctggcgacggcggccaggccgaaatagaagctccagaacgcggtgtcggcggtcgcccgctgtacaaattcctgcggcgaagagagcgaggccagcaggatcagagtgctggtgctctgcaggcgaaagaccacctcatagccggcggcggtcggcggcggggggaggatcagcacgctttcccggtagtgcagatcgctctcgcgggcgacgtcgcggtcgccaaaggtgcgctgtgcccagggggcatcgctgcccagaggccgatagtaaatagtcagatggtcgacaaaagaggggcccagctgcatccagcgcggctccccggcaaaccacgttcccggcagttcgctgcgcagccaccaggtttttcgcgaataaccaaaggaggggatctgccgggtggtggcgagctggtcgatgggcagggcggcaaagcgatcgagggtcatctggccgctggcgtccgcgtaccactggaccggaatatctatgcccacctggcgcgtcgccgcctgagcctgcggggcgaccagcagcaagagtaatccacaactgagcagccagcctgccaggaactgcggccggcaacgccggaccgccgcgaagatcgcagacacccttttcaatcacgcccccttgcggcatgccaacgatacagaccgcagacatctggctacggtatggataatacgcccccggaaggggggaaaagtggacaggcctgtccggacgaacaggccattttgcgtgggagaccaggaatattccagcgtaatctgcatcggcaggatcaggacagacctgctgcgcggcggcggtgggctggggttagcggaaaaccacctgcgcccagcgggccagcccggcggttaccgagccaaaatcatcgccaccggccagcggaatccccggcaactgggcggtcagcgcctttttgatcagcggcgagcgggcactgccgccggtaagatagatcacgtccggggtggtctggctgctgtcgagcgcgagctgcacctgttccataatgcgggtcaacggttgatccagcgcggcttccagaccctgctgggcgatggcggtggccagctcgtcctgaataaacggcagcgcggtttcgacgctggcggcgctggagagggcgattttgctctcttcggcgctgcgcaccagacgatagctgagacgctggcgccagaccttcagcagcagagccaccttgtcggcatcccgggcgctgcgcagcagatcgttaagcagacggccgttggcggtgctgtagaaatcgctctgcgccggcacgtcgttgatggccaccgcgttccaccacggaaggatcggcagcgcggtgcctttctccgtttcgccgcccatgccgaggaggggcatcaggcatttgaaggccagggcaatgtcgagatcgttaccgccgatgcggcagccgctgtggccgagcaggctctgctggcggtcggcgcgctcccgccactgcgggcccatcaatagcaaggaacagtcggtggtcccaccgccgatatcgacgaccagcacccgcttttcttcattgagggtcgcttcaaaatcgagcccggcggccaccggttcaaactgaaagaccacatcgcggaaaccggcgcggtgggcggcccgctcaaggataccctgcgcctgggcgttcgcctcatcgccgccgaggccctggaagttaatcggtcggccaatcaccgcctggtcgatctgctcgggcagctggctttcggcctgcaacttaatatgcagcatcatggcgcagaccaggtcttcaaacagggccacctgctgcggcttcagcccgctggcgccgaggaaggatttgggcgatttaacgaagtagacctcttgcggatcttcaacatactgctgcagggaggcgagaccgaactgcacgctgttgcgcagcacctcgatgtcttcgtcgcggttggcggcgatggcccgacgcagcagcgcctggttttcgtcgctgtgggtggggacatcatgatggcgatagagccactcgctgaccgcttcgcgcgtcggcgcgcagagcatggagggcagcagggcgctgccgttttccagcgttaacagctggggggtattttcccgcatcacggccaccgaacagttggcggtgccgtagtcaaaaccaataaacatcgtctgcaaaatccccatgccggtgaagaaggggggcgactttagcggatcgtcgccatgccgacaaccggaatttaaaagcaaggcgctgatggtcaagggcgactatcattgaaacgctatataaaggagagcttatggtgctgttaccctggaccccgccctatgactgggcgtggatggttggttttctgcaggcgcgcgcggttgccggcgtcgagcgttttcacgatgggggctacagccgcagctttggcgtggaaggccaccgcgggctgattcatctggcgccggacgaagaggcgcagggcctgcgggtgactctttccccggggctgcagccggtagcggagatctgctatgcgcgaattggccagctgtttgatttagcctgcgacccgcggcaggtcgctcgcacgctgggcgatctggcgcaggcgcggccggggctgcgcctgccgggggcgctggatgccttcgagcaggcggtgcgcgcggtgctgggccagctggtgagcgtggcgatggccgcccggctcaccgccaaagtggcggctggctggggcgaaccgctggcggaggcgcccggcactgttttgttcccgacgccagaggccctgtcccgggccgatccgcaggcgctgaaggcgctggggatgccgctgcgacgcgcggaggcgctgatccacctcgcccgggcggcgctcagcggcgagctgcccctgacggcgccggcggatattgacgccgggctgcgtcaactgcagaccctgcccgggattggccgctggacggcaaactactttgccctgcgcggctggcaggcgaaagatatctttttgccggatgattacctgattaaacagcgctttccgggaatgaccccggccgccatcgcccgctatgcccgccgctggcagccgatgcgatcctacgcgctgttgcatatctggtataccgatgactgggcgccggcggcggaatagccgcccggggcgcataccactggtatcgggacgctgaaatccctataattgccgcgtttggcggtccgccgccaccctccatctctatccaggttaatcaggtcgcaaaaatttatgactgatatgtcccatcagtgcgtcattgtaggcatcgccggcgcatcggcttctggcaaaagtcttatcgccagtactctctatcgcgaattgcgtgaacaagttggcgacgaacatattggcgtcattccggaagacagctattacaaagatcaaagtcatctgtcgatggaagagcgcgtcaaaaccaactatgaccacccgagctcaatggaccacagtctgttgttccagcatttgcagatgctgaaaagcggccagccgattgaactgccggtctatagctacgtcgagcatacccgcacgccgaacaccattcacgtcgagccgaagaaggtgattatccttgaagggatcctgctgctgaccgatgcgcgcctgcgtaacgagctcaacttctctattttcgtcgacacccctctcgatatttgcctgatgcgccgtattaagcgcgacgttaacgagcgcggccgctccatggattcggtgatggcccagtatcagaaaaccgtgcgcccgatgttcctgcagtttattgaaccgtcgaagcaatatgccgacatcatcgtgccgcgcggcggcaaaaaccgcatcgctattgatattctgaaggccaaaatcagtcagttctttgaataacctggccgaattgtgtaacgtgcaaagagtagccctgttgccctctccgccgcgaagcgtgcgggaagcagccttataaggagaaagcccatgcgtctgtgtgaccgagatatcgaagcctggttggatgaagggcgactcgccatcaatccgcgtccgcccgttgagcgtattaatggcgcgacggttgatgtacggctgggtaataaatttcgcaccttccgtggccacacggcgccgtttatcgatttaagcggcccgaaggccgaggtcagcgccgcgctggaccgcgtgatgagcgaagagatcgtcctgccggaaggggaagcctttttcctgcatccgggcgaactggcgctggcggtgacctacgagtctgtcaccctgcctgccgacctggtaggctggctggacggacgctcctcgctggcgcgcctggggctgatggtgcacgttaccgcgcaccgtatcgatccaggctggtccggctgcatcgtgcttgagttttacaactccggtaagctgccgctggcgctgcgcccggggatgcccatcggcgcgctgagctttgaaccgttatcgggcccggcggcccggccgtataaccgccgtgaagacgccaaatatcgcgaccagcagggcgcggtggcgagccgaatcgacaaggattgataacgtcaacggggtgttgctgagggtgccatgagacgaatactgacaacgctgatgatcctgctggcggtcattgtcgccgggcttacctcgttggtattgctggtcaatcccaacgattttcgcgcctatatggtgcatgaggtggcagagcgcagcggttatcagcttgaccttgatggcccgctgcgctggcacgtctggccgcagctcagcattctcagcggacggatgacgctgaccgcccgaggcgccgaagagccggtgatccgcgccgacaatatgcgcctcgacgtggcgctgctgccgctgctctcgcatcagctgcaggtgaagcaggtgatgctcaagggcgcggtgatccagctgaccccgaaaaccgaggcggttcgcgacagctcagcgccggtggtgccgcatgacaacaccctgccgctggccccggaggatcgcggatggtcctacgatgtgcgtcagctgcaggtggccgacagcgtgctcttcttccagcatgagaacggcgagcaggtgaccgtgcgcgatatccgtctgcagatggagcaggatgagaatcaccgggccaccgtggatttctccggccgggtgaaccgcgaccagcgcgacctggcgctgagcttctccgccaccgtgcagggcggcgattatccgcactccttaaaagccgactttacccagcttagctggcagctgcgcggcgccgagctcccaacggacggcattaatggtcagggaagtctgcaggccagctggcaggaagatgacaagaccctgcgttttgacaacctgaatctgatggctaaccgcagcaccgttaccggcagcggcagcgtggtgctgggggatcgcccggactggtcgctggatctgcacgccaccactctcgatctcgatagtctgctggcgcaaaggtcgccggcgacggacagtagcgccagtcaacagggccagagtcagacgcgaccgctgcgcccggtgatcgccgacagcgatgagcgcgaagattaccagagcctgcgcggcttcaacggccgaatggccctgagcgccgaccagctgcagtggcgcggtctgaacttcacccaggtgcagagcgaaatcagcaaccagcaggggctgctgacggtcagcaaaatgcagggcaatcttgacggcgggcagctctctctccctggcaccctggatgcccgcggcgacacgccgctggcgacgttccagccggcgctgcggaatgtggagatcggttcgctgatcaaagcctttaactattccttaaacctgaccggcaagctgtcgctgagcggcgaattttccggaacgcgcattgacgccgatgatttccgtcgccactggcagggacaggctcagctgcagatggccgatacccgcaccgaggggctgaacttccagcagctggtgcagcaggccgtggaacgcagcaccaacgtgcgggcgcaggaaaattacgacaatgccacccgcctggattccgtgagcagccggctgacgctggataacgggctggtgacgctgaaccgcctgcaggggcagtccgacgtgatggcgatgaccggcgaaggacagctcgatctgcagaaagagaactgcgatatgcgcttcaacgtgcgcgtgctcggcggctggaaaggggagggcaagcttatcgaccgcctgaaacagaccgctatcccgctgcgcatctacggcgagtggcagtcgctgagctacagtctgcaggtcgatcagatcctgcgcaaacagctgcaggatgaagcgaagcagcgcctcaacgactgggttgagcgtaataaaggcagcaaagacggcaacgatgccaaaaagctgcttgataagctgtaattcccactcccgcggcccggaagtttccgggctgcgtgcttatcgtcaacgtctgatgtcacgatgatgccgggtggcagctacgcctggcccggtctggattatacggtgggcgtcataccccgattagttcgccatcccgtaggcctgataagcgaagcgccatcaggcagtgtggcagctacgcctggcccggcctggattatacggtggatgtgataccccgattagttcgccatcccgtaggcctgataagcgaagcgccatcaggcggtgtggcggctacgcctgacccggtctggattatacggtgggtgtcatcccccgattagttcgccatcccgtaggcctggtaagcgaagcgccatcaggcattaaacaggatacctggctatcaattttacggcccggggtaccccgggccgttttatgcctgacgattacacctcataatccagctcatcctgctttaccggcgggacgatctgcaccttctgcacccgatggctgtcgacctgcagcgtgcgcagggtatagccgtcaatctcaatggtttcccccacctgcggcacatgctgcaaatactccatcaacagaccggcaacggtgtgatactcacgtttatcatccagcggcagcggaacgtactgcaccaggtcctccagcggcatatggccattgaccgtccatgaaccgtcctgatgttgctgaatatcatgccgggcatcgatctcctccacctcattgggcagattgccggcgatggtttccatcacgtcgctgagggtcacaatcccctcgacggaaccaaactcatcgaccacaaaggcaaaatgggtgcgggcctggcggaactgctcgagcgccgagaggagcggcaggccctccgggaagaccagcggttgacgcaccagcgcctgcagatccagcggctcctgacgcagggactgctggagcaggtcaataacatgcaccacccccagcagatcttcattatctttcccgccggtgaccaccagacgggtatgctgatttttctccaccaggctgcggatctcttcctccggcgcgctgaggttgatgcgctcgatatcatggcgcgacgtcataatactgctgacgctgcgctgattaaggttcagcacccgctcaatcatcagtctttcctgcggattaaacagtggatgttgatcctgatcggcgaccagcgacgccgtgtcagcatccagttcagctttttctttctgcccgctcagcagattcatcaccgcctcggtagtgcgctgacgcagcgtcatattggcggagaggaagcgacggcggttaaattgcgccagctggttaagcgcttcaatcatgaccgagaagccaatggccgcatatagatagcctttcggaataataaagctgaagccttcagcaatcagactgaagccgatcatcagcaggaagctcagacagaggatcacgatggtcgggtggctgttaacgaagcgcgtcagcgccttgctggccatcagcatcaggctgatggcgataaccaccgcggccatcatcaccgccaggtgatcgaccatgccgacggcggtgatcaccgagtcaagcgagaagatggcgtcgagcaccacgatctgcgccacgacggcccagaatttcgcccctttgcgctgggtggggttatcgctgtctttcccctccagccgctcattaagctcgacggtcgctttaaacagcagaaacaggccgccaaacagcataatcaaatcgcgggcgctaaagctgaagtcgtgaaaaacaatcagcggtttggtcagggtgaccagccaggagatagaggccagtagcaggagacgcatgaccatcgccagcatcaggccagtgatccgcgcgcggtcgcgctgggtgggagggagcttctcggcgaggatagcgataaagaccaggttatcgatacccaataccagttcgataaccaccagcgtgacgagacctgcccagattgacggatcggcaatccattccatatgtattaaaacctgtacgactgcggtatgttttaccacgatcatggataagatgagtctaaaatgcaataacgacgcggatatcgccctgccgtgggtggatatatttccagcggattaagcgaaccgataagaattatgttccggaaaagaacagtgaaaaaataacaccatggcggcgaccatggaataatcttgccgatatcagaactttttccgctgcgtttcagcgagggcggcaaaaggccttcctcccgcggttcgtcacggcgagcgcggatgcgcagagcagaagcgaagcgcgaagcccgctcacaaaaccggcataattcatattatgaagtgagtgcagaatagggcggatcgcagttcaccgccgcggattcaggctaatatgtcgtcatatccggctgtttatgctgaaatatattgcctggcgaaatttattatctatatctattctttccaggcatacgcgcggcgcggcggggccggcggccaacagaccccgatagacgggcctctcagccacatcgcgcggcgcaaaggaacgagccgctgaataacctgaacgaaaataagattattctcacttctaactgttggtaaaagggagttatgtgtattcttttacgtgacagtgaatttaagaatttggcgggcagatgcccgggcagtatccgtgtattatcagttccaatggatttgtgacatgtacaattttgcaaaaccgcgtgttttgcaaccaaacaggtgaagatgaatatggcgaatttgaaagcggttattccggtcgcaggactaggcatgcatatgctgccggccacaaaggcaattccaaaggagatgctgccgatcgttgataagccaatgattcagtacatcgttgacgaaatcgtcgccgccgggattaaagagattgttctggtgacgcactcctcgaagaacgcggtggaaaaccacttcgacacctcctacgagctggaagccctgctggaacagcgcgtgaagcgccagctgctggcggaagtgcaggccatttgcccgccgggcgtgaccatcatgaacgtgcgtcaggcgcagccgctgggcctgggccactccatcctctgcgcccgcccggtagtcggcgacaacccgtttgtggtggtcctgccggatatcatccttgacggcggcaccgctgacccgctgcgctataacctcgccgctatgatcgcccgctttaacgagaccggccgcagccaggtgctggcgaaacgtatgccgggcgatctctccgaatactccgtcattcagaccaaagagccgatggtggctgaaggccaggtggcgcgtatcgtcgagtttattgaaaaaccggacgaaccgcagaccctggactccgatctgatggcggtggggcgctacgtgctgtcggcggatatctgggccgaactggaacgtaccgagccgggcgcatggggccgtatccaactgaccgacgccattgccgaactggcgaagaagcagtccgtcgacgcgatgctgatgaccggcgaaagctacgactgcgggaagaaaatgggctacatgcaggccttcgtcacctacgggatgcgtaacctgaaagaaggcgccaaattccgcgaaagtattaaaaaactgctggcctgagcgccagcctgaaaccgagcggcaaggctgaagcattcgtcctgccgctcaaaacgttatgcagaaattattcataacgcgaatgttataacgattgtaaagaaacgtatggcttcggagacttctggtagtttgtctctggcctctgtggtgcaatggtcggagtagcggcaataatgctttatgaatagtcacttagtgcgacaattcctaaagcgaagggaaagcggtcaacgacagccaaaaataaaacttgactgcgatcatgtttccgctttaaacatctcacttgcatgcataaaaatgtgaaatgaattggcatgcgagctggtacagacattacggataatccctgagcacggcagtggacatcatcgaaggatcacaggtatatgaactggcaactcatctcattttttggcgatagcaccgttttgctgcccagcgcagcggcgctgtttattgtcctgatgctgcgtaaaacgtcgcggttgctggcgtggcagtggagtttgctgttcggcatcaccggcgctatcgtctgcgcctccaaactggcctttatgggctggggtctgggcattcgcgagctggattacaccggcttcagcggccactccgcgctctccgcggccttctggcctatcttcctgtggctgctcagcgcccgtttctccgccggtctgcgtaaagcggccattattaccggctatgttctggccgccgtggtgggctattcgcggctggtcatccatgcgcattccgtctcggaagtgattgccggcctgctgctgggcgctgctggcagcgctttgttcctgctgctgcaaaaacgcacttctgactgcgattataagacaataccctggggtggaattgcatgcctggtaatggtcccactgatactgttgcatagcggcagtaaagcgccgacacagaccctgctggggcaaatcgccaccgcaattgggccgctggataaaccttttaccagagaggacctgcacaagcaggcctggtaatcgccatttgttttacaggggaaattaagttttcgccggttaattagacaaataagaaaataatctactatatacccggtaattgataattcatatttatgaaataatgaagtgctactacattgttattgcatatttgtctggatatagctttgatcagacgtttcttaaatgcgctgagacgttacctgatgcacattcaatgaatatccagacactggaaactattagaaattgtagttgactataacgccatcatctgatttttgcatgaagatgagttgtggaaaaagacgtttttttacagtcagttagctgcatatgtgatgttgtagcagtaccgggaagatttctaaccctggaaatcagtgaataatcttaattggtgacccgcttattttttgtcagtagaacgacaggcggcattaattggcagatattcggtaacaacactcccaattgtgaccgaaatcccgtaaacttaacgccgccaaaaataatggcctgaccaattattcatccgcaggtcgataaaaaattaagtcgttcaggtagtcagtgcgctggtagctgttaagccaggggcggtagcgtcgctgaagccgcttgctgctgcacagaggttctcttcaacggctgtaaatatcgacccggtcaggatgatcatcatcaatagatatctatcaattttctacggatatcctcagaagttggccaggagcggctgctgatatcgcctggacattaactttcctgtctcatcgatagcctgtagggtaaaattcgcctacattgtgagctgagtggatgttataaggctaacaagcagcttagggtaaatgtacttgcctcgccggtgttgcacagcgaagtcagctggtgccgcgagcgctttctatcttggtattcccctcattctcattgagatacgacagcggggctgaaaatggatcttgtacaatgataaaaattgcgcgcattgccgtgacgttgggtttgctttcctccctgggagcccaggcttacgcggccgggttagtggtaaatgacaacgacttgcgtaacgacctggcctggctttccgatcgcggggtcatccatctgagcctgtcgacctggccgctgagccaggaagagatctcccgggcgctaaaaaaggccaaaccgtcctattcttctgagcaagtggtgctggcgcgtattaaccagcgactgtctgccttaaaagcggatttccgggtcaccggctacacttcaaccgatcagccgggcactccgcaggggtttggtcagacacagccggcggataactcgttaggcctggcattcaacaacagcggcgagtggtgggatatccatctccagggcaacgttgaagggggagagcggatcagcaacggatcgcgcttcaacgccaacggcgcatacggcgcggtgaagttctggaaccagtggctctcctttggtcaagttccgcagtggtggggacctggctatgaaggtagcctgatccgcggggatgccatgcgaccgatgaccggtttcctgatgcagcgcgcagagcaggcggcgccagagacatggtggttacgctgggtggggccatggcagtatcaaatctccgcaagccagatgaatcaatataccgctgtgccacatacaaaaattatcggcggtcgtttcactttctcacctttccagtcactggaactaggcgcgtcgcgcattatgcagtggggtggggaagggcggccgcaatcctttagcagcttctgggatggctttaccgggaaagacaataccgggacagataacgaacctggtaaccagctggccgggtttgactttaagtttaaacttgagccaactctcggctggcctgtgagtttttacggacagatgatcggcgaggatgaggctggtttccttccttcagcaaatacattccttggtggggtggaagggcaccatggttggggtaaggatgcggtaaactggtacgttgaggctcacgatacaagatctaatatgagccgtactaattacatttacacgcatcatatttacaagggtggttactaccaacagggatatccgttgggtgatgcgatgggcggagatggtcagttgttcgctggcaaggtagaaataattactgaggataaccaacgctggagcacacgtctggtttatgccaaagtcaatcctaaagagcaaacaattaacaaagcatttcctcattctgacacgcttaaaggtgttcagctcggttggagtggagacgtttatcagtcggtccgcctgaatacctccctatggtataccaatgctaacaacagcgacagcgatgacgttggggccagcgcagggattgaaataccgtttagtttataaggctgaatgctgaaaataggggagagagggtggtagcgctgcgggaggcagtcagctttatctctccacaagccggcagggaagcaacggcaatgacagctgctcaggaattggcaaattttgatttactgatgatgtgacattatgaagaaaaaacttgttagattttcggcattagcgttggcaattgggtttttatcgggttgtaccattattccaggtcagggattaaacagtctgcgtaagaatgtagttgagcttccggacagtgactacgatctggataaattggtgaatgtgtatccgatgaccccaggactgatcgagcagcttcgtccagagactgtactcgctcgtccaaatccgcagcttgataatttactgcgcagttatgaatatcgcattggggttggtgacgtactgatggttacggtatgggatcacccggaactgacgacacctgcaggtcagtaccgtagcgctagcgataccggtaactgggtcaactccgacggcaccattttctatccatatatcggtaaggtgcaggtggcgggcaaaaccttgagccaggtacgccaggatatcgcgagtcgtttgactacctatattgaaagtccacaggttgatgttagcgttgctgcattccgttcgcaaaaagcttatgttactggtgaagttgcaaaatcaggacaacagcctatcacgaatatcccacttacagtcatggatgcgattaataacgctggtgggctggcaccagaagcagactggcgtaatgtggtgctgacgcataatggtaaagatacaaaaatctcactttacgcattaatgcagaaaggagacttgacgcagaatcatctactttatcccggcgatatactttttgtaccacgtaatgatgatttgaaagtttttgtcatgggtgaggtgggcaaacaaagtaccttaaaaatggaccgcagcggtatgaccgttgctgaagcattaggaaatgctgaaggaatgtcgcaggcgttcagtgatgcgactggggtatttgtaattcgccaattgaaaggtgataagcaaggcaaaatagctaatatctatcagcttaatgcgcaagatgcttcggcaatggtactgggaacagaatttcagttacagccatacgatatcgtttatgttacgactgctcctttagtacgttggaatcgtgtgatttctcagcttgtgccgactattaccggtgttcatgatatgacggaaactgcgaaatttattaaggattggccataatatgtttaattctatattagtggtatgtacaggtaatatatgccgctctcctataggtgaacggtatttacaaaaactacttcctaataaaaggatagaatcagctggaactagtgctcttatagatcatgaggctgacaatagtgctattaaagtagccgctgaacatgggatatcccttgccggtcataaaggtcgtcaatatacttcctcattaggtaggcaatatgatttgattcttgtaatggaaaaatatcatcttgaaaaaatcgggcaaatatcgcctgaggcaagaggtaaaacaatgctatttggtcattggttgaaccaacgtgatattcctgatccataccgaaaaagcgacgaagctttcaagtcagtcctccaattaattgaagaagcgggtcaactttgggtaagaaagttggacgtttaatcgttaggaattaatgcatgtcatctgtgattaataaaagtatgaaaaaagactctgatgagattgatttagggcgattagttggtgaactcatagatcatcgaaaactaattatttctgtaacagcattatttactctattatccttggtgtatgctttatttgccacgccaatatatcaggcagacgctttagtccaagttgaacaaaaacaagcgaatgcaatattaagtaatttgagtcaaatgttacctgatagccaaccacaatctgcgccagagattgctcttttacagtcaagaatgatattaggaaaaacagtagatgatttaaatttacaaacgagagttaaacaggattactttccaatatttggaagaggctgggctcgcctgactggagaaaaaccgtcagaaattaatatttctagattatatttacctgttactgatgatgatagtcctgaaataaaacttattgttaaagatgatatgcattatacactcaaatcagattcattttcgattgatggtaaagtcggagaactggttgatgcgaaaaatatctcaataaaagttgatagcataacggctcctaaaggaacgacattttcggtatcatatgtttctaaactgaaagctatttctgatttacaagatatattaactgttgctgatcaaggtaaagatacaggaatccttacactttctctaacaggagataatccaaagctgatagaaaaaatcattgacagtattacaaataactatcttgcacaaaacatatcacgtcaagctgcacaagatgaaaaaagtttagattttctgaatcgacagcttccccaagttcgaggcgagttagatgcagccgaagacaaattaaatttgttcagaaggcaaaatgactcagtagatctctcgttagaagctaaatctgttttagaccagatcgtaaatgttgataaccaactgaacgagttaacttttagagaatcagaaatttctcagctttatacaaaggagcatcctacctataaagcgttgatggaaaaaagaaagactttgcaagatgaaaaagcaaaattaaataagcgggttactgcgatgccagaaactcagcaggaaatcctacgattaagtagagatgtagagtctggccgtgcagtttatatgcaattgctgaaccgccagcaagaattaaatatcgcaaaatcaagtgcgataggaaatgttagaatcattgataatgctgttactgaaccgaagccaattaaacctaaaaaaataatcattgtcttgttaggtataattcttggtggaggagtttccgtagcaatagttattcttcaagtgttcttaagaagagggattgaatcgcctgaacaacttgaggaattgggagttaacgtatacgcgagcattccagtatcggaaactttttctaaaaaaacgagccaaagttttaaacggaataaaattaaaggagttaatgaatatcgcgatggtttactagcaatcgaaaatcctgcagatcttgcaatagaagctatacgtggtttgcgtactagtctacatttcgcaatgatggaagcaagaaataatatattgatgatttcaggtgcaagtccaaatgctgggaaaacatttgtcagcaccaatctttcagcaataatcgcacaaagtaataagaaagtattgtttattgatgcagatttacgtaagggatatacgcataagctttttgaagtttcaaatgataatggactatctgatttactagctggaaaaactgacattgcaaaagctataaaaaaacttccagctgccgggtttgattttatctcaagaggaaatattccaccaaatccagcggaactgctcatgcatgagagatttggaaaattattggaatgggctaataatgaatatgatttagtcgttatcgatacaccaccaatacttgctgttaccgatgcagcaataatcggtaattactctggcactactctattagttgcacgatttgaaatgaatacaccaaaagaaatagaagtaagcgttaagcgatttgagcaaagtggagtaaaagtaaaaggttgcattatgaatggagtggtcaaaaaggcaagtagttattatagctatggctatagttattatggctattcttataataaagatgataagaagtaaaggttgaaaaataaatgaagctgttatatccactataccagcttcattattataacgtatcagttaaattcatatggggtgaaaatagatagatgctctttaaaaatattaatatggtagccccggcattgttagctttaatttttcatgtaaacagtgcaagtgctgaacaaaaatgttttgtaataccagaacaagcaaatgcatatttagataatatatcgcaagttataaatactaataaacaacctaatgcaatggctagagtgcatatcgaacattcattgccgggacaacctaacgttattaaggcatttgatgcatataatcaattcaaaatgatgcgtaatgcagcattattatggagtgagagcaacgatgaaaaatattttcttttttctaaaagttatctcttggcttggctaagtaattatagaccatctttgaacccaattgatgaaactccttttgatgcattaattgacacatatacgataatcaaaccaaagttaaatgaaaaagaaaatgaattgattacatctttttttaaagaatgggctaatgattatatcaattatataatacgcaaggaaaattcaattaaggggttaacaccggacaactggcaaagtcataggataaaaataatcacgatgcttgctagtgctaccaatgataaagatttattttctaaggcaacagagattttccaaaagcagattttaaaaaatataaagcctagtggcgaagtctatgatttttctgagagagatgcaataagttatgctgtctttgatcttcttcctctttcccaggctgccttagtagctaaaaataatggatatgattggtttgggtacgtaagtccaagtggctcatcgctaaaaaaaggaattgattggttggtgccatacatggagggattaaaatcccataatgaatttaataatactaagtctgaatttgataaggtaagaagatcaattggaatgaaagatttcaaaggagtctttaatcctgttcgggccgctccattattttgggtggcttctgccttagatgaaaattatcttccgttggcaaaaaagttaaaagctatgcctgaaccattagcagtctcgtgtaaaaatttataatatctatttctaaggttgtttatgagtaacaataaagtcatgcgtaacgctggcatgttgtatgtcagaatgttggtaatgctttttgtaagtttatacacttcaagagttgtactcaacactcttggtgtaagtgattttggcatttataatgttgttggtggcattgttttaatgtttgcatttatcagcaatactatggcaggggcttctcaacgttttttttcttatgagattggtcgcaataattttaaaagattaaaacagcttttttcagtaacagtaacaatatatgttttcttttgtatattaataacccttttagcagagacagtaggcttatggttcatcaggtctaaaatgaatatccctatagaaagggttgatgcagcattatttgtttatcatgcatcaataatttcattcatattcactataattagaataccatataactcactaattattgctcatgagaaaatgagtttttttgcaactactagcataatagaagcatttttaaagcttggtggtgtttttttattatcccttgtggagtgggataagcttaaactatattctgtaatcatgttgttagtggttttcataattaccatcgtttattatttatattgtagaaataattttaaagaatgtaaatttatattggtaagagataagggaatatatgctgagttgtcttcttatgctgggtggaattcttttacaactttggctaatattggcctagatcaaggaatcaatgttttactgaatatattttttggccccgtagtcaatgctgctcgtggaatcgcatttcaaataaaaacacaagtcactgcgtttgtcggcaacatacaaatggcatcagcaccacaaataataaaataccatgctggcaataggaaaaacgaactcgaaaaattagtttttttgagttcaagagtcacctattattttatgttctttattgccttgcccgtcttattacaaacagagatgttgctcaaactttggttaatcaaagttccaccacatgctgttgtgtttacacaattagtcatagttaatatactcattgagacaatatctggtacagttacgtctgcaattcaagctactggcaggattaaagcttatcaaatttctgttggggtagttttgctgttagcagtacctatttcatatcttttattaaaacaaggttttgaaccagaaattacagttatagttaccagttttctttcggttatatgtgtattgataagacttatcatgttccaagtattattaggtgttaaagtaacctcgtatttaaaaaaggttttgtttaatagtataataatatcgatattaagtagtattttacccttaattattcgcttttactgtaaagattttgggttggcagaaattgcaatattcttgattacttgtacttccagtgtaatatctactattgctactgtttatttcttcgggttaaactctgaggaaaaaaaatattttatgaatttaattaacaaaaaaagagcttgagggttttatgatggaaactattaaagtacactggtgctatattgataatttcggagatgcactaaatccttatttattagaaaagttaacaggtaaaaaggtcgtttataggaattttgacaagcctaattataaaaaagaaataaaattgttaataaagtccttgctccagtttaaatcatatgattttaaccggttaagagcatttgatgaaaatgaaaatgttgttttaggcataggttctctattaaatcgttctcggcctagattccatatctgggggacaggttatatgaatcaacatgagcgagcaaaaggaggacttctatatgctgtaagaggaagatattcggcagaaaaactacattcagagggctttgaatattgtgatgtttggggggatcctgcactattattacctatcgtgtatcctgcaaaacagataacgaaaaaatatacacttggtattattcctcatctaaaggattatgctttttttaagcagatgtatggtacaaataaaaatgtacatgtgattgatcttaaaacatcagatattgaatttgtattgaatcaaatgttggcttgcgaaaaaataatctcaacttctttacatggagtcattgtaggccatgcatatgatattccaaccatctggattaaacataacgatatagatacggatggttttaaattcaacgattattttgattcagtagggattaagttatataaaggttttactaattttgatgacattattgaaaatcatgcagacttttttaattcaaataaggatatatatcttccgacagttgatctcaaaaatatgcagaagagattgcttgaagtagccccgtttgatgttttatccaattattataatttattttaaaaaagagcgtgaacatgtatagtgattttgaacgtttaatcttgcttgttatgcgtaaaatatacttcaagattaataaactatctccagttacacaaattttcgaagactacgtgaccactcgagatggtgatgccaatgaatttatatataaatccattcaaagtggtaaaccgctaatggtatctaaatttggaactattgagttgaatgctttagtttcatatcagttgcaacttaaaaaaaattatagtttctcggatagaatttcttttattaaaggaaaaataccaaatttatggtggccaatcaaacttgatgcgctttgcactaatgctggtttttttccaaataataatgaaaaactaccagagttttatcaagtaaatctagaggctatcaaaagtatagatatattaggtagttatattgaaaaagaaatattcttctctgacgtctattctaaagacatgattagggtaaatttggatgggtactatgctccttttttatatgagaagccgtggactgctgcacttaaaggtaaaaaggtattagttattcatccctttgattcagagattaaaagtcaatatagtaaaagagcattattatggaaagataaaaatgttttacctgactttgatcttattacgtataaacctgttgtctctatgttgggccagcaaacagaatatcggtcatggatcgaggcgctagaaaaaatgcaatccgatatccaaaagatagactttgatatcgctttaattggatgcggtgcttatggcatgccccttgcctcattcattaaaggaatgggaaagcaagcggttcatcttgcgggttggactcaaatattattcggaataaaagggaaaaggtgggatgatttaccatatgtttcaaagttctataataatgcatgggtaagaccacagcagcaatcaaaaataaaaggttttgattcgatagaaaagggatgctattggtaacattataaactctattatctggcaggaaagaatgactctgaataaaagaacactagggacaatactaatatttgctttccctgtttgtctttatcaaatgtttaacataatttggattgacaaacaaatcgctaagttattgtattttttaatattgacattcgtgattatttatgtttttcctaacttatttcgaataaaaaagcattcaaaatatgaggtcccattaagatttttatttatcacaatgtggatctctatagcttgtgcattcttgttttgggggcaagatgttattttaagttatagatcaagcgcaacatattttggtattgtattttttttcctccttatgaaggaaaaaccggatgttacagttgtagaaaaactcatctggttctactgtatcgtcttcatcctcctttggctttatggaatgcataaggcaccgcaaattatatatgctattgatgctgaaactacaatggataatagtagggggatatttaggttagctttgcctggaagaggcttcttgattttgggtttttttgtggcagtaagtaaatatatcgaaacaaaaaaaaccaagtgggcagttttattttcaatactttttgtttttataatatttcaagtcacacgacaaatcattattttttctttcttagtgtctgctatttatatacttaggaaaagtaaagttgcgttgtttgtattatttttaggtgcgatattcattttatttagcgatagttttattaaagtaaatgatgactctatcataggtaagatgataaacctatcaacagaacaagcatcatctcaaagcacaggggataaaaatatccgcttgcttgagtatgaatattttctcactcattattctaaaaatattattacggatatttttggtaatggtgtgccacattttacatcgtcctatggattaaaggaaattaatattcgtgagcagttttcttattttatgagcgatgtgggttatgcggagatctttgtgaggtttggtatttctgggattcttttatatataattatattcactagagcagcgtttcaaagggtggataaagaatatatgtatgccaagctttttgtaatttatctagcaatggcaaatgtcacagcatcctgggtcttccaagacgtacttccactttgtatctgtttatatgttttagaaagatgtaatcttcagaacagatttattgagaaataatagatagctagttatttaagttattataggagtattacaaaatgaatccaagatttacaataggtattcctgcctataaggcctctttcttaagagaatgcattgatagcatccttagccagacgtttaaggattttgaacttattattgttaacgatgcctctccagaaaacttggattcaataatttcaagttatgatgacacccgtattcgttattacaaaaacgataaaaattgcggtgctgaaaatgtaattgataattggaataaatgtctgtcatttgctaatggtgattattttattcttatgggtgacgatgataagctggacgaagattatttgtctgagttcaataaaattattacggcaaatccagaaatgaatgtttaccattgccgtagtttgattattaatgagaagtcagttcctacaacattgactcaaaaattaccctctcatgaaagcatcatagagaatatgtggcatcgcctacacgggtttagaaatcaatttatctcggattttgtctataaaaaacaatttttagatgataataatgggttttataaaaacaaactagcatgggcatcggatgatataactagctatattgcaatgactgagaagggtattgttcacacaaatagccctttattacattatcgtaggagtacgattaatataacttcatcgggttctgttcagttaaagctgaaagccgtcttaaatgaatacgcttggtatcagtcatttcttgaaaattacaaaccacaaactactacagatattgtattatttgatgaaatcaaatcaaaattgaataaattcaagaaaaagaagattattgaaacaatttcttatagcggaataaggaaaggtagttttttaaaagatgtgttacattgggcaagggaaagaaataaatacaatttgagtttgcaggagtatatttatttgtgcattttggcttataaaaaaataaaagcaagtgaatatttttaaatttaacttattgagaatttataatgaaggcttatttttatccaccactattccgaaaaacaaaaggtgttcataatccttactcaaagaattttataagtagtcttagtaaacattataaagtgaattccaaaccagcaaaaactgttgggttattagatctgttttgtgcatgcttttcaactgatatagttattttaaactgggttgataatatagctttcaaaaaaatggcgtattttcaatacatactgtttaatattatattaaagattttagtcatgcgtaatgtatgcgttgtatgggtgcttcataatattcaccctcataaaggagagaatgcgctaacaaataaaataaataatctcatgtgtaaatattcagacttggttatcgtccattcatccgaagcaaaaaattatatttctcgtcacaccaaagctcaggtttgttttttacatcatccgatagaaccaattgcgttagataaccaagattcgtttaatagttgtatcacgtttgatttccttatatggggctcaatagaaccatataaagggattttagaatttttacaattttgctataataataaaaaagttactgcagattggcgtatcaaaatagttggtttgtgcaaagataaagcgtatgaagaggaagttaagaaatatatatctccgaatgtaatttacgagaatcgtaaaattgagtttcaagagttggctaaagaaattagcttatcacaatttgtattatttccctatacatcatcttctgtatcaagttcaggggcactcatggatagtcttgcgctaggtgcaaacattattggtccttccaaaggagcattcaaagatctggccaaaaatggaatctgctttgtttatgaaagtttagaggatcttccaaatttaaaaaagcgattttctgagattaataaaacagaaattcaattttttgttcataagcattcttgggatgactttgcgaacaatgtttctggtctgatcaatacatcaataaatgagaaatcaaaacatgagtaataatgtaagcgcaaagattattattgcaacgcataaacaatatcatttcccgagtgatagcatttatctcccattgcatgtcggaaaagtagataaaaaagatttaggacttaatggtgatgatacaggtgataatatttccgctaaaaatgcttcatattgtgaattgacagggctatactgggcttggaaaaacttatcggaagattatattgggctcgtgcattataggaggcatttttcgtattctaaaaagaattcaaaaaataaattcgaaaatattttatccgaaattgaattgaaaaaattaatacctcagtatgatgttttggttcccaaaaaaagaaagtactatattgagactctttattctcattataagcacacacattacaaggaacatttggattatacgagaaatattttacagtcaaattatcccgattatattgcatcgtatgataaagttgtcaataaaacatccggttacatgtttaatatgtttattatgcgtaaggaattggtggatgagtattgtagatggcttttcccaattttgcttgaactggagtctttaatagactcagtttctctaactgcatttcatagacggttttatggtagagtaagtgaaatactctttaatgtatggctggaacattataagcttacaaatccgaggttgaaaatcaaagagcttaaccatatccacatggataaaataaactggttcaaaaagggaatgtcttttttaagagcaaaattctctaataaaaaatacgaaggtagtttttaacattaggagtaagacatgaaatatgattatttaattgttggtgcaggactttttggcgccaccttcgcgtacgaagcaaaaaagaaagggaaaaaatgccttgtcattgataaacgctcgcatgttgctggtaatatttatactaaagaaataaatggaatcaatgtacatcagtatggtgctcatatttttcatacaaatgataagtttatttgggattatgttcaacagtttgctgaatttaatagatataccaactctccgattgcaaagtacggaaatgaaatttataaccttccatttaatatgaacacattcaataagttatggggggtggtcacacctgagcaagcgaaagaaaaaatagcagaacaagtaattaatgaaaatattagcaacccccaaaacttagaagagcaagctatttcccttgttggtagggatatttatgagaaactcataaaagggtatacggaaaagcagtgggggagagctgctactgagatacctgcatttattataaaaagactacctgttcgttttacatatgacaataattactttcgcgataagtaccaaggaattccagtgggcggatatactcagattgttgagaaaatgctcgatggtattgatgttcttcttgataccgatttcttcgagaacaaggattattatttctccatagcagataagattgtatttactggaatgattgaccagtattacgattattgttatggaacactagagtatagaagccttaaatttgaaaccaaagaacttgacattgaaaatttccaaggcaatgcggtggtaaattacacagaataccaggttccatatacgaggatcattgagcataaacattttgaatttggtgaacaaggcaacacgattattacctatgaatatccatctgactggaataaaggtgatgagccttattatccaataaatgataataagaataatgatttgtatcagaaatatgtgttgttatcccagcaagaagataaagttatttttggcgggcgcctaggaatgtacaaatatttcgatatgcataatgtaattgctgaagcgttaagttgtgcaaatgaaaatattaaataggcaatagggagttgaatatgccgatcatcagtgttattttaccgatatacaatataaaagaagaatatcttgaaacttgtattcagtcggtatgccgccagactttagatgatatagaaattattttggttaatgatggttctaccaataattgtctggaggtatgtacaaagttttcacaccttgataatagaattattgttatagatcaacccaatagtggagtttctgtagcacgtaatagtgggcttgatattgctcgtggtgagtggattgcttttgtcgaccctgatgattggcttgaaccagattatttattatcgttatataataatgcttcatcaaacactgaaatagtcatatgtgactgtaatgttttttctaatggagaaaaaagaggaaataattttcttcctgctaattcgattggtgttcttaaaaataaaaatttattattgggccagcttgtaagcaaagttattgctggttattatccacagttaatagggcctggggttccttggggtaagttatttaaacatgacttcatcaaaaaatataatctgaaatttgtacctggtatggttaggatgcaagataatattttttgtttatatgctttctattatgctagtcaagttttttacacaggggagaacaaatataattataggatggaaaataattctgctagctttaaatataataaaaaaataataagccattttgaaaaatattttgaagaagtgaaggcattcattgataaatgcatgagcggaaatgaaagatatcaaaaagcgctagatgctaaaacgttaactagtataaactcctatttattatattatttttgccatgataatcatacaattgaatcagaaaacgatacgctgggtaatttgatgtgtagacaaccatatgcgagtgcacttaaaagggttgatttcacttacttaactacacaagagaaaatattcgttatattgttaaagttaaggctatatggtgttttgaaattaatttataaaattaaaagatgattgtatttcaatttttgaatttatatctttcatgttttaataaagcggtaattcatattctttaagagtgtatacattatgcttacttttactcacagggctagagcaaatgctaatgcctctttaatatcgatggtgcaacggttttctgatattacaatattatttgtaagcttatatatcgtttgcgcatacaatgaattaacatttgattataaatatagtttgttggctttggctgtattggttgtttttcaaatgatcggtgggattacagatttttacagatcgtggcgcggagtgaaaatatcagcggaattaatactgataatcaagaactggactttgagtttacttttcacagttggtttgttttcttttgtacctgattttatttacccttttaaaatatttctggaatggtatttgttggttacttttggatttgtgttatgtcgaacaggtatacgtttaagcgctggccttctaaggaagttaggatataacactcgagttgtagccgtagcaggttcaactccagctggtgttggattgttaaagggatttattgaagagccttggttaggttttgtcgtgaagggtatttatgatgacactgttcgagagcatactgatgaaataccttattgcggtgattttgaaaagctaatttctgatgccaaagatgggaaaattgatcgtgtttatatagccctgaatatgaaagatgaagctattattaaggcagttgttagtcaattaactgatacaacttgttctgtccttcttattcctgatatatttacatttaatatactgcagtcacgcacggaagagattaatggtgttcctgtcgttccattgtttgacacacccttaaatggtataaatatgatattcaaaaggttagaggatattatagtttcattaattattctaaccgtgatttcacctgttttattattgatcgcatgcgttgtaaagtttacttcccctggccctgttatttttcgtcaaattagatatggtatggatggcaaacctataagggtttggaagtttagaacaatgaaggtaatggaaaatgatgataaagtaattcaagctaaaaaagatgatgtcagagttacaagggttggtaaatttcttcgtagcacatcacttgatgaattaccgcaatttttcaatgtgttattcggacaaatgtcagttgttggtccgcgtcctcatgctgtcgctcataatgaacaatacagatcccttattcaaggatatatgttgagacacaaggttaagcccggaattacaggtctcgctcaaatcaatggttggcgcggtgaaaccgatacgctcgaaaaaatggaaaagcggattgaatatgacctgttatacataagaggatggagtgtttggcttgacttgaaaataatatttctcacgatctttaaaggttttgtcaataagtctgcgtattagcgttataatatgtggtttttttctgttagtctattttatgtatggttatttgttttttttacattcattattctagctcgttttcgctatcatacagactctctttgagctaatattatcatcacattaaagctgcgaacgtgtcgcagtgaccacacctgacaggagtatgtaatgtccaagcaacagatcggggttgtcggtatggcagtgatggggcgtaaccttgcgctgaacatcgaaagccgtggttataccgtctccgttttcaaccgctcccgtgaaaagaccgaagaagtgattgccgaaaatccaggcaagaagctggttccttactatacagtacaagagttcgttgaatccctcgaaacaccacgccgtatcctgttgatggtgaaggccggggctggcaccgacagcgccatcgattccctgaagccttacctcgacaaaggtgacatcatcattgatggcggtaacactttcttccaggacaccatccgtcgtaaccgtgaactgtctgcagaaggttttaactttatcggtaccggtgtttccggtggtgaagagggcgctctgaaagggccttctatcatgcctggtggtcagaaagaagcctatgagttagttgctccgattctgaagcagattgctgcggttgctgaagacggtgagccgtgtgtgacttatatcggtgcagacggtgcgggccattatgtgaagatggttcataacggcatcgagtatggagacatgcagctgattgctgaagcttatgcgctgttgaaaggcggtttggcactttccaacgaagagctggcgcaaactttcaccgaatggaacgaaggtgagctaagcagctacctgatcgacattaccaaagatatcttcaccaagaaggatgaagaaggtaagtacctcgttgatgtcattcttgatgaagcagcaaacaaaggtaccggtaagtggaccagccagagctcactggatctcggcgaacctctgtctctaatcaccgagtccgtatttgctcgttacatctcatcgcttaaagaccagcgtgtagccgcttctaaagtgctgagtggtccgcaggctcagccggctggtgataaagcggaatttatcgaaaaagtacgtcgtgcgttgtacctcgggaaaatcgtttcctatgctcagggcttctcccaactgcgtgctgcttctgatgaatataactgggatctgaactacggcgagatcgctaagattttccgcgctggctgcatcattcgtgcgcagttcctgcaaaagatcactgatgcttatgcgcaaaacgctggcattgctaacctcctgctggcgccatacttcaaacagatcgctgatgactatcagcaggcgctgcgggatgtggtggcgtatgccgtacagaatggtattccggtaccgacgttctctgccgcaattgcctactacgacagctaccgttctgcagttctgccagctaacctgattcaggctcagcgtgattactttggtgcgcacacctataagcgtactgataaagaaggtgtattccataccgagtggttagaataatctttatataacacagtcaggccaattggcctgactgttatctattgttagtaattctacaataatctgatcaaagttatcttatttgcacgtcttcgtcatttatccagctataataaagcaaatgcttatcttttaagaatttgccatatttttacttttgtatacctataataaaatgcttctggcctcagaatatatctgggtgtttaataacagggtttaattaaaggatattaatatgttgcttcctgtgatcatggctggtggtaccggcagtcgtctctggccgatgtctcgcgagctttacccgaaacagttcctccgcctgttcgggcagaactccatgctgcaggaaaccatcacccgactctcgggccttgaaatccatgaaccgatggtcatctgtaacgaagagcaccgcttcctggtggccgaacagctgcgccagctcaacaagctgtccaacaacattattctcgagccggtcgggcgcaacaccgccccggccatcgccctggcggctctccaggccacccgtcacggcgatgacccgctgatgctggtcctcgccgccgaccatatcatcaataaccagccggtcttccacgacgccatccgcgtcgccgagcagtatgccgatg

SEQ ID NO: 5449 - DNA, 1112 bp, Unknown
  gut microbiota DNA sequence
gaacaacattattcttgagccggtcgggcgcaacaccgccccggccatcgccctggcggccctccaggccacccgccacggcgacgacccgctgatgctggtcctcgccgccgaccatatcatcaataaccagccggtcttccacgacgccatccgcgtcgccgagcagtatgccgatgaaggccatctggtcaccttcggtatcgtgccgaacgccccggaaaccggctacggctacatccagcgcggcgtggccctcaccgacagcgcccacaccccgtaccaggtggcccgcttcgtggagaagccggaccgcgagcgcgccgaggcctacctcgcctccggggagtactactggaacagcggcatgtttatgttccgcgccaaaaaatacctctccgagctggccaaattccgcccggatatcctcgaagcctgccaggccgcggtcaatgccgccgataacggcagcgacttcatcagcatcccgcatgacattttctgtgagtgcccggacgagtccgtggactacgcggtgatggagaaaaccgccgacgcggtggtggtcggtctcgatgccgactggagcgacgtcggctcctggtccgccctgtgggaggtcagcccgaaagatgagcagggtaacgtcctcagcggcgacgcgtgggtgcacaacagcgaaaactgctacatcaacagcgacgagaagctggtggcggccatcggcgtggagaacctggtgattgtcagcaccaaggacgccgtgctggtgatgaaccgtgagcgttcccaggacgtgaagaaggcggtcgagttcctcaagcagaaccagcgcagcgagtacaagcgccaccgcgagatttaccgtccctggggccgctgcgacgtggtggtccagaccccgcgcttcaacgtcaaccgtattacggtgaaaccgggcggcgccttctcgatgcagatgcaccaccaccgtgccgagcactgggtcattctcgccggcaccggccaggtgacggtcaacggcaagcagttcctgctgaccgagaaccagtccacctttattccgattggcgccgagcacagcctggaaaacccgggccgcattccgctgg

SEQ ID NO: 5450 - DNA, 936 bp, Unknown
  gut microbiota DNA sequence
ccgccaccagcagccacgggatcatcccgctgtcgcagtaggcgaagtcgcggaagtaatggtgcgcgctcatctccccgccgtagatggcgtcttcctggcgcatccgctccttgatgaacgcatgccccgtcttcgacatcaccggctggccgccgctgcgcgtcacgatgtccaccgtgttccatgtcagacgcgggtcgtggatgattttcgcccccggctgcttctgcaggaacgcctccgccagcaggccgacaatgtagtacccctcgataaacgacgcctcgtcatcgaacaggaagcagcggtcgaagtcgccgtcaaaggcgatccccatgtccgcctgatgcgcacgcaccgcgtcggcggtgtcctggcggcactccggcagcagcgggttcgggataccgttcgggaaatggccgtccggctggtgatgcaccttgatgaaggtcaccggtgccccggccgccgcgaagcgtttctccacttcatcaatcacgtgccccgccgccccgttgccggagttcaccaccagcttcagcggacgggtgaagttcgccaggtccacgtagcccatcaggtggtcgacgtactccttcagcaccgaaatctggcgcagggtcccgcgacgcgccgggtccaccggcgggaactggttctcctccgccaggcgctggatatcccgcaggccggtgtcgccgctgatgggcttcgcgttctcgcgcaccagcttcatgccgttgtagttcatcgggttatggctcgccgttacctcgatgccgccgtccaccccgaggtggaaagtggcgaagtaaatctcttccgtgccgctcaggccgatatccagcacgtcggtgccggcgtccatcagcccgcgggccagcgccagcttcagcgactcgctggtgaggcgcacatcgccccccacca

SEQ ID NO: 5451 - DNA, 2622 bp, Unknown
  gut microbiota DNA sequence
gcctgcaaagggatcgctgctgttgcttgcctcgtcctcttctgcgctccactgaatctgtgcgtcttcaatagtgattttaccgccctgcgctccgtaaaccgcagataccagctgagcattgaggatatcgccgcgaatatcgccgattgggctgatacggtcgtactcagcccacatcctgaattcgccaaccgtcatggtttgtcgcagttcgcccagcgtgcggcccatccggagcgccagcgccatcaggaactgcatgccaggcatttttactttgctttagcatcatccgcgtcacgaatgagatcaagtgcctgcttcaacagccgggaatgcacagggccatagatcgcttcaacctgttcggtgtcatcgacagtaaagacgggctgcaggtcggtatccagcaaaatatcgatgaaaagcgtgacgtcggcccgcatcgtgcggaaggctcgttctgaaggggtcagttctggtgcctcctggggctcctgcccttccggtagtttgggtggttccgggctggcaatgccctgccagcgaatccaggcttctgctgatggctcacgaatgatgactttggcgttatcccactccggaacggagacttcttttttacgaaagcccgccatcggtgccagtgccagtgctttaagactcggttttgacattaattttatcgccggtctcccggcgctccgttaattgatggtgacggtgcaatcagaagaagtgatcacagtgccatcggcatcagtaaccacgcaggaataaaccccggcatcaccggatacagcgctggctttcgtaaacgttgcgctggtctggccgctgaccgtcgaggtgccctttttccaggcgtaggtataaggtgccgtaccgccctggacgaccacgcccatggtcagggcgcttcctgccgcgaccgtttgggacgccggaaggtcagtagcaaacgacagaactcctggggcgttaatattggtgggtttacctttcagacgcagcgagaacgttgcagcaaccacgccattggtttgagaatcccaggtgtgctgacgtacctcagcgcgcatcaggaacccattaccagacgggaaaataaccttaaacccataaaccccgtcgttatcatatgctgcacgaagtgcatcctgcgccgggttgcggtagaagttaccggaaagtgacatttcagacggagcaggaaggccgttgatattttccgtttcatccgaacagagcgttgtcacgtcaatatcgtttttctgaccagcggtaaagcttgcctgtttgatagtgcaactcaggtttaaccaggttgcggtatctagctctgccgcggtgaccggcacagaggtaatcattactaccgttttttgggcacgttcaaatagtgctgacatcgcagcctccataaatgaaaaaaccgccagcggcggtcggattggattggtttttgtcaggcaataaccgttatttcgagagttgcccgatgaagatgggttgtcgtgtcgtagccaggaatttttgtcacctcgaaaggtgaaagaacctgcaggcgagccagggcgtccaggcgtaacgctctggcttcgtcattcgtttcagcccatacatcaacctgaatgcgcagtgtcgactctgcctggccgcagaaaacatccccggcaacatcagtcgggatcgagaaaataacatagggagtggaaactgcaggaagtccgtcgctgcctagcggcaccacatacggataaactcgcccgtcagccagcgacgacagcaggtcatagagatcatcctctgtcattttgataacacctcatcgatagcctgattcatccgctgcatcgccacctgcgtagcctcttccatgcgggtatcaaaggcagggcgaacaaacggatgtgctggcgccgtagatgttcccagctccacgaagcgccagtaaaacgcattccgcttgttgctggccttcatggtgttgtcgctgttccccgttcgcgggttaacgccacgaatatgcacccccgatgatatttcaccgcgacggcggcttttctgggtgacgacaacaacgtttttcttcagtttgccggttttctccggagcgcgatcaataacctcctcgcgtagcaattcggcaccagcacgggtcgactcccggagaactttattattttcggccttgctgagcgtttgcagatcgcgtgcaatatcctgcagcccggaaaaatccagattcacatcaatcatttttcggtcccctgtttgcagagaatttccagccgggtgccttttatatccggaaccggaggcccggtaacgttaagaacggcgcctttaaacgggccggtacgtactttcaggcgggaagaagctgagatatctgtacgaaaacgcacccaaacgcgaatggtggcatcggcacgctcagcgccagcggctaacagctcacgaccgcttatccccttaacctcggcccagatggttttcccatcttcccacttttcaaccggctggccggaaggcgttctggaggtggtgaaattttggatggtgacccggtgccgtaatcgtcctgcctgcataattcccccgcttaaataccat

SEQ ID NO: 5452 - DNA, 314 bp, Unknown
  gut microbiota DNA sequence
tcatcgccagggagaattgaatcaggatcatctgcatacccctcgctggtttcggactcatacattttgcgacgagtccatgtttcgacgtaacgagaagcagctccgatgtagagggtcaatagtgagtcgtcatcggtaaagtcaggctcaatgcgacaatgctctttaaccacttcaagttctaacattattttttagccttcttctctggcacagtttccggctgttccggctgttccggctgttccggctgttccggctgttccggctgttccggctgttccggctgttccggctgttccggctgttcc

SEQ ID NO: 5453 - DNA, 1330 bp, Unknown
  gut microbiota DNA sequence
cggagacggtgggggatctggaggccaatatcaaccggctgctgactcattttcactggggcgtggtgaccatcgatgtcggtgaggacggcctgcgcctgcgccatcaggcgttgccggtcagccgcgacgaagcggggcgcgtgcgctggtgcaacgcgttctgtgccatactcgaggggttatattctcgctggctgcagagtcagggaggcagtgcccacgtgatactgcagcgtgagcgggtgttctccgtctctgacgttcagtttctctactaccatccataaagagtgaatttatgcccctgcgtgctttagtggcggtgatagtgacaacggtagtgatgctggtgcccagggcgtgggcggatacggcctgggagcgctataaggcccgttttatgatgccggatggtcgtatcattgataccgccaatggcaatgtgtcgcatacggaaggtcagggcttcgccatgctcctggcggtggcgaataacgatcgtccggcgttcgacaagctgtggcagtggacggacaacaccctgcgcaacaagtctaacgggttgttttactggcgctataacccggtggcgccggaccctatcgccgataaaaacaacgcctccgatggcgataccctgatcgcctgggcgctgctgcgcgcgcaaaagcagtggcaggataagcgctatgcgattgcctctgacgccatcaccgccgccctgctgaagtctacggtggtgactttcgccggtcgccaggtgatgctcccgggcgtgaaagggttcaacctcaatgatcacctgaaccttaacccttcctatttcatcttcccggcctggcgcgccttcgcggagcggacgcatctcaccgcctggcggacattgcagagcgacggacaggcgctgctggggcagatgggctgggggaaatcacatctacccagcgactgggtggcgctgcgggcggatggcaagatgctgccagccaaagagtggccgccgcggatgagtttcgatgcgatccgtatcccgctgtatctctcgtgggccgatccgcacagcgccttgctcgcgccctggaaggcctggatgcagagttacccgcgcctgcaaaccccggcgtggatcaacgtcagcaccaacgaggtggctccctggtatatggccggcggcctgctggcggtgcgcgatctgacgctgggtgaaccgcaggaggcgccgcagattgacgacaaggatgattattactctgccagcctcaagctgttggtctggctggcgaaacaggatcagcgctaaatacggtgattgatttgcagccttccc

SEQ ID NO: 5454 - DNA, 1610 bp, Unknown
  gut microbiota DNA sequence
ctgtttctacaacccccgcagccgcggccgcgaaggacatctggcgcgcgcctttacgctgctggcggccagtaaaagcgcagatacgccggtcggcgtagtcaaatccgccggacgcaaaaagcaggagaaatggctgaccaccctcggggagatggattttgccccagtggatatgaccagtctggtgatcgttggcaacaaagcgacttacatcgacaacggcctgatgatcaccccgcgaggctacgcgctgtgaatcacggcgacgtgctggttatcgggggcaccagcgatgcgcgggcgatctgccagcagctggacgccgccgacgtacgctacaccctgtcggtggcgacccctaccggcgagcggctggccggcgatatccgcgggcagatacgctgcgggcgtatggagtggcagcagatggcggagtggctcagagcgcagcgcacccgctgggtgatcgatgcctctcacccctacgccgaggtggtcagccagaatattgtgcgcgcctgcgccagcgtcggggttctgctcagccgctatcaaaggccggagcagctgagcgatctgcgccatccgctacttcacgtggtcggcgatctgaacgaggcctgcgcggtggctcgtcgcctcggcgagcggatcctgctgaccaccggcagcaaagatctggcggcctggcgggcgggactggcggagaaaacgctgctcgcccgggtgctgccggtgccggaggtggttcagcactgtagcgatctggggtttggcgtcggggagatcttcgccctctgcgggccgttcagcgccgaatttaacgccgccttttatcgccagtgccgggccgatgttgtggtgacgaaagcctcgggggctgaaggaggctatcaggaaaaagtacaaccctgtcttgatgcggggatcccctgcatcgtcattacccgtccggcgccgctggtgacgggcgatgaactactgcaaagccaggccgatttcactgcgcggctgacgcgctggctgtcggcgacttgaggaagaggatatgaaaaaagcacttctggtggtgagctttggcaccagctatcacgacacccgcgagaagaacatcgccgcctgcgagcgcgatctggccgccagctgcccggaccgcacgctgttccgcgccttcacctcggggatgattattcgcaaactgcagcagcgcgatggtattcatatcgatactccgctgcaggctctgcaaaagctggccgagcagggataccaggatgtggctatccagtccctgcacattatcaacggcgacgagtacgagaagatcgttcgcgaagtgcagagcatgcgcccgcgctttcagcgtctgacgctgggcgcgccgctgttgagcggtcatggcgattacgtgcagctgatgcaggccctgcgccagcagatgccgccgctggcggcgacggagcgagtggtgtttatggggcacggcgccagccaccacgccttcgcggcctacgcctgtctggatcatatgatggcggtgcagggttttccggcgcgggtgggggcggtggaaagctatcccgaagtggacatcgtcattaacgaac

SEQ ID NO: 5455 - DNA, 6709 bp, Unknown
  gut microbiota DNA sequence
tcgtggaaaacccgcttcaatgccgccggtatccccgccacgccatggcttaacgggttaggggagaatccggcggtgcgggcgatgtttgtcgcccatctgcagctggcgctgaacgacacgatggagaaagcagcatgagcggcaaactatacgccctgagcagcgggccgggggcggccgatctgatcaccgtgcgtgcggcgcggatcctcggccagctggatgtgctgtatgcgccagccggccgcaaaggcggcgacagcctggcgctctccatcgtacgcgagtacctgggcgcacacacggaggtccgctgctgccattttccgatgagcgccgacagcgcggaaaaagaggcggtgtggaacgacgttgccgcggcgctggcccaggaggtggcggcgggcaggcaggtcgggtttatcaccctcggcgacgccatgttgttcagcacctgggtctttctgctgcagcggattggctgcccggagtggctggagattgtccctggcgttacctccttcgccgccattgccgcgcgggcgaaaaccccgctggccatggagcagcagtcgctggcggtgatctcctgcaccgcgccggaagcggacattgccgcggcgctgcgccagcatgacagtctggtgctgatgaaagtctacggccgcttcgcccgcattaaggcgctgctggcgcaggcggggctgctggatgcggcgctgatgatgtcagaggccaccctgccgggcgagcagtgctggcgccgtctgcgcgaggtcagcgatgaccagccgctgccctatttctcgaccattctggttaacaaacagtgggaggaggcgtaatgaatcaggtgaaatcgctgaagcagctttcgtatggggggctggcggccgctgttctgctgatcatcgtcccgcaggaggcgttcgccatgcatatcatggagggctttttgccgccgatgtgggcgctggcgtggtggctgctgtttttaccctgcctgtggtacggcctggtgcgcctgcggcgtatcgttcaggaagagagcaatcagaaggtgctgctggccctctgcggggcgtttatttttgttctttcggcgctgaagatcccgtcggtgaccggtagctgctcgcacccgaccggcgtcggtctggcggtgatcctcttcgggccgggcgtggtggcggtgctgggggcgatcgttctgctgttccaggcgctgctgctggcgcatggcggcctgaccacccttggcgccaacgggatgtcgatggcggtgatcggcccgatggtcggctatctggtgtggaagctggcctgtcgggcggggatccgtcgcgatgtcggggtctttctctgcgccatgctggcggatctgatgacctactttgtcacctccgtccagctcggggtggcttttcccgatccggcaaccggggcaggcggatcgatcgccaagtttatgggcatcttctgcctgacgcagatcccgatcgccatcgcggaaggcttgctcaccgtgatgatctacgatcagctaaccaaacggcgactgatcgccgcggaggcacattaatatgaaaaagaccctgatcctgttggcgatggtggccgccctgatgatcctgccattttttattaaccacggcggcgagtttggcggctcggacggcgaagcggagagccagatccaggtggtggcgccggattatcaaccctggttccagccgctatatgaaccggcgagcggcgagattgagagtctgctgtttaccctgcagggctcgctgggcgcggcggtgattttttacattctcggatatgcgaggggcagacagcgccgtgatgaccgggtttgaccgactcagctaccagagccgctggttgcaggtggcgccagagcgtaagtttctgctctggctgctgctgatggcgctggcctttacgctgccggcgtggggccaggcgctgacgctggcgctgaccgccgcgctgacctgctggctgctgcgggtctcattctggcgctggtgccgctggatggcgctaccctttggctttttgctggtcggcgtgctgaccattctgttcagcgttagccgcgacccgcagatgctgttagcgagcttgcggctgggcgctttctcgatagggatttccgctccggggctggccgtggccggggagaccttctggcgcagcctggcagcgatggcggccacgctctggctggtgcttaatctgcctttcccccagctgattatcttgctcaagcgcggtcgcgtaccgcggctgttgacggagcagatcctgctgacctggcgcttcatttttattctgttggacgaggcgatggcgattcaccgcgcgcaaaccctgcgttttggctatggtagcgtgccgcagggctatcgctcgctggcgatgctggtgggactgctgttcacccgcgtcctcctgcgctatcagcagatgagcacggcgctggatatcaaattgtaccagggtgattttcacctctaaggataagtatgcttgccacaaccgatctctggtttcgctatcaggatgagccggtacttaaagggctgacgctggatttttcccgccatgcggtgaccggcctggtgggggccaacggctgcggaaagtcgacgctgtttatgaacctgagcggcctgctgcgcccgcagcagggggcggtgctgtggcagggagaggcgctgaattacagcaagcgcggtctgctggcgctgcgccagcaggtggcgacggtgtttcaggatccggatcagcaaatcttctataccgatatcgacagcgatatcgcttttagtctgcgtaacctcggggtggcggaagaggagatcgcccgccgggtggatgaggcgttgaccctcgtcgatgcccaggggtttcgccagcagccgatccagtgcctcagccatgggcagaaaaaacgggtggcaatcgccggggcgctggtgctgcaggcgcgctacctgctgcttgacgagcccaccgcgggcctcgatccacgcgggcgggcgcagatgatcgccatcatccgccgcattgtcgggcaggggcggcgcgtggtgatctccagccacgatatcgatctgatctatgaggtgagcgacgccgtttacgtgctgcgtcacggcgaagtgctggccgcgggggatcccggcgaggtatttgcctgcgcggagacgatggacagggcgggattgacgcagccgtggctggtgaaacttcatagcgaactggggctgccgctgtgtaaaaccgaggcggagttttttcagcggatgcacaacaacgcgataggcgcgataaaggaggcgtcatgacgctggcagtgatgttgcagggcacggcttccgacgtggggaaaagcgtgctggtggcgggactgtgccgcatttttcatcaggatgggctgcgtaccgcgccgtttaaatcacagaatatggcgctgaactccggcattacgccggatggcaaagagatgggccgggcgcagattttccaggccgaagcggccgggattgcgccggatgtccgcatgaatccgattttgctcaagcccaccagcgaccgtcaggcgcaggtggtgctgatggggcaggtggcgaccagcatggatgcggtgagctatcaccagtacaagccgcgcctgcgcgagcagatcctcgcggtctaccagagcctggccggagagtatgaggcgctggtgctggaaggcgccggcagtccggcggagattaacctgcgcgaccgcgatatcgtcaatatgggcatggccgagatggcgcaatgcccggtgatcctggtggccgatatcgaccgcggcggggtgtttgccgcgatttacggcacgctggcgctgctgcagcctcaggagcgggcgcgggtgaaaggggtgatcatcaataaattccgcggcgatgtggcgctcctgcgctccgggatagagcagatcgaggcgttgaccggggtgccggtgctgggcgttatgccatggcttgacgtggatctcgaggatgaggacggcgtcgcgctgcaggccgggaaataccatcgcaccgaccggcgcgatatcgacatcgccgtggttcacctgccgcatatcgccaattttaccgactttaacgccctggcggcacagccagacgtccgggtgcgctatgtccgcgatccgcaggcgctggccgacgccgacctggtcattcttccgggcagtaaaaataccctcggcgatctgtgctggctgcgcgagagcggcatggcgcacgcggtcgagcaggcccggcagcgcaaggtgccgctgctggggatctgcggcggctatcagatgctgggcgaaaccattatcgatgaggtggagtctggccttggcgcccagcccgggctgggggtgctgaagaccgtgacccacttcgcccagcacaaaaccaccacccaggtgcaggcgaccctggggtctgtgctcccggattggttagccgacgcggcggggctgcgcgtcagtggctatgaaattcatatgggcgagacgcgccgcgaggcaggctgcccgccgctgctgcagttgcataaagcggggcaggcagtggacgacggggcgataagcgacgacggcctggcgttcggcacctatctccatggcctgttcgacagcgatgcctttacccgggcgctgctcaacggcctgcgccagagcaaagggctggcgccgctggacagcgccctggagtatgcccgctataaaacccggcagtttgatcggctggccaaggccatgcgcgaacatatcgccatcgataaaatttacgccatcatgcgccaacatcaggagcccctatgctgactctggttaccggcggcgcgcgcagcggcaaaagtcgccatgccgaggcgctgattgccgatgcgccgcaggtgttatatatcgccacctcgcaaatctttgacgacgagatggccgcaaggatccagcatcatcgcgacggcaggcccgcccactggcgcaccgccgagcgctggcagcagcttgatgaactgatcaccccggctatcgccccagcggaggcgattttgctggaatgcatcaccaccatggtcaccaacctgctgttcgcgctcggcggcgacagcgaccccgacggctgggattacgccgccatggaacgggctattgatgacgaaattggcgtgctgattgccgcctgtcagcgctgtccggcgcacgtcgtgctggtgaccaacgaggtggggatgggcattgtgccggagaaccgcctggcgcggcattttcgcgatattgccgggcgggttaatcagcgcctggcggccgcggcggatgcggtctggctggtggtctccggcatcggcgtcaaaatcaaataactcaatcgctggctgaccgggccagccctggcagggattctgtatgcaaaatttaaacacggttctgcgggcgatccccgcgccggacgccgacgccatggcgcgggcacagcaacacatcgacggcttactcaagccccccggcagcctcgggcgtctggaggcgctggcggtgcagctggcgggaatgcccggcctgggcggccagccgcaggtggcgaaaaaggccttgctggtgatgtgcgccgaccatggagtgtgggacgaaggggtggcgatttcgccgaaggcggtcaccgccatccaggcggcaaatatgacccgcggcaccaccggcgtctgcgtgctcgccgcccaggccggggcgaaagtgcatgtaattgatgtcggtatcgatagcgaaccgctgcccggcgtggtgaatatgcgggtggcgcggggctgcggcaatattgcccgcggtccggcgatgagccgtgagcaggggcaggagctgttgctggaggtgatgcgctacacccgcgcgctggcccaggagggcgttaccctgtttggcgtcggcgaactggggatggccaataccacgccggcggcagcgatcgtcagcgtcctgaccggcagcgatgcgcaggaggtggtcgggattggcgccaatctgccgctggcgaaggttggcaacaagatggaggtggtgcggcgggctatcgccgtcaatcagcccgacccgaatgatggcctcgacgtactgagcaaagtcggtggtttcgatctgctggggatgaccggtgtcatgctgggggcggcgtcctgtgggctgccggtggtgctggatggctttctctcctacgcggcggcgctggcggcgtgtcagatagcgccggaggtgaaaccgtatctgatcccgtcccactattcggcggagaagggggcgcgtatcgcgttggcgcacctgggcctcgaaccgtatctcaatatgggcatgcgtctgggagaaggcagcggcgcggcgctggcgatgccgatcgtcgaggcggcctgcgcgatgtaccatcgcatgggcatgctggcggcaagcaatattgtgttaccgaaggggtaagcaggagatgggggcggcaatggccgttcccgttttcggcagaggttttgccggcggcagaaacaaaaaaacacccttgagggtgtttgtaatgttggttgcgggggccggatttgaaccgacgaccttcgggttatgagcccgacgagctaccaggctgctccaccccgcgtcaccgtactgctt

SEQ ID NO: 5456 - DNA, 1034 bp, Unknown
  gut microbiota DNA sequence
atcagctgtaaacatatttgcctcagattagtaacgtaagcccggatgctcggcgaggttgtaacgtttacggggccaggccgttttgaggacattcatatagcctgccgtgacctgaaccgctgttggggtccaggagccggatttgatatcgagcgtatacggtgatgatgccggagcagacagatcggatgaaatgtaccgccggaatgtcagcgtggctgatttcatttcatccaggattttatcgatcgcctcagaaacccgtccgtcaatattgctgatagcaaactttaaatcctgtgtcccgtcggcgttcctggctggtaaggcgatatctatcgcgctggcctcaaacgtcaccggttgaccattttccagcgtcactgaaacgtcatcccagccactggttagccagtagttatcatcgcctgccgatatctgcagcgtatcgtgaataacctccgatccgctgctggcatatagtcgctcaagaattgtcatgcttcggccactctctgtttagcgcgatatccagtaacgactggcccgccagccattccgggtaactcccccagccagaaggcggtaacgggcgctcccataattccagcgttgcgctgtactgccagtattttggcgcgaccagcgtcggcccttcgtaaatatccacgaacctggctttatagggctttaccccgatgggagtcttgagtttcagatagaaccaggactggccatctttaagcgcatccctgaaaaacgcctcaaacacctgcgccagagcatcagttttaaaaatccatttaaccgatgcctgggtgggtgttgaggtatatcgccttcgttgttgagcgcgaccggacgtcatctccgttcgcagtaaaggtgatatgggcttaaacccgtacccgtccataagcggcatgggcaggtaatcatccgggtagaaaatatctgccatgaatattccctccgggcaggtctatcttggttttttagattggagatttgaataaatagcccgaccgaat

SEQ ID NO: 5457 - DNA, 2040 bp, Unknown
  gut microbiota DNA sequence
gcaagatgatttccccgcagtcgatcgccatcgcctgcgccgcggtaggcctggtgggcaaagagtcggatctgttccgctttaccgtcaaacatagcctgatcttcacctgcatggtggggctgatcaccacgctgcaggcctacgttttaacctggatgatcccgtgatagtgatgcctaaacgcctggccgacgacgtggcgcgtcgcgtccgggcgctgattgaagaacaacagctggaggcgggcatgcgactgcccgccgagcgccagctcgccgcccagctcggcgtctcacgcaattccctgcgcgaagcgctggcgatgctggtcaatgaaggggtgctgttgagccgtcgcggcggcggcaccttcgtccgctttcagcatgagccgtggtcagagcaaaacatcgtccagccgctgaagacgctgctggccgatgacccggactacagcttcgatatcctcgaagctcgccacgccatcgaagccagcaccgcgtggcacgcggcgatgcgcgccaccgacgccgataaagaaaaaattcgtctgtgctttgaagcgacccagagtgaagacccggatatcgcctcgcaggcggatgtccgctttcacctggcgatcgccgaagcctcgcataacgtggtgctcctgcaaaccatgcgcggctttttcgacctgctgcactcctccgttaagcagagccgccagcgcatgtatcaggtgccgccggtgtttgcccgcctgaccgaacagcaccaggccgtcatggaggcgattgtcgccggcgacgccgaggcggcgcgccaggcgatgatgggccacttaggctttgtccacgccaccatcaaacgttttgatgaagaccaggcccgccaggcgcgaattacccgcctgcccggtgaccacaatgaaaattccagggagaactcgtgatgattatttccgccgccagcgactatcgcgccgccgcacagcgtatcctgccgccgtttctgttccactatattgacggcggcgcctacgccgaacataccctgcgccgcaacgtcgaggacctttccgatgtagccttgcgccagcgtattttgcgcaatatgtcggacctgagtctggaaacgacgttattcaacgagaagctggcgatgccgacggcgttggcgccggtcgggctgtgcgggatgtacgcccgccgcggcgaagtgcaggccgccggcgcggcggacgacaaaggcattccgttcaccctctctaccgtttccgtctgcccgatcgaagaggtcgccccgaccatcaagcgcccgatgtggttccagctgtatgtcctgcgcgaccgcggctttatgcgcaatgcgctggagcgcgccaaagccgccggctgctcgacgctggtctttaccgtcgatatgccgactcccggcgcccgctaccgcgacgcccattccggcatgagcggcccgaacgccgccctgcgccgctactggcaggccgtcacccatccgcagtgggcgtgggacgtcggccttaacggtcgcccgcacgatctgggcaatatctccgcctatctcggcaaaccgaccgggcttgaggattacattggctggctggcgaataacttcgatccgtcgatttcatggaaagacctggagtggatccgcgatttctgggacggtccgatggtgatcaaagggatcctcgatccggaggacgcccgcgacgcggtgcgcttcggcgctgacggcattgtcgtctccaaccacggcggccgccagctcgatggcgtgctctcctcggcccgcgccctgccggcaattgccgacgcggtgaaaggcgacatcactattctcgccgacagcggcatccgcaacgggctcgacgtggtgcggatgatcgccctgggcgccgacagcgtactgctgggccgcgcttacctgtacgccctggcgacccacggtaagcagggcgtggcgaatctgctgaacctcatcgagaaagagatgaaagtggcgatgaccctcaccggggcgaaaagtatc

SEQ ID NO: 5458 - DNA, 1027 bp, Unknown
  gut microbiota DNA sequence
gacccgctgatgctggtcctcgccgccgaccatatcatcaataaccagccggtcttccacgacgccatccgcgtcgccgagcagtatgccgatgaaggccatctggtcaccttcggtatcgtgccgaacgccccggaaaccggctacggatacatccagcgcggcgtggccctcaccgacagcgcccataccccgtaccaggtggcccgcttcgtggagaaaccggaccgcgagcgcgccgaggcctacctcgcctccggggagtactactggaacagcggcatgtttatgttccgcgccaaaaaatacctttccgagctggccaaattccgcccggatatcctcgaagcctgccaggccgcggtcaatgccgccgacaacggcagcgacttcatcagcatcccgcatgacattttctgcgagtgcccggacgagtccgtggactacgcggtaatggagaaaaccgccgacgcggtggtggtcggtctcgatgccgactggagcgacgtcggctcctggtccgccctgtgggaggtcagcccgaaagatgagcagggtaacgtcctcagcggcgacgcgtgggtgcacaacagcgaaaactgctacatcaacagcgacgagaagctggtggcggccatcggcgtggagaatctggtgattgtcagcaccaaggacgccgtgctggtgatgaaccgcgagcgttcccaggacgtgaagaaggcggtcgagttcctcaagcagaaccagcgcagcgagtacaagcgccaccgcgagatttaccgtccctggggccgctgcgacgtggtggtccagaccccgcgcttcaacgtcaaccgcatcaccgtgaaaccgggcggcgccttctcgatgcagatgcaccaccaccgcgccgagcactgggtcattctcgccggcaccggccaggtgacggtgaacggcaagcagttcctgctgaccgagaaccagtccacctttattccgattggcgccgagcacagcctggaaaacccgggccgcattccgctgg

SEQ ID NO: 5459 - DNA, 20692 bp, Unknown
  gut microbiota DNA sequence
gggaaccaccaggttcccgttctgacataatctgggggccagattacatgttcgcgataatcgcgtcgccaaactctgaacatttcagcagtttagcgccttccatcagacgttcgaagtcataggttacggtcttggcggcgatagcgccttccatgcctttgacgatcaggtctgcggcttcgaaccactgcatgtggcgcagcatcatctctgcggacaggatgatggagcccgggttcactttgtcctggccggcatacttcggcgcagtaccgtgagtcgcttcgaacagcgcgcactcgtcgccgatgttagcgcccggggcgataccgataccgccaacctgtgccgccagggcgtcagagatgtagtcgccgttcaggttcatacaggcgataacgtcgtattccgccggacgcagcaggatctgctgcaggaacgcatcggcgatcacgtctttcaccacgatctctttgccggtgttcgggttcttgattttcacccacgggccgccgtcgatcagctcgccgccgaactcttcgcgagccagctggtagccccagtctttgaacgcgccttcggtgaacttcatgatgttgcctttgtgcaccagagtgacggaatcacgatcgttagtgatcgcgtattcaatcgcggcgcgaaccaggcgtttggtgccttcttcagagcacggcttgatgccgataccgcaatgttccgggaagcgaattttcttcacgcccatctcatcgcgcaggaatttgatcactttgtctgcttccgcagagtcggctttccactcgatacccgcatagatatcttctgagttttcacggaagataaccatatcggtcagttccgggtgtttaaccgggctcggggtgccctggtagtaacgtaccggacgcaggcagacgtagaggtccagctcctggcgcagcgccacgttcagagaacgaatgccgccgccgactggggtggtcagaggacctttgatagcaacgcggtagtcacgaatcagatcgagggtttcagctggcagccagacgtcctggccatagacgtgggttgatttctcaccggtgtaaacttccatccaggaaattttacgctcgcccttataggctttctcaacggcggcatcaaccactttcagcatcgctggggtaacgtcaacgccgataccgtcaccttcaatgaacgggataatcggattgtgagggacgttcagtttgccgttttgcagggtgattttttgaccttccgccggaactactactttgctttccattaacctctccttcgagcgcttctggttctgctcttccctcttcacgcgagcctggtgttggctgagtcggccagcttcggcgtaccgggtcttcccgctcaccggagctatcgcgtccgtgtcgccttcctgcctgtagtgcgaatcggtttgagcaattttttgttaataatttgtaatgagcatgtcaatactacctgaatgtttgcgtccatgaaaggcattcgtaattaggctataatgcggcaattgataaagcctgaaaataccatgcagaaaacttcatttagaaaacatcgcgttgagcgattcagcacacaacaagtcaccagacaacgtaaagaacgccagccaaaaactgtgatcttgttcaataaaccctatgatgtgttgccgcaatttaccgatgaagccgggcgcagcacgctgaaagattttattccggtggcgggcgtttacgccgcaggtcggctagatcgcgacagcgaaggcctgctggtgctgaccaacgacggcgcgctgcaggcgaagctgacccagccgggtaagcgcaccggcaagatctactatgttcaggtggaaggcgaacccacgcccgaggcgctgaccgccttgcgcgacggcgtcacccttaacgacggccccaccctgcctgccggcgtagaacttgtcgaggagcccgtctggctgtggccgcgcaacccgccgattcgtgagcgcaaatcgattcccacccgctggttgaaaatcacgctctacgagggacgcaaccgccaggtgcgccggatgaccgcccacgtcggcttccccaccctgcggctgatccgctacgccatgggcggctatacgcttgacggactggccaacggcgactggcgtaaagccgaataactgaaaaggaaaagcgatgtttaaacctcatgtcaccgttgcctgcgtggttcacgcccaggataaatttctcatcgtcgaagagaccattaacggcaaagcgctgtggaaccagccggccggccatctcgaggccaatgaaacgctgctgcaggccgccgaacgtgaactgtgggaagagaccggcattcgcgccacgccgcagcacttcatccgcatgcatcagtggctggctcccgataacaccccgtttctgcgcttcctgttcgccatcgaacttagcgatctgtgcgccactgaaccgcacgacagcgatatcgatcgctgcctgtggctcagtgctgaggaaattcttaacgcgccgaacctgcgctcgccgctggttgccgaaagcattcgctgctacctgcaggacccgcggcagccgctgtcgctgattggcgcatttaactggccgttcacagggggtgaatgaacggtgagcgcgtgctagaatacgccgcctcgaagttcaatgtagcgagtatttccatgtcagaaagccagaaaaaagtgatcgtcggcatgtccggcggcgtcgactcctcggtctccgcgtacctgctgctgcagcaagggtataaggtggaaggcctgttcatgaagaactgggaggaagacgacggcgaggaatactgcaccgccgccgccgaccttgccgatgcgcaagcggtctgcgataagctgggcattgaactgcacaccgttaactttgccgccgaatattgggacaacgtctttgagctcttcctggaagagtacaaagctggccgcacgccgaacccggatattctgtgcaataaagagatcaagtttaaagccttcctcgagtttgccgccgaagacctcagcgccgactacatcgccaccgggcactatgtgcgccgcgccgatgtcgacggtaaaagccagctgctgcgcggcctcgacggcaacaaagatcagagctacttcctctatacccttagccacgaacagattgcccagagcctgttcccggtgggtgaactggaaaaaccgcaggtgcgtaagatcgccgaagagctggatctgatcaccgcgaagaaaaaagattccaccggcatctgctttatcggcgagcgtaaattccgcgatttccttggccgctatctgccggcgcagccgggcaaaatcctcaccgtcgacggcgaggagatcggtacccatcaggggctgatgtaccacaccctgggccagcgtaaagggctgggtatcggcggcaccaaagagggtagcgaagatccatggtacgtggtcgataaagacgttgagaataatattcttatcgtcgcccagggccatgaccacccgcgcctgatgtccgtcggcctgattgcccaacagctgcactgggtaaaccgtgaaccgctgcagggcaccctgcgctgcacggtgaaaacccgctatcgccagaccgatatcccctgcaccgttaccgcgctggatgaagaccgtatcgaagtccgcttcgatgagccggtcgcggcggtgaccccgggccagtccgcagtgttctatttaggggaagtgtgcctcggcggcggaattattgaacaacgactgcctctgcagtcctgaacgcgcgttatttccgccgggacgaaccgccctggcggctgacaaggagtatgtgtggcgaagaattactatgacatcaccctggcgctggctggcgtttgccaggcggcgcgactggttcagcaactggcgcatcagggacattgcgacagcgatgccctgcatgtgtcgctgaacagcatcatcgacctcgatcctgagtcgacgctggcggtgttcggtggcagtgaagccaatcttcgcctcggtcttgaaacgctgctcggggtgctcaataccagcagccgtcagggcctcaatgctgaactgacgcgctataccctgagcctgatggtgctggagcgcaagctcgccgccagtaaaggggcgatggacatgctcggcaaccgcatcgccggcctgcaccgtcagctggaacactttgacctgcagtccgaaacgctgctcagcgccatggcgggcatctatgtcgatgtgataagcccgctggggccgcgtattcaggtgaccggctcccctgccgtgctgcaaagcccgcaggtgcaggcgaaagttcgctcagcgctgctggcgggtattcgcgccgcggtgctctggcatcaggtgggcggcggacgtctgcagcttatgttttcccgtaatcgtctggttaaccaggcaaagcaaattcttgctcatttaaccccggagttgtgatctatggaattatcctcactgaccgccgtttcccctgtagacggccgctacggcgataaagtcagcgcgctgcgcggtatcttcagcgaattcggtttgctgaaattccgcgttcaggtggaagtacgttggctgcaaaaactggccgcccacgcagcgatcaaggaagttcctgcttttgctgccgacgcaaacggtttccttgataaaatcgtcgccgatttcagcgttgaagacgcggagcgcatcaaaaccatcgagcgcaccactaaccacgacgtgaaagcggtagagtatttcctgaaagagaaagtcgctgacgtcgccgagctgcacgcggtatcagagtttattcacttcgcctgtacgtctgaagacatcaataacctctcccacgcgctgatgctgaaaaccgcccgcgacgaagtggttctgccttactggcgcaaactgattgacgcggtaaaagatctggcgacccagtaccgcgatgtgccgctgctctcccgtacccacggccagccggcaacgccgtccaccatgggtaaagagatggcgaacgtcgcctaccgtatggagcgccagtatcgtcaactgaaccaggtggaaatcctcggtaaaatcaacggcgcggtgggtaactacaacgcccacatcgccgcctacccggaagtcgactggcatcagttcagcgaagagttcgttacctcgctgggtattcactggaacccgtacaccacgcagatcgagccgcatgactatatcgctgagctgtttgactgcatcgcgcgcttcaacaccattctgatcgacttcgatcgcgacgtgtggggctacatcgcgctcaaccacttcaaacagaagaccatcgccggggaaatcggctcctccaccatgccgcacaaggtgaacccgattgacttcgaaaactccgaaggcaatctcggcctggccaatgcggtcatgcagcacctggccagcaaactgccggtttcccgctggcagcgcgacctgaccgactccaccgttctgcgtaacctcggcgtgggcatcggctatgcgctgatcgcctatcagtccaccctcaaagggatcagcaagctggagctgaaccaggatcgcctgctggacgaactggatcacaactgggaagtactggctgagccgatccagaccgtgatgcgtcgttacggtatcgaaaaaccgtacgagaagctgaaagagctgacccgcggcaaacgcgtggacgcggaagggatgaagcagtttattgacagcctcgccctgccggaagaggaaaaagtgcgtctcaaagcgatgaccccggccaactatatcggtcgggcaaccaccatggttgacgagctgaagtaatcgccctgcccctctttccgccggaaagaggggcgttttatcgccggaaagcgatcagatccaaacgtcgttcaccgccgtccgctcgccgccctcgtggccggtattcaacaccccgcgcggctcaatcagcatcagcttcgcttccgtctccgccgaggtcttatgttccaccccgcgcggcacgacgatcatctccccggccttcaccagcacatgcccgtcgcggaagtccacgcgcaataccccctccaccaccatcaatgtctcatcggtttccgggtggctgtgccagataaagtcgccggcgatgcgcacgaccttgaactgatagtcgttcatttcagccaccactttgggctgccattgttcgctgaacagggaaaatttatgagcaagattaacgagttgaaccatgggctgtctccttatgataaaggcagtcagcatagttcgcctcgccgcgttgacgcttgaacgattgtgcaacctgcgccgccttatccgcggatagcccgcagccagcgccccggagagaggccaaagcggctgataaactggcgcgtcatgtggctctggtcggcaaagcccgcgtcggcggcaatatccaccagacgttccccggcgcgcatccgctggcggcaaaaatcgagccgacgcatcatgacgtaacgccacgggctggtgccgtacagcgttctgaaatcccggctcaggctccagcggtcccggccgctgacctgcgacagggtgtcgagggtcatatcctgcataaaacaggcatgaatatactcccgggccctctccgccgcctgataatcaaacgcctggcgacgggaacgttggccgccgacaacggccagggtctgcgccaggtcgtacagagcatcctcttcctccagcggctcgaaggtatccgtgaccgctttcaacagcggctgcgcggcgcgacgtagccgtggatccgccgacaagccgtcggggataaacggtagtggcctgccgccgagtatcttctggatcagcgccggttcgatataaaccatgcggtagtgaaaccccgcctcggtgcccgcctcgccatcgtgtatttcgtccggatgaagcaccatcgttccgccgggcaggctgtgctggagtccgccgcgatagtgaaagctctgcacgccggcgatcgtctggccgatggcgtaggtatcatgccggtgcggctcatagccgtggccgccgaagaaggcttcgatgcgttccgtccggctgggcgattgcgccagcctgacccagtccgcgctctgctgctgagacataatggataacctgcgacgttcttgaggggtgattccagcactattacacaaaaaattaacatcaccaacccgctcgccgttcgcatcctgccgctgggcgtttactgaaattacgcatagaatgaaggagttccatgcagtatgcgcaaagggcgccgccgaatgctggccagcccggggcaccaggggccctttttataaaaagctttatttaacagccgtttatattttgcgtatataatgagcgtcagactactatcgaaaatgctagggagaacagccatgcgcgtactcgtggttgaggataatgccctgctgcgtcaccacctcaaagttcagctgcaggagctgggccatcaggtcgatgcggcggaagatgccagggaagcggactactatctgggcgaacatctcccggatatcgccatcgtcgatctcggcctgccggatgaagacggtttatcactgatccgccgctggcgcagccacgacgtgtcgctgccggtgctggtgctgaccgcccgcgaaggatggcaggataaagtggaagtgctgagcgccggggcggatgattacgtcaccaagcctttccatattgaagaggttgccgcccgcatgcaggcgctgctgcgccgtaacagcggcctggcctcgcaggtgatctccctgccgccgttccaggtcgacctctcccggcgcgagctgtcggtgaatgaccagccgatcaagctgaccgcctttgaatacaccattatggaaaccctgatccgtaaccgcggcaaagtggtcagcaaagattcgctgatgctccagctttacccggatgccgaactgcgagaaagccacaccatcgacgtgctgatgggtcggctgcgcaagaaaattcaggctgaatacccacaggacgtcatcaccacggtgcgcggccagggctatctgttcgaactgcgctgatgaagggactgttgcggcatatcttcccgctgtcattacgggttcgcttcctgctggcgaccgccggggtggtgctggtgctctccctggcctacggcatggtggccctggtgggctatagcgttagcttcgataaaaccacctttcgcctgctgcgcggcgagagcaatctcttttatatgctggcgagatgggaaaacggcgctattgacgtcgacatcccggaaaacctgaatatggaaagcccgacggtgacccttatctacgatgagcagggcaaactgctgtgggcgcagcgtgatgttccctggctggcgaaacgcattcaaccggaatggctgaaacgcaatggcttccatgagattgaagccgatgtcgacagcagcagtatgctgttgcgcaataaccatgagattcaggaacagctggacgctatccgcgaacagggcgacgactctgagatgacccactcggtggcgatcaacctctacccggccaccagcaaaatgcctcagctcagcattgtggtggtcgacaccattccggtggagctcaagcgcagctatatggtgtggagctggtttgtctatgtgctggccgccaacctgctgctggtgatccccctgctgtgggtcgccgcctggtggagcctgcggcccattgagtcgctggccaaagaggtgcgcgaactggaggaacatcaccgcgaaaagctcaatcccaacaccactcgcgagctgacccggctggtcagcaacctcaaccgcctggttcgcagcgagcgcgaacgctatgacaaataccgcactaccctcaccgatctcactcacagtctgaaaacgccgctggcggtgatgcagagtacactgcgctcgctgcgcggcgagaagatcagcgtcgacgaggcggagccggtgatgctggagcagataagccgcatctcgcagcagattggttattacctgcatcgcgccagcatgcgcagcggcggcaccctcttgagccgggaattacacccgatcgcccccctgcttgacagcctgacttccgctctcaacaaggtctatcagcgcaaaggggtcaatatctcgctcgacatctcgccggagatcacttttgtcggcgagcagaacgattttatggaagtgatgggtaacgttcttgataacgcctgtaagtattgtctggagttcgtggaagtttccgtgcgccagaccaccgacagccatctgcacatcctggtggaagacgatgggccggggatcccgcagagccagcgccgggccgttttcgaccgcggccagcgggctgataccctgcgtcccggccagggggtagggctctccgttgcgcgtgaaattgtcgaacaatatgatggagagatcatcgccggggaaagcctgctcggcggcgcctgcatggaggtggtgtttggccgccagcagatggaagataaacagagttaatcgttgagatttttcacggcgcctgcatcgccagggcgccgcatccgttataatccctgtcagacacctgcagtggaatatcaatatggattatcaattaacgcttaactggcccgactttatcgaacgctactggcaaaaacggccggtggtattgaagcgcggcttcgccaattttatcgaccccctaagcccggacgaactggcaggactggccatggagagcgaggtcgatagccgccttgtcagccatcaggatggaaaatggcaggtcagtcacggtcctttcgaaagctacgatcacctgagcgaaaacaactggtccctgctggtgcaggcggttaaccactggcatgaaccgtccgcagcgctgatgcatccgttccgtgccctgccggactggcgtatcgacgacctgatgatctccttctcggtgccgggaggcggcgtcggcccgcatctggatcagtatgatgtgtttatcattcagggcaccggccgtcggcgctggcgcgttggggaaaaggtgccgatgaaacagcactgcccgcatccggacctgctgcaggttgaccccttcgaggcgatcatcgatgaagagatggagcctggcgatattctctatattccgccgggattcccgcatgagggttattcgctggaaaactcgcttaactattcggtcggctatcgcgcgccgaatgcccgcgagctgtttagcggctttgccgactatgtcctccagcgcgaactgggcagccagcgctacgccgatccggacgtgccgtcccgcgaccatccggcggatattttaccgaccgaactcgaccgcctgcgcgagatgatgctgggtctgattaaccaaccggagcactttaagcagtggttcggcgagtttatcacccagtcgcgtcatgagctcgacgtcgcgccgccggagccgccgtatcagccagatgagatttacgatgccctgcagcagggcgataccctggaacgcctgggcggcctgcgggtgctgcgcattgacggcgaggtattcgttaacggcgagaagatcaactccccgcaccgtccggcgctggacgccttagccacccatctgacgctgcgcgccgaccattttggcgatgcgctggaagatccttctttcctcgccatgctggcagcgctggtcaacagcggctattggttctttggcaactgagccatcatcctgcccggcggcgctgcgcttgccgggcctacgggtcccgcgctcaccggctggaccgtaggccggataaggcgaagccgccatccggcactttgtggtttcgatggcggcaatgtcttacccgagcattatcgcctctcgcctgcatcaaattcgcttacctcacccgcccaatccgacggataccatccccggcgcacatcgcgatgaaaggtcgaatacggccaatcctgcacccgacggacatgaccgtgcttaacgggattgatataaacgtaatccatatgccgccggtaatcttcttcattacggatggcatgttcccagaatcgcggctgccagatatggcgctgcgccagcgctcgggtaaacatttttttaatgtcccgccagcgaccggaataatcggtatccccctcaggtagggtccagatgcagtgcatatgctctggtaaaaccacccaggcgttaatcagaaaaggttttttgcttttaacagacgctgtagcggcacgcagatgaacaatatgccgcgtcaggagatcgctgcgccgattttgcagattaacggtgaagaaccagcagccgccagggatataactgcgacgataatcagacatgtgaggttccctcctcagtattagccttatcgcttttgcccggcggcgctgcgcttgccgggcctacgggttctgtggtcagcggctgaaccgtaggccggataaggcgaagccgccatccggcatcttgtccgacacgcggccttaccgggccacctgagaagattaatgccctttgcgtgccgccgtcagctcggcgatacgcacgatcacctgcaccgctttctccattccttccagggtgacaaactcatgtttgccgtgatagttgtagccaccggtaaacaggtttgggcacggcagtcccataaatgagagctgcgcgccgtcggtgccgccgcggatcggcttcatctgcggttcaatatcgcagtccaccatcgcctggcgggcaatatcgaccacgtgcggatgggcgatcacctgctcatgcatgttgtaataactgtcctcgatcaccagctcaatataacagtccgggtgcagtcccttgccgacctttttggcgatctccatcatcttgcgcttgcgcgcctcgaagtgcttacggtcaaaatcgcggatgatgtaatgcatctcggcccgatcgacgctgcctttcatgctggtgaggtgataaaaaccttcatagccttcagtggtctccggcgcttcatcggccggtacttcggcatgaatgcgcgcggccagcgacagcgcgttgaccatcacccctttcgcggtgccggggtgcacgttattaccgacaatttttatcgtcaccgaggcggcgttgaagttttcaaactccagttcgccgaccccgccgccgtcgacggtataggcccagcgggcgtcaaaggcctcgacgtcgaaatgcttcgcccctttacccacctcttcatcaggggtgaaggccacgcggatatcgccatgaggaatatttttcgcctgcagggtcgccagcgcggtcataatttcggcaatgccggctttgtcgtccgccccgagcagcgttttcccgtcggtggtgatcagcgtctgtcccaaaagctgatgcagaaccgggaacatcaccggggagagcacctcatcgccgatacccagcgcgatatcgccgccgcgatagttttcaacaatctgcagattaacgtttttaccactgaaatccggggaggtgtcgacgtgggagataaaaccgatggccgggatatcgccctcaacgttagcgggcaaagttcccattaccgtccctttttcactcagcgttaccttgaccagtcccatttcttccagctgcgcctgcaacaggcgtaacagcttccactgcccttccgtgctggggacctgacgaacgccaggctttgactgcgtgtccaaagaaacgtactgcaaaaaacgctcaagcaatttatccatgtagccaccctcttcttttgtgacaacattattcataagccagaaaagacaaatattgcgtcaggtcatttttagcccgtaaagcgaaatttaataacggaaccgacgttatggtgtaaaggtagactatgcgggcgtatcaaggattggcgattaccctcgtttgccgtagaatgctggcccttattaaaaacgtgcaaccccaaaggtggttaatcacaaaccccgcagcggccggaaatttgccgttgcgtctacatgggacagagtcaaaaattgaatatacaaccgcgttcgcgttcgccgctggtgcatctggcgggaattcgcaagagctttgatggtaaaacggtcatcgacaaccttaacctgaccatcaacaatggtgagtttctcactctgcttggcccctctggctgcggtaaaaccaccgttctgcgccttattgccggcctggaaaacgtcgacagcggacggatccatctcgaagatcacgatatcactcatgttccggcggaaaaccgccacgtcaataccgtattccaaagctacgccctgtttccgcatatgacggtgttcgagaacgtcgcctttggcctgcggatgcagaaaacaccggcggcggaaatcaccccacgggtgatggatgccttaaagatggtgcagttggaggcgtttgcccagcgcaaaccgcaccagctctccggcggccagcagcagcgcgtggccatcgcccgcgcggtggtcaacaaaccgcgtctgctgctgctcgatgagtctctttcggcactggattacaagctgcgcaagcagatgcagaacgaactgaaagcgctgcagcgtaagctcgggatcaccttcgtcttcgtcacccacgatcaggaagaggctctgaccatgtccgatcgcatcgtggtgatgcgtgatggcaaaatcgaacaggacggcaccccgcgagagatctacgaagagccgaagaacctgtttgtcgccagctttatcggcgagatcaatatctttgacgccacggtaattgaacgtctcgacgaacagcgcgtgcgcgcccgcgttgaaggacgggaatgcaacatcaccgtcaattttgccgtggaggccggccagcgtctgcatgtcctgctgcgcccggaagatctgcgcgtcgacgagatccaccataacagcgacgccgacggcctgatcggctatgtccgcgagcgcaactataaaggcatgactctggagtcggtggtggaactggagaacggcaaaatggtgatggtcagcgagttctttaacgaagacgacccggatttcgaccactctcttgaccagaaaatgtctatcaattgggtggaaagctgggaggtggtgctggccgatgaagaacaccagtaaattccagaatgtggtgatcgccactatcgtcggttggctggtgctgtttgtcttcctgcccaacctgatgatcatcgccaccagctttttgacccgcgacgatgccaacttcgtcaaactggtcttcacgctggataactattcgcggctactggatccgctctattatgacgttctgctgcattcgctaaacatggcgctgctggcgaccctcgcctgcctggcgcttggctatccgtttgcgtggttcctcgcccggctgccgcagaaggtacggccactgctgctgttcctgctgatcgtccctttttggaccaactcgttgatccgcatctacgggctgaagattttcctcagcactaaaggttacctgaacgagtttctgctgtggctgggggtgatcgacaccccgatacgcattatgttcaccccctcggcggtgatcatcggcctggtgtacatcctgctgccgtttatggtgatgccgctctactccagcattgagaaactggatcgcccgctgctggaagcggcgaaagatctcggcgccagcaagctgcagacctttatccgcattatcatcccgctgaccatgccggggatcatcgccggctgtctgctggtgatgctgccggcgatggggttgttctacgtttccgacctgatgggcggcgccaagaacctgctgatcggcaacgtgatcaaaagccagttcctcaatatccgtgactggccgttcggcgcggcaaccagcattaccttaaccctggtgatgggcctgatgctgttgatttactggcgcgcggcgcgcctgctgaataaaaaggtggagctggaatgatcggtcgactgctgcgcggcggctttatgaccgccatctacgcatatctctacatccctattattattctgatcgttaactcgtttaaccggtcgcgcttcggcatcaactggcaggggttcaccaccgactggtatagcctgctgatgaacaacgatagcctgctgcaggccgcccagcactcgctgaccatggcggtgctgtcggcgaccttcgccacccttatcggctcgttgaccgccgtagcgctgtaccgttaccgctttcgcggcaaaccgtttgtcagcggcatgctgtttgtggtgatgatgtcgccagatattgtgatggccatctctctgctggtgctgtttatgctgatcggcgtccagcttggtttctggtcgctgctgttttcgcatatcaccttctgcctgccgtttgtggtggtcaccgtttactcccgcctgaaaggctttgacgtgcggatgctggaggcggcgaaagatctgggcgccagcgagatgaccatcctgcgcaaaattatcctgccgctggccctgccggcggtagccgctgggtggttgctgagcttcaccctgtcgatggatgacgtggtagtctcctcgttcgtgaccggtccggggtatgaaatcctgccactgaagatctattcgatggtcaaggtcggcgtttcgccagaggtgaacgccctggccacgattttgttagttctgtcgctggtgatggtcatcgccagtcagttaattgcacgtgataaaactcaggggacgttaaaatgaaaaaatggtcacgccacctgctcgcggcgagcgctctggcaatcggcatgggcgctgcgcacgcggacgatagcaaaacgctctatttctataactggaccgagtatgtgccgccgggcctgctggagcagttcaccaaagagaccggcatcaaggttatctattcgacctacgagtcgaacgaaaccatgtacgccaagctcaaaacctataaagacggcgcgtacgacctggtcgtcccgtcgacctactttgtcgacaagatgcgcaaagaaggcatgctgcagaagatcgataagagcaagctgactaacttcagcaacctcgatccgcagatgctgaataaaccgttcgatccgaataacgactactccatcccctatatctggggggcgacggccatcggcgtcaacagcgaggcgattgacccgaaaactatcaccagctgggccgacctgtggaagccggaatacaaaagcagcctgctgctgaccgacgacgcgcgcgaagtgttccagatggcgctgcgtaagctgggctattccggcaacaccaccgacccgaaagagattgaagccgcctataacgagctgaaaaagctgatgcccaacgtcgcagcgtttaactctgataacccggcgaacccgtatatggaaggcgaagtgaacctcgggatggtatggaacggctcggcttacgtcgcccgccaggccggtaccccgctggaagtgatctggccgaaagaaggcggcatcttctggatggacagcctgtcgatcccggcgaacgccaaaaacgtcgacggcgcgctgaagctgattaacttcctgctgcgcccggatgtcgccaaacaggtcgctgaaaccatcggttatccgacgccgaaccttgcggcgcgcaagatgctcagcccggcagtggccaacgataaatcgctctatccggacaccgcaaccattgagaaaggcgaatggcagaatgacgtcggcagcgccagcgccatttatgaagagtattaccagaagctgaaagcgggccgttaatcccgcagggcggaaccgcggttccgcccttttttttgctctcaccttagccccgcagcgcgcgccagaggagcgccggcaatttgcgccagcgcggccgatggtaaaaatccaccagccgctgcgccaccgcttcctgcccccggtgggtgatgaaccagggcggcaggggcatcagcgtcagttcgccatgccaaagactacgcggaaacggccgaaacggcgcctcaatcaccgtgcgctccgttttctccagcataaagctgttatgcaccttgccccgcccgctctgaatatcgtcgagcgtgtggccgggaaacgccccccacgggcaaggggctaacaggaaggccaccccgctccagcagttgatcgccaccgtgccgtagcgcagctcggcgatcagcgcattaaaacgcttacgtccaatcgctttgcgggtgcgcgggtggatcacaatattggcccccagcgtgccctgcagccgctgattggcatagccgatcgcctggcgcagaaagctttccgcactatcggcctcaagacgggtgaccgacagccccgggccaaagacctcctgctggcagaacccgggatcatcgtcggtattcgccacaatcaacggcagcgcgtcaccgcgggctatctccagcggctgacgggcgcgcaggcgaaagtcggtcagccggttttcagcgccggggtagtagtccgggcgggtattcgcggcgatcagtcggtacagctgattcagcaaggccgtcgcaggctcccagccttgctgcaggatcagcacctggctggccacgcagttaaacccgccgttgttcatcttctgcgtcgccagctgctgcgcctgaaaagcgatgtccgcctcgctccacggcccgggtacgataatggtggggctgacgccgcccagctccgaggtcacccgacgcgggttcagcggcgtcccggcggcccgacgctggcgagccgtctcaccctcgccccagacgatgacgtcatgggtctcgcgggagccagtgatatggatctcatcgacagcgggatgggtagtcagccacgctcccgcccgggcgtcgccggtgacgatgcggagcgcatccatggcaatcagcggcgccagggcctgggccagcagatcgtgcagataatcattcaccggattgagcttcagcaggcagacctgattctcaataaacagcttgtgtagcacatccagtggcgcaatcgaggccacattgccggcgccaagcaccagcgccagcttgccctgccgcgcggcaggcgggatgtcgtatgcccgcgccgcatagcggtcgagatgggcccggttgacgcctggctgcatccatatctcagcgcgaacaccagacagaagcagccgatcccagagcgtgccgggcaccacccgcagcgccaggcggccgtccgccagcgtccgcagcgggatccgccgcagaaaggtcttctcctccagttgctccagggtggcgataagcccgttgcagccgaccattagcgcgcaggggcccgccagccactcctcccccgccagcggatcgcccgccggcagccctttggccaccgctgccgcggccacccacgccggggcaatgccggccagggcatccttgatctggcgcaggagcgccagacgacggttcactgaggtttccgcccagcgctggcgcgccgccgacaaggcgtgcagggccgcatcatactgagaacaggtcgtcagaccgggtcgcgcatggctcattttccctcactcattaaaatctctccgtaggcctggcgcagctgatttttgagcaccttacccgtggcgctgaccggcagcgcatcgacaaatatcacccggtccgggatctgccatttaggcacccgcttctcaaaccagctcagcagatcggtctcctccacttcgcccccttccgcacggacgcacagcagcaccggccgctcgtcccagcgcggatggcgggcggcgatggccgccgcgctgcgcacccccggatgcgcgatggcgatattctccagctcaacggtggagatccactcgccaccggacttgataatatcctttgcccgatcgctgatcaccagataaccattggcgtcgagcgtaccgatatcaccggtatcaaaccagcctgccgcggtcagggcgctcgcgtcctgaccatagtattgctctaccacccagtgccctctgacctgcagatacccctggctttgaccatcccggggcaacggttcgccatccacgtccaccacctgcagttcgatgccgaaaatgggccgcccctgaccggcgcgctgcttttgctgctcctgtgccgggagcgcgtcatgtttgctcaacggtgtgttgatggtgccgatgggcgatgtttcggtcattccccaggcgtgggtcagtgcaatgccgtaatcacgctgaaaggcctcggccatcgacggcggcagcgcggagccgccgaccagcgcacgtttaaattcaggcagccggacctctgtccggcgcatcgctgccagcaagctggcccagatcaccggcacgccaaaccccaccgtcaccttctcggcggccagcagctgcagcaggctgtcgccatcgaggtgcggccccggcagcaccagccgcgcgccgaccatggcggcgataaacggcgtcccccacgcgttgacatggaacatcggcaccaccggcaacaggctgtccttcgccgatatgccggcggcgtccggctggttgccgctcagggcgtgcaggaccagcgaacgatgggtgttcaatacccctttcggccggccggtggttcccgaggtgtaacagagcgaagccggagtcagttcattgagctgcggccagcgatagtctgccatcccctgctgcaacagatcgtcataaaacagcaatgagggcagctggctgagcgccgcttcgctgcgggactccatcagcacgacgtgtttcaccgtcggcagctgcggcagcagctgcgctaccagcggcaaaaaggtctggtcaaaaaacagcacttcatcggcagcgtcgttgaggatataccgcagatggtcaaccgacagccgcggattgacggtgtgcgtcacccagccgccggaggcgacggcaaaatagatctccagatggcggcggttgttccatgccagcgtggcgcagcgggcgcccggcggcagccccagcgacgccagcgccgatgccagccgctgagcacggctggccacctccccccagcagctgcgctccttctcaccgccagtactcaccgagacaatctcggtctcgctgtgatactgcgccgcatggccgagcagcgcggcagtggtgagatcctgataaatcatcggtgacggcatggcggggtctcctttacagacgtccggcggaatcgaggggcgcggcgcgatcgtgcgggcgcctattgaatctggtctacatttgccggtctgcacaaaaaaacgtacagaaatcagcggtcacgcacaaaatagagtgggaaatggttcagaaaggaaaagacaaactcatgaccggaagatcattactcagagagcgtatcgcccgacttcgggccgggcgatagcggtggggatttacagcagcgctttcgctttagcaaccacgttatcgacggtgaagccgtactcctcgaacagctgctcagccggcgcagactcaccgaaggtggtcatgccaacgatagcgccgttcaggccaacgtatttgaaccagtagtc

SEQ ID NO: 5460 - DNA, 443 bp, Unknown
  gut microbiota DNA sequence
ggaaccggtggcgatgaagatcagctccggctggccggcgcactctttcagcacataaccgccgcgggccacggtcgccagctgctctgcggtacgctcctgctgcgccaggttctgacgggagaggatcagcgcggtcgggccgtcctgacgctccacgccatatttccacgcaatcgcggattccacctggtcacacggacgccaggtggacatgttcggggtcacgcgcagggaagccacctgctctaccggctggtgagtcgggccgtcttcgcccagaccgatcgagtcgtgggtgtagaccattacctgacgctgtttcatcagcgcggccatacgtaccgcattacgcgcgtattccacgaacatcaggaaggtggaggtgtacggcaggaagccgccgtgcagcgcgataccgttggcgatagcggtcataccga

SEQ ID NO: 5461 - DNA, 428 bp, Unknown
  gut microbiota DNA sequence
agccgcaaacttctcgttccacgccgcttctttcgcctggccggcttctttggcatcccactgggcatagatgtcagacgggatgtcaaacggcgcgtgtttccagtccagcgcttcgcgggtcagggcgatttcggcgtcgcccagcggcgcgccgtgggagtcgtgggtaccggctttgttcggcgaaccgaaaccgatgatggttttgcacatcagcagggacggtttgtcggtgaccgcccgcgcttcttctaccgcgcgtttgatggcgtcagcgtcgtgaccgtccacgccgcgcaccacgtgccagccgtaggcttcaaagcgtttggcggtgtcgtcggtgaaccagccttcaacgtggccgtcgatggagatgccgttgtcatcatagaacgccaccagtttacccagtttcagggtac

SEQ ID NO: 5462 - DNA, 73199 bp, Unknown
  gut microbiota DNA sequence
ggttttggagtgcagctggcggaagtttttcagctcggatatcggcagatcgtagccagtgaggtgcagcaggctgtaaatcagcatcgaaccatggccatttgacaacacaaaacggtcacggtcagcccaggccggattgttcgggttatggttcaggaaatcacgccacagcacttcggcaatgtcagccatacccatcggggcccccgggtggccggatttggctttctgtaccgcgtccatgctcagggcgcgcagcgcgttggcgcattggcggcgagtggtatttgtcgttttcatcagtctttatccccgcggattacaacatctgctgaatctgttgttccagtttcacctgatcgacagcaaacagtcggatcccttccgctagtttttccactgccatgggatcctgatgatgctgccagaggaactccgcctgcgtcatcgggctgggacgggtttccgtcacgcagccgggagtcaactggcgggtcagcactccttcgctggccgccagctcgtccagcagtgccggagagatggtcaggcgatcgcagcccgccagcgcctggatctgctcaattcgacggaagctggcacccattaccaccgtgtcatagccatgggatttgtaatactgataaatctggcgcacagagaccacgcccggatcgctgtccacctgataggctgactgcggctggtgcttctgataccagtcgtagatgcggcccacaaagggcgagatgagaaagacgcccgcttcggcgcacgcccgggcctgagcgaaagagaacagcagcgtcaggttgcagtttataccgctctgctccaactcttcggcagcgcgaatgccctcccaggtggcggcgagtttaattagaatccgctcgggaccaatgccatttttttcatataactggatgagcttgcgcgccttcgcgacgcacatcccgcgatcccaggcaaagcgagcatccacttcggtggagatacgcccgggcacatggcgcagcacctcgctgccgatatccactgccacctgatcgcaggcgttaatcaattgcgtttctgcgctgcctccctggcggcgtgccttgccaatcgcatcggcaatcagcggctgatactgcggcagctgcgcggccttcagcaccagcgaggggttggtggtcgcatcctggggtgcaaactttttaatcgattcaatatcgccggtatcagcaacaaccgtggtgtattttttcagttcgtctaactggctcatcatctgttccttatcttacgactgcggagattaatctctggcatgctggtgttcgtaataatcaatacgttccactttgggcgcggatccgccgccctcatattcggactcaagccacgcctgaataatttttttgcccagctcagcgccaatcacccgcgcgccaagggtaataatctgcgcgttgttacttttacgcgctcgctcggcggagaaggtatcgtgacactgtgcggcgcggaccccggggactttattggccacaatactcatcccaatgccggtaccgcagatcaggatcccacgctcgtgttcgccctgtttaatcgacatcgccaccgcatgggcaacatccggataaacggtactcccctggcgtttatcgctgctgtaatccgcgacgttaattcccaacccattcaaataagcgacgatggcatcgcgaaaagcataggcggcatcatccgcaccaatagcgattgttttcatggttatttccttaatttaacagtacgtcttaatgacaattcgggtaaaacgaaatttggtcgccaggctgaataatttgtggtggttcgccgtaaaggtgtaccgtcccgggtaattcagcgatatctgcgccatcaaaatttagcgtgatatggccaagctgtcgtaaatttgccgttgccacacggcctaccgcggtcacccgataatttttatcatttaatttcatttgctgaccaggcgataactcggcggtcagttcgctggcctggtgtacagcgcaataactcgcaatatcgtcgggaacggcatcggagaataaaataagccgcagctcccgcagagagtactcaacatattccccgacggcggtaatccgtaatgaatacaacggcacgctcatactatttgtgtcctttggcggcaggggaagataatgtcacgctctcttcacttttcacctctttcagcggttcagcggctggcgcacgctttttcagccgtttatcaaaccaggcgaccagtatcggcgcggtgatcatggtgataatgctcgccgtcgccagctgcgcggtagcggcatccacgtacatcgccagcgaatgatccgcctgggcaaccatcgccggcgtcagcgccgagctggcggcggtggttcccagcgcggcgcccagcgcgcttttcttcttcaaaaacaggttgtagataaagtagaacacaatcccggttagcgcggagataatccccaacaggatcccggacagcccggcggtgaacaccgtattgatactggagttggcgccgatggcgaacgacataataatgatcaccagcggctgcgccgcagcgcataactgtttaaagcgttcgtccagattgccccacagcatgccaatcagcagtgggatcagcatcgacagcagcgcggcgaagggaatattggccaggccgctgacgcccagcaccatcatggtaacaaacggaccatccttgatgcagaatacggagatcgccccggcatcactggcatcgccatagttgctgcacaatgcgatatagagggagctgttcgagctggtcaggcaggcaatcagcgccagggtcgatattccgagaaaaccgctcgggccaaacaacgttcccgcaacccacaccgccagtgccccggccagacatttgagaaacagcagcacggcgcctttatagagcggcaacccggcctgacggatattgatcgaggttccgcaaatgagcaaaaatatgcccatcatggcgctggaaccgactttaaataaggcggtggtcgggccgccaatgctgagcacctggggcgcgaaagtattaattaatatagccaccagcagtggaataataattaacccaccgggcaccttattcattttttcaagtatattaatattcatagggtaactcttaaattaagatttaacagagataacgacgcaatactaccctgacgaccattacgtcgtttattagttattagattactgggttattgctgtgcttcctgataaattcggtcaacaatgatgctaataatatcttccggtccggttagccctcctttcccgacgcaaattaagccggcataatcgccgccaatgatccgcaccatatcggtttgcgggatgacatagtcaatcatttctattccggtggcgcccagctcttttagtacattgaccatggtgtcaccaccggtcatatacaatcctttaatttcacccgacgcacagttaagcacctcgcgcacaatactgcccaatccgtggttaatattttgcgcagcctcaccgtgggccagaccaaatcgctgctcctcttcctgaaggtttagcaaccgcccggtcaaggcggactcaaaaacaaagagcgcgttgtgctgcgccggaacgcactgtcgggcatgctgcacaacgcgattgacttcaatctcagcggcgtttttccggtcaaccaacagctcggcatccaccgggatatggcagacccgggcatcattagcgatcaaatactggagctgttttttggttactggcgttgcgctgccggcaacgatcaaaatcgagccgcgctggccgtccgctgtcaggctcgcgggcgcgctgctccgcgcttcgcgcatcaggccgcgacgaaccgccagccgttcggtaaagggccccggatcgacggccagcacgttccagttcagggccactaccgccccggcgatggcatcgacatcgtcgacggttatcgcatcgaccactatcacccgcacgccgcgctgttgttgttcctgtaaatcctgctggatttgcccttcgcctttcatcaccgatgtcagcgcgatatgcccgacctgatgatgggtctgcgccgccaacagtcccggcacccacgactcggtgaccggggtacgtacatcgcgagccacatcggtccgcgacagggctaccgaatcaatcaccgagtaaccgccgacgagaatacgccgtgactgcggcatcgccggcaccacaaccgccaccgtctcctgcggcagttgttccagcatggcgtcgatttcaaatccgatgccgccgcgcagcgtggtatcaatccgcttggtgaagtaatgcgcgccgcgagcctgcagctgtttcaccgcagcgctcactttgtgctgggcctccgctttcggcaatgggcggctgtcgctgctgaccaccatcgccggatactctacctcattgcgggcgaaggattcggtatcgaaaaacgcggcggtttttaaaccactgcgcgccagcagcaccccgacggtagttgccccggtcagatcgtcagccacgatcccaagctttccgccttccccttgcggccagaccatctcaatgcaggctggcgtcacgccggagacgtagatcccttcgtgtataaattccgccagcgggccgcttttaccggtgggatgcaggttaatggtgggaattccccgcttcggatagagtccgcagcgcaacgtgccgccgcagtcgatgaccattaaaccaatctcttccgccggcggttcgccattcttgaatacatcaatggaaggccagccggtcagttcgctcaggcggtcgacgaccgggggacggatccccccggtgatgtacgcaatctttttcccctgacctggcgtgatagtcagcggcccgccccagcccttacagcccttgctaatcaacagatgtttttccatttctctgtcctcgtgattcgcatgaacctcagcgattattgatgcttcattttccagtaacgggccgccaccagcgtcgactccagcatactgacggtacccgccttaccggtaccggcgatatcaaacgccgtcccatggtcgacggagctgcgcataaacggcaggccgaaggtaatggtgatcgaacgttcaaagtcgagggttttgcaggcaatatgcccctgatcgtgatacagcgagagaatggcgtcgtagcgcccctgtttgccgagatggaacacggaatcggccggaaccggcccgatagcgttgatccccatctcctgggccgctttcaccgccgggatcagattgtcagcctcttcgtgaccaaacagaccattgtcggaaccatgcgggttcagggcggccacggcaatgcgcggatttttgatgttcagggcggtaaattcatggtggatctgctgaacgcaggccagcactcgcgctttgttggcatagtcacaggctgcttttagcgccatatgacggctcacgaagaagacgcgcaggttgtggacgtggaacatggtcagaccgtaatcagattgggtttccacctgatagatttcggtatggcccgggagcttacatcctgccagcttgatggcttccttatgaattggtgcagtagagaccacgtcgatcagccccgctttgcccagctcgatcgacttcatcacatagtccagcgacatttgccccgccagtttctgcaccttgccccattcgatactgtcgcaatcgtagtcgccagtttccagaacatccaacgtcccccagctaaaacgggcctcctgcggatgggcaattttatggatagcaaaatcgcagcccatgattttcatcgcccggctgataatcggtaccgagccgatcaggaacggtttgcactcgtcatacacgcttttgtccatcatggtggccacggtgatctccgggccgatccctgccggatcgccaatggtaatcgccacaacgggttttttctctgctgacatcatgcgcctctcattttttcagttgattgttcatatgttcaataccaaatcatatgctcaaaacattacctgatgaatgagccgccatgagtgatgaagatcacataaaaaaattcatagatttttttcatcgaaaaatgtgatctaacatatgttcatacagtgataaaaagttcaacctcaatacagggtatggccccgtttctggcaagcatttgattttattaagaggagaagcaatgatgaccccgatatggttaggaaccagctggaaaatgaacaagccgctgtcccaggcgatggcctggtgcgaaacgctggcagcgcggatgccggagggctgtcaccctgctattcagcccttcgtcattccccccttcaccgcgatccaacccgtcagccattttctgcaaacgcatcagttaccgcttctgaccggcgcgcagaatatgcatgaagcggatcagggcgcctggaccggggaaatctcggcggccatgttggcagaaaccggcgccacgcttgttgagctgggacattcagaacgacgcgccgcctttaatgaaagcgatgccgcgattaatcgaaaagtgcatagcgccttaggtcatggcctgcgcccgctgatctgtattggcgatagcgccgaggagaaacgctggcaggtgtcgcgtgaaagcgtggtgcggcagatgaagatcgccctgtatggcctgagccaccagcaggcgctgcggaccctgattgcgtatgaaccggtgtgggccattggcgaacatggtacgcccgcctcaccgcaggaggcgggtgtcattcatcaggcgctacgtcaggcgctttgcgagcggtttggtcacgagacgggaacccgtatcccgctgctctatggcggcagcgtaacgctgcaaaacgcggtggaattgctgcgccagcaggagatcaatgggttgtttatcggccgcgcggcctgggacgcgcaaggctattgcgacattgttcaacgcgttacacaggaatttattttgcaggcgcagtaatataaaagggacaccagagatggaaattccaggccatgattgaacaagactcagattacgccctgctcactgaaattgcggtggcttattacgatcaggaacaaacgcaggaagagatcgccaaacgattcggcatttcgcgtatcaaagtcgggcgcctgctgaaaaaagcgcgccaggaagggattgttgagatcagcgtcaaataccatccggtcttcagctcccagattgagcagcagtttatttcgcactttggcattaagcgcgcgctaattgccctggatcaccatgatgaagatgaacagcgccagcaggtggcggccctggtcagtaactaccttgccggggtgttaaaaaacgatatgaccgtcaccgttggtcaggggcgcaatgtggccgcggtggcgaatcacgttggcgtgtttcctgagcgccactgccgctttatctgcggcatcggcggaaccaagcgtgacaatcagctgattgacgccgaccacattagccggaatctggcgcgcaaatttaacggcttcagcgaaacgctttacgccccggcctatgtggaaaccccggagctgcgcgcggcctttatgcaaaaccgcctgattaaggccacgctcgaacaggccagcaaagctgacgtggcgatcatcggcctcggcgatatgaatgaaaacagctttatggtgcagctcggctggtttacgccgcaggaaattgccaccgcgcgtcaggaacagggggtggtgggcgatctggcggggtacagctttttcaatattcagggcaaacccgtcgatacggtgatgaatgaccgggtcattggcttaagtctcgaacagctgcgggccattccctgcgtcatcgctatcgcctccgaaagtacgaaagcgacggcgatcctgggggcattacgcaccggggttatcgatgtgctggctaccagcgcctcgaacgcccgttcggtcattaatatgcaaaaggcgctataaataagccacggcgcaggcggcggatcagcgttgaccgccgtcgtgctggcctttgcccttccctttttcggctcgccgctgcacaaaatcttcaatgatgccgacaacccagttgagaggtttccacagcaccaccagcagcagcaacggaccgtatattcgcacaccgcccgtcgcgacctgaccggtgaacagcagggctaagatatccagcagcaggcacaacgcgctgccagtgccgaggaacagacatagcaggaagaggatcggtcggctatcggcgtgtagcggtaaagcgcgctggctccagacgccaacgataatggccgcgatcaacatgatcgcttcgataaccagcggattatgcatggtctgactcctgtcatgacgtgacatccttgtcagcagcgctgccggcggccgtgggctgcgccctggctaccggcaggcggcttcagtttacagcgcgttttcctgcagcagcttatcgataaaggcgggtaccacttcgcttgccagcccgtagtgcttctcggcaaactcgctgcccacctggctgggctccaggttcagttcaacggtatgggcgccgtgcagtcgcgcctcgtgcacaaagccagccgccggatagacatggccggaggtgccgatggcgataaaaatatctgcgtcggccagcgcgctgtagatctcatccatccccagcggcatttcgccaaaccagaccacgtgcggacgcagcgccgccgggaactggcagcagtggcacttgtcctcggcggtgacgtcgccggtccactccagcacctggccgctccacgaacagcgcacctttagcagctcgccgtgcatatggatcacccggcggttgccggcgcgctcgtgcagattatcaatattctgggtgaccagcagaaaatggtcgcccagcagatcctccagacgcgccagcgccagatgcgccgcgttcggcgcgatttccggactctgcagctgacgacgacgggcgttgtagaacgcctgcaccagcgccggatcgcgggcgaagccttccggcgtcgccacatcttccacccgatgctcttcccacaggccatcggccgcgcggaaggttttgatccccgactctgccgagatgcccgcgccggttaacaccaccactctcggttttgccatcgcttcaggcttcatcctgtcctccctaaagaaaatccgctgacgcagacggtcacgcaaccgacgtttattgcgacgaaaacggctcaatcgatgtaaacggcgcgactgcatagctacctctgtgattaatgggtcaggtgaaggaaggccgcaccgcgcattcccccggcatcgccgtggcgcgcgcgctcaatgcgcggaaccctggcgaccggcagaagatggcgcggcaatcgttgcgccagcccttcgctaatggccgtaaagttagataatccaccgccgagcaccagcaaatccgggtcgacaatggtcagtatattccccagacacaccgccagcagatcgagatagcgctcaacgtgcgcctgcgcgcgcggatcgtgctgctgccactgcgccacaatctccggcgaggagagcggttgctgataaaaatgttcgtacagccaggcgaaaccgcgaccggagagataattttcaatacagcccagctggccgcagccgcagcgcagcagcggaaaatcgcgcccaaccacctccagggcatccaccggcaggcgaatatgaccgaactcgccggtgatatagctatgtccggtaatcgatttaccgttcaacaccaggccgccgcccacgccggtgccgaggatcaatcccatcaccagcgggtattgcgtaaactcatcgtcccacgcttccgacagcgcgaaacagttggcgtcattatcgagacgcacatcgcgccccaaccgcgcgctgaggtcagcgcgcagcggccggccgctggcggctggcacgttagcggcatacagcgtgccgtccgccgtttccggcattcccggaataccgatcccgaccgaaccctgctggtcgaagcgctcatcggcctcgcggaccagcgcctctaccgcctggagaaaatcctcataactacttttcggcgtagcgacgcgtttttcccactgcagtcgccgctcctgattaaatacgcccagcgctatcttgctgccgccaatgtcaaatccataatacatttcagcaattcctcttgtgtcgtcagccaggccgacgatgacgataaattactggccactcagcaccctcgccgggtcgatgcggctggcgcggcgggcgggataccagctggccagcaaactcagcaacagtgctgtcaccagcacataaaagacgtccagccagtgcaattctgacggcaggaagtcaataaaatagatgtcgccggagaggaatttatgcccaatcaggtattcgatgccgttgatgatcgacgtcaggttcaacgcgcagatcacgccgatcaccaccccaaacaggctgcctaccgatccggctaataaaccataccacacgaaaatcgcgcgaattaagccgtcttttgcgccaagcgtgcgcagcaccgcaatatcgccgcttttgtctttgaccgccatcaccagcgtcgagacgatgttaaagcaggccacgccgatcaccagcaccatcgccaggtacataatggcgcggatcatctggatgtcgcgatacatatagccataggtgccgatccagctcttgatgtagacgtagctgttggtcacctcgccggcgtcgcgtaccagcttgttagcatggaaaacgtcggtgaccttgatggcgatgccggtcacgctgccgcccatctccaggtactgctgcgcatcctgcatcgggatcatggcaaaactatgatcgagctggccgctcagctgtaaaattccggtcacatgcagcctgacgcgttttggctgcagcagctgatggtcggcgtcggcattagggatcatgatcgacacccagtccccctgcttcacgtgcagggcatcggcgacccctttgcccaagatcacctgctgttcgccagccttgaatccggcccacgcgttattctgcacaaaggtaggcagcgcgctgagctggctctcctgctgcgggtcgacgcctttcacctggatggcgcgcatattgctgccgctttccaccaggccggtgaagttaatatagggcgctgccgcgacaatccccttcaccttctgcaccttcgccagcgcttcctgccagttattccacggctgattcacgggttcgatttcgccgtgcggtaccaccgccagcacgcggttattcagctcgcgctcaaagccgttcatcgcgctgaggccgacgatcagcacagccacccccagcgcaatgccgatggtggagatcaccgagatcagcgacaccatgccgccgcgccgccggccgcggctgaaacgcaatgcaatcagtaacgataacggagacgccattactcggcccccatcagggtcaggtcggcggtcagacggccatcgcgcatctccagctggcggctcatgcgcttcgccagctgcaggtcgtgggtcaccaccagaaacgcggtgcgctgcgcgacgttcagttcgcccagcagctggaagatgctgtcggcgttgcgagcgtcgaggttaccggttggctcgtccgccagcaccagccgcggtttattcaccagcgcgcgggcaatcgccacccgctggcgctcgccgccggagagctccgacggacggtgatggctgcggtgttcaagcccgaccgcctgcagcatcgctttcgcctggcgttcaatatccgccggcttctttttgccaatcagcagcggcatcgccacgttttccagtgcgctaaagtccggcagcagatggtggaactgatagataaagcccagctcgcggttacgcaggtcggcgcgcgcggcggtggatagcttgctcatcggctgaccggagaaaatcacgtcgccagaggtgggcgtatccaggccgccgagcagatgcagcagcgtacttttgccagagccggaggtgccgacgatagccatcatctcgccttcaccaatgctgaagctgacattgtgcaggacatcggtttgcacattgccttcctgatagcgtttgcacaggttgtcgcattgcagcaggatcttattcataacgtaaagcctcagcgggttgggtggcggcagcgcgccaggaagggtacaacgtagacaacagggccagcaccatcgccaccagggcgataacaatgacctgcagcggctcaatcgccaccggcagcgccgcgccgtcaaggaaggcgccgatgatcggcattaaattattcagctggctggccaacagggcgccaagcaccgctcccagcagcgcgccgacgatcccggcgctggccccctgcaccataaagacggccataatctgccgcggcgtcagcccctgggtctggaggatcgccacttcgccctgcttctccatcaccatcatccccagcgaggtaataatgttgaaggccgcgacggcgacgatcaggctcagcagcaggcccatcatatttttctccatgcgcaccgcctggaacagttcgcccttgcgctcgcgccagtcctgccactgagttcccggcggcagcgtctgctgactcagggtgtcgacctgcagcggttgatccagccacaggcgccagccggtgatattccccagcggatagcgcatcagacgggaggcgtcgtcgatgttggtcagcatctgatagccatcgacttcgctgttggcggcgaaggtgccgatgaccgtgaacagacgctggctcggcacgcggcccatcggcgtaaactgactcgcggaaggaaccatcacgcgaattttatcgccgcgattaacccctagctggcccgccagctgctcgccgagaataacgttatatttgcccgcctgcagatcgctctgtttgacgttcaccaggtatggagtcaggggatcgttctgcgccggatcaatgcccagcataaccccgaccgccacgctgcgcgcgctctgcagcaccacgtcgccggtggtgatcggcgctacgcgggttaccccattaagtttcgcttcgcgctccggcagttgctgagggttcaccgacccctgtttggcgctaagaatggcctgtggcatcagccccaggatgttgttttgcagctcgcgttcaaagccgttcatcaccgacaggactgtcaccagcgccattacgccaagcgtaataccgatagttgagagccaggagacgaaacgaccgaagcggtcggctgcgcgcccgcgcatatagcgtaggccgataaagagtgcggcaggttggtacatgtcatccatctggttgctgatagccgatgcccgagtatataagcgattaggggcagcgtaaacgactgatacatgacgactttattagcaacaaacctaaaaaccaagtaaatacaaacggatagataagtacttacttatttatctttacgcttatcgacagcgctgacctttcttcacccaatacgcgatggcaattcgggttggcgaatccagaccaatcgcggataatctcactattgaatatcagcgagttgccctccatatcggcagagcgaatccctaagagatcatgaaaccgtctatgcctgaacaatatcgatactcattgccggtcaaagccggcgatcagcgccagcttggcgagttgaccggcgcagcctgcgccaccctggtggcggagatggccgaacgccacagcggcccggtggtgctggtggcgcctgacatgcaaaacgcgctgcgtctgaacgacgagatcaggcagtttaccgacagcatggtgatggggctggcggactgggaaacgctcccttacgacagcttctcgccgcatcaggacatcatctcctcccgtcttgccaccctttaccagttacccaccatgcagcgcggcgtactgatcgtcccggtcagcaccctgatgcagcgcgtctgtccgcacagcttccttcacggccacgcgctggtgatgaaaaagggccagcgcctgtcgcgcgatgcgctgcgcgatcagctggagggggccggctaccgccatgtcgatcaggtgatggagcacggcgaatatgctacccgcggcgcgctgctcgacctgttcccgatgggtagcgatcagccctaccgccttgatttctttgacgatgaaatcgacagcctgcgcctgttcgacgttgacagccagcgcacgctggaggaagtggcggccattaacctgctgccggcgcacgagttccccaccgaccagaccgctattgagctgttccgcagccagtggcgcgaccgctttgaggtgaagcgcgatgccgagcatatctatcagcaggtcagtaaagggacgctacctgccggtatcgaatactggcaaccgctgttcttcagcgagccgctgccgccgttattcagctatttcccggccagcacgctgatcgtcaacaccggcgatctcgaggccagcgcggagcgattccagaatgaagcccgcgcccgctttgaaaaccgcggcgtcgacccaatgcgcccgctcctgccgcctgagctgctgtggctgcgcagcgatgagctattcagcgaactgaaaaaatggccgcgcgtgcagctgaaaaccgaacgtctggcggacaaagcggcaaatactaatctgggctaccagacgctgccggacctcgccgtccaggcgcagaacaaagcgccgctggataatctgcgccgcttcctcgagtcctttaccggtccggtgatcttctcggtggaaagcgaaggccgccgtgaagcgctgagcgaaatgctggcgcggattaaagttgcgccaaaacatgtgctgcgtctggaggaagccaccggcaacggccgctatctgatgattggcgccgccgagcacgggtttatcgacagccagcgcggcctggcgctgatttgcgagagcgacctgctcggcgagcgggtggcgcgccgtcgtcaggattcgcgccgcaccattaaccctgacactctgattcgcaacctcgccgaactgcatatcggccagccggtcgttcacctggaacacggcgtgggccgctacgcgggcatgactaccctggaagccggcggcatcaccggcgaatatctgatgctaacctacgccaacgatgccaagctatacgttccggtatcgtccctgcatcttatcagccgctacgccggcggggcggaagaaaacgcccccctgcacaagctgggcggcgatgcctggacccgggcgcgacaaaaagcggctgagaaagtacgcgacgtggcggccgagctgctggatatctacgcccagcgcgcggcgaaggcgggttttgcctttaaacacgaccgcgaacagtatcagctgttctgcgacggcttcccatttgaaaccacgccggatcaggcgcaggcgatcaacgccgtcctcagcgatatgtgccagccgctggccatggaccgcctggtatgcggcgatgtgggcttcggcaagaccgaagtggccatgcgcgccgccttcctcgccgtggagaaccacaagcaggtggcggtgctggtgccgaccaccctgctggctcagcagcactatgacaatttccgcgatcgtttcgccaactggccggtacgtatcgaaatgctctcccgcttccgcagcgctaaagagcaggcgcagatcctcgagcaggccgcggaaggcaaaatcgatatcttgatcggcacccacaagctgctgcagagcgaggtgaagctgcgcgatctcgggctgctgatcgtcgacgaagagcaccggtttggcgtgcggcataaagagcgcatcaaagcgatgcgcgccgatgtcgatatcctgaccctcaccgccacgccgatcccgcggacgctgaacatggcgatgagcgggatgcgcgatctgtcgatcatcgccacgccgccggcgcgccgcctggcggtgaagaccttcgttcgcgaatatgacgccctggtggtgcgcgaggcgatcctgcgcgaaacgctgcgcggcggccaggtctactatctgtttaatgacgttgagaacatccagaaagccgccgacaagttggcggagctggtgccggaggcgcggatcgccatcggtcacggtcagatgagggagcgcgaactggagcgggtgatgaatgacttccatcatcaacgcttcaatgtgctggtgtgcaccaccatcatcgaaaccgggatcgacattcccaccgccaacaccatcatcatcgaacgcgccgaccattttggcctcgcccagctgcaccagctgcgcggccgcgttggccgttcgcatcaccaggcctatgcctggctgctgacgccgcatccgaaagcgatgaccaccgatgcgcaaaagcgcctcgaggccattgcgtcgctggaagatctcggcgccggctttgcgctggcaacccacgatctggagattcgcggggccggggaactgcttggggaagatcagagcggtcagatggaaaccatcggtttctccctgtatatggagctgctggagaacgcagtcgatgcgctgaaagccgggcgtgaaccctcgctggaagatctcaccagtcagcagacggaggttgaactgcgcatgccttccctgctgcctgatgatttcatccctgacgtcaatacgcgcctgtcattctataagcgcattgccagcgccaaaaacgaacaggatctggaggagatcaaagtcgagctgatcgatcgttttggccgcctgcccgatgccgcccgcaacctgctggatatcgcccgtctgcgtcagcaggcgcaaaagttagggatccgcaagctggaaagcaacgaaaaaggcggcgtgatcgaatttaacgagaaaaacaacgtcaatccggtgtggctgatcggcctgctgcaaaagcagccccagcacttccgcctggacggtcccacgcgcctgaagttcatgcaggacctggaggagcgtaaaacgcggatggactgggttcgccagtttatgcgccagctggaagagaacgccgtcgcctgactggcaggagatacggccccgctgccgtatctcccttcccacatacctcgcaatctttacaaacattttgcaatccgcctggatttccccacacagactcacgccataatctcatctgcttttcgtataaaaataaccacttacatattttggagttatggtaatgagaaaccgtttccccgtgacgctttggctgacgctagtcgcgttagtcgccgcgctggccctccccgcgcgcgctaacacctggccccttcccccgccgggcagccggctggtgggtcagaatcagtttcatgtggtacaggatgacggcggttcgctggaagcgattgccaagaagtacaatgtcggcttcctggccctgctgcaggccaatcccggggttgacccctatgttccgcgcgccggcagcgtgctgaccatccccctgcagacgctgctgcccgatgcgccgcgcgaagggctggtgataaacctcgccgaacttcgcctctactattacccgccgggcaagaatgaagtgaccgtctacccaatcggcatcggccagctgggtgggaccaccatcacaccgacgatggtcacaaccgtgtccgacaaacgggccaatccgacctggacacctaccgccaacattcgcgcgcgctacaaggctatggggattgagctgccggcggtagtgcctgctggtcctgacaatccgatgggccatcacgccatccgcctcgccgcctatggcggagtctatctcctgcacggcaccaatgccgatttcggcatcggtatgcgcgtcagttccggctgcattcgtctgcgcgataacgatatcaaggcgctgtacaacactatctcgccgggcacgaaggtgaacattatcaacacgccgatcaaggcgtcggttgagccggatggccgccgtctggttgaggtccatcagccgctgtctgagcatatcgatgacgacccgcagaccctgcccattacgcttaatgcggccatgactgcgttcaaacaggcgccgcagaccgacgggacggtgatggagcgcgcgatgaattatcgctcgggcatgccgattgacgtcacccgtcatgctgagcctggaccgcagtcgctgtagtcttacgctgcacaaaacaaaaaacccgcctgatggcgggttttttgttggcaagggtcaaacaggggtacaacagggtcttactcatcgccgtccggtgaagggggccgggcagcgacgcatcgggcttacttgtagataacggcggtaccgtgaagggtattcggaccggttaccgaagtaatacggtatgaagtggcgcccatctcatccgctttctgcgccagctggtcttccagcgagcccaggttagtcccggcagaagcagagatggtgcctactttatgctgtcctgcaggggtggactgcacctctacagcggcaaagctggcgaaagaaagggaacttaaaacggcggcaatagccagagtattaacggttttcatgattattatacctgtgcagatgaattttatagtagggtcgcaagcattaacttaacgatcgataggtaaataataatgtgatctatatcacacgtcaatgcatttttataacgatcgtttaactatttataaaatgcttaaatttcatacatatatgaattatttatttttaaaccgacagcgctggccccggcgatcgtttatttttataatggcctttcaccaaaccaacataggtacaacggcaccatgacaactgacgttcaaagttgcgccaaaaaaagccgtggccgaccgaaggtgttcgacagggatgcggcgctggacaaagccatgacactcttctggcagcacggctatgaggcgacctcgctcgccgatctggtcgaggcgacaggagcaaaagcccccaccctgtatgcggaatttgtgaataaagaaggcctattccgcgcagtgttggatcgttacatttcgcgctttgccgcgaagcacgaagccgtgctgtttgccgagggaaaatccgtcgatcgcgcgttgcgtgactacttcacggcggtcgccacctgctttaccagcaaagagacgccggccggctgctttatcatcaatacctccgccgcgctggccgcctcctcgacggatatcgccaataccatcaaatcccgccatgcgatgcaggagcaggcgctaacccagtttctgcagcagcggcaggcgcagggcgaactgcccgcgggccgcgatgtcgcgcagctggcgcaatttcttaactgcgttctgcaggggatgtcgattagcgcccgggaaggcgcggatttcgacaagctgatgcaaatcaccgacaccactctccgtctctggccgcaggtcctcgagtcctgatgcgccctgcttccggcggtattctgccgccggatccgctctcctgttggctttatccccacaaaatagattgatttttattatcttttctcgcgcaagataaacgcaaatgatattgattgcgatattcattatgtgcaaaatccttttttgagtttttccagatgtttcgcattgtaacgaataccggccgacgccggcccataacaacgacaaagcaacttgctcataaaaggaatggatatgaaaaagcgcctctgggtgctccaccctctgctgctggccagcacgctgcctgcgctggcggctcagtctgatgaagacagcatcatcgttagcgcaaaccgcacccatcgcaccgtggccgaaatggcccaaaccacctgggtcattgagggccaggagattgagcagcaggtccagggcgggaaagagttcaaagacgtgctggcgcagctgatccccggcatcgacgtcagcagccaggggcggaccaactatgggatgaacatgcgcgggcgcgcgatcgtcgtgctgattgacggcgtccggctcaactcctcacgcaccgacagccgccagctcgacgccatcgatccattcaacatcgaacatatcgaagtgatctccggagcgacctcgctgtacggcgggggcagtaccggcgggcttatcaacatcgttaccaaaaaggggcagcaggatcgtcaggtcgatcttgaggtgggcagcaagagcggttttgcgaacagcaacgatcatgatgagcgcgtcgcggcggccgtcagcggcggaacagaccacgcatccggccgcttgtcggtagcctatcagcgtttcggcggctggtacgacggcaataacgatgcgctgatcctcgataatacccaaacggggctccagcactctgaccgcctcgacgtaatggggacggggacgattgagatcgatgataaccgccagctgcaactggtcacccagtattataaaagccagggcgatgatgactacggtctctggctcgggaagaacatgtccgcggtcaccagcggcggcaaagcgtataccaccgacgggttcaattccgaccgtatccccggcaccgaacgccatctgatcagcctccagtactccgatgccgactttttcggccagaatctggtgagccaggtgtactatcgcgatgagtccctcaccttctatccgttcccgacgctcacgaaaggtcaggtcagtagcttctcctcgtcgcagcaggataccgatcagtatggggccaagctgaccctcaacagtcaaccgctggcggggtgggatctcacctggggtctcgacgccgatcatgagacctttaatgccaaccagatgttcttcgatctgccacaatcgatggcctccggcgggttgcacaacgaatcgatctacacaaccggccgctacccgggatacagtatttccaatgtcgcgccattcctgcagtccagctacgatctgaacgatatctttaccgtcagcggcggggtacgctaccagtggaccgaaaaccgggtcgacgactttgtcggctacgcccagcagcaggatatcgccaacggcaaagcgcgctccgccgacgccatcaaaggcggcaaaaccgattacgataacttcctgtttaacgccgggatcgtggcccacctgaccgagcgtcaacaaacctggtttaacttctcgcagggtgtcgagctaccggaccctggtaaatactatggcatcggtaaatatggcgctgcggtgaatggtcatctgccgctgatctccagcgtcaacgtcgatgactcgccgctgcaggggatcaaagttaactcgtacgagctgggctggcgctacactggcgataacctgcgcacccagctggcggcgtactactcgacctcggataagaccattgtcgtcaaccgcaccgacatgaccatcgacgttcagtccgacaaacggcgtatttacggcgttgagggggcggtcgactactttattccggatagcgactggagcgtcggcggtaacttcaacgtgctgaaatcccaggtgcagaccgacggccgctggcaaaaatgggacgtcaccctcgcctcgccgtctaaagccaccgcctgggtgggctgggcgccggatccgtggagcctgcgcgtgcagagtcagcaggtatttgacctcagcgatgccgccggtaacaagctggaaggctataacaccgtcgattttatcggtagttacgcgctgccggtggggaaactgaccttcagtatcgaaaacctgcttaacgaagactatgtcactatctggggccagcgcgcgccgctgctctacagcccaacctacggcagttcatcgctgtatgagtacaaaggtcgtggccgcacctttggtctgaactatgccttaaccttctgataaaaaaagcccctcagcctgagcgattgaggggctaatcactacacaaatctgtttttagattttgttgttcaggaccagctggccgttgttgtccagcgggatctggctgccgggatcgtgatccatgcggattttcccctgctgatcgcctatcttataggtcacatcgtagccgagcattttatcggatttgtcatacaccgttttgcagcgctgctgggtggtggtgtaggtatcgttgtcctgcatcgcgccctggatctggttgcctgcatagccgccgcccagcgcacctacaaccgtcgccacgctgcgtccgtgaccgccgccaaactggtggccaatcaccccgcccgccaccgcgcccagcaccgaaccggcgatgcggttttcatcctgtaccggacgacgatgagtcaccgtgacattgcggcattcctgacgcggcgttttcacggtttccttaatcggtgtactggagaccacttgcgcatactgcgggccgcgatccaacacgttgagaccagcgacagctgcaacgcccagcgcggcagccacgcctatccctatacccgccaacatagatttattcacgggagttcctcctttgttgctgttgatacaattttgcaaccggagccgggagggcgcaaatcagatagcggatgaaaagtgcgagaattcgctgcaaatcaaagggattcagaggattccgagcgggatctctgcggtttcagcagaagagcccggaggcgccctcagagcgcgcctccgggtcgcgacagcgattagtgcagcttcaggcgcgggcgaatgatgcggttgatgcgcccgaccagcatcatcaggccggtcttgaagtaaccatgcagagcaatctggtgcatacggtacagggagatgtacacgaagcgcgcaatgcgcccttccaccatcatcgaaccgcgcatcaggttacccatcaggctgccgacggtggagtaatttgacagcgacaccagcgagccatggtctttataggtgtatgccttcagcggtttgcctttcatctgcgccaggatgttgttcagcgcgcaggtagccatctggtgcgccgcctgggcccgcggaggcacaaagccgccttccggacgggcgcaggaggcgcagtcgccgatggcgaaaatatccgcatcgcgggtagtctgcagcgtcggctcgaccaccagctgattgatacggttggtttcgaggccgccgatctctttcatgaaatctggcgctttgatccccgccgcccagaccattagatccgcctcaatatattcgccatctttagtgtgcaggccgcccgcatccgcgctggtgaccatggtctgcgtcagaacccgtacgcccagcttagtcagctcattatgcgctgccccggaaattcgcggcggcagcgcaggcagaatgcgctcgcccgcctcgaccagcgtgacgttcagcgcttcgttggtcagccctttgtagccgtagctgtgcagctgtttcaccgcattgtgcaactcagcggagagctccacgccggtggcgccgccgccgacgatggcgatatttactttaccgttagcgccgaggttagcagagtatttaaggaacaggttgagcatttcctgatggaagcgacgcgcctggtgcgggttgtcgaggaaaatgcagttctcttttacgccaggggtattaaagtcattcgaggtactgcccaacgccatgaccagcgtgtcgtacggcagtttacgctcagccaccagcagctcgcctttttcattgcgcagctcgccgagggtgatggttttcccttcgcggttgatatcaaccaccgagcccagctggaactggaaaccgtggttgcgggcatgggccagatagctcagcgcatcaacgccttcatccagagaaccggtggccacttcgtgcagcagcggcttccacagatggctgtggttacggtccaccagagtgattttcgctttcttatggcgccctaactttctccccagctgagttgccagttccagtccgccagcgccgccacccacaattacgatttttttcaatggcgtagtcatgtgtacccctaaaattattaaccaattgttaaataaaagttattgaaatagcctttatttaacaacaagttacgttaatgaaaccattcagcactgtcgagaataccatgaacggtgcattggtcataccaaaattgatgtgcatcaagttttgtcgcgtattttttcagcgaaaccaataagtgtagacatgaaaaaacccgcgtggtgaacccgacgcgggtttgggaacaagggaaaagcagttagccgagggttttaaacgctttcagccgctgcagatgcggcgagatatttttaaacttatgggtctgctcttcatcccagataatttcataatagtggtgcaggagatcggcggaacgctggctgtccaacgcctcgtcctggcgggaaagcaccaccaggcagcgatcgcggttcttctcgcggaagttggtcacgcacttggtggcgatgtcagcatactcttccggtcggtcgattttgccttccatgttctcatgcggaaacaggtttggattgaacaccgcctggcggatatcgcacagaaaaccaatccgctccgcccagtagccgccaaggccgacgccgcagatcagcggccggtcatcggcagtgagctgcagcattttatcgacctctttcagcaaatgctgcatatcgtgcttgggatgccgcgtgctgtagctaatcaaccgcacgtccgggtcgataaactgcagctgcatcaccttctcatggttaccggggctgttcgagtcaaaaccgtgtaaatagataatcatcgcatcctcaccagacaacaacgccccgtagagcgttacgcggacttcgcctcttgccagcgcgcatgaagctgctccagctgggcactcaccgttttccaacgggctgaatcccttaactcctgacgggaaaaggaacctttatgatacaatttcgtaacacgctctgctttgatcggcgacaggttatccagcacactgaccgcgcctttacgattattgcagacgaggatcatatcgcaaccggcgtcgagcgatgcctgaccgcgttcggcatagctgcccatgatcgccgccccttccatcgacagatcgtcggagaaaatcaccccgtcaaagcccagttcgccgcgcagcaccgttttcagccagtacgccgagccgctggccggacgcggatcgagctccgggtaaatcacatgcgccggcataatggcatccagacgctgctcggcgataaggcttttgaacaccgccatatcatggtcgcggataaccgatgccgcccgcggatcgaacggcgtctctttgtgcgaatcggcagtcaccgccccgtgtcccgggaagtgtttgccggtggttttcatgcccgcggcgtgcatcccgtcaatgaagtgacgcgccatcgtcagcgctttctgcggatcttcatgataagaacgttcgccgattgcggcgctgatatggccgacgtccagcactggcgcaaaactaatatcgatatccatggcgatcatttcgctggccatcagccagccggcttcggcggccagtttgcccccctcttccatccccagcagcgcggcgaaagactgggccgccggtaaacgggtaaacccttcgcggaaacgctgaacccgccccccttcctgatcgaccgccaccaccaggtggttccgggaggcgtcgcggatctggcgcaccagctcgcgcagctgcgccggatcgtgataatttcgggtaaagaggatcaaccctcccaccagcggatgcgccagaatttctcgctcttccgcatccagctcatacccttcgacatccaacatcactgggcccacactgacctctcttatcctttacgttcgttgtctaactgacaccatgtttcatctgccagcgtgataaattgccggtccccgctctgccgccagcgcatttcataccagcccgccatcaacagcagtacccacgggcgccagagtacaacctgccgccaaagcagctgcgcgtcgatggccgcccgccgggcatacgcttctaccagccgacggcgctcgccaggcgtgatccacaccgcggccagctccagcgcgatatcgccatcgccggcatattcccagtcgatcagcctcaggccggactcattatgaataatattgccggcatggacgtccatgtgcagcggcgccagccgcaggggacggggctcgccctggcggcgcagccgctgatgccagcgcagccaacgcggcttgcgccgcgccggatcgcacctctgccagtactgggccagcagtggtgtgaggctaacccgccagccaaaccgcggttgctgatgcaaatcatacaataagcctgacagctgcggggaggccggtaactcgcttttcacctcccctgtgcaatactccaccaccatccagcagggtgagtaaaacagcggggttggcgccagcctggcaggcagtcggcggagtgcgtgatactgacggcgaaaatggtaagtggcggcagacggatcgtgcggctgacgcagcacgtgccgccggtcgccgtcgctgataatcacactgccgccgctgaggccactctggctcagcgaggcgacaggatgataatggggaaagaagcgcgacaagagctcgtcgcgcgttagcttattgttgctgaacagcacctttacctgaccagattatctcaccggtttgcaccagcatgagctgcattttcagctcaggcgcgttgacgttgccggtggcattggagtaaagcacatactgcgcgcccacgttgcgggcgatgcccatggctttgctgcggctgccaaggctgtcctgcggcgacaggcccagctgctgcttggcgaccgccagctgctgcgccgataccagggtaaatttgccgttaccggccagcgcactacgtagcgcagtggtggcttctccagcattcagcgaaccgttggtgcggttgttcacgctgtcaaccagcagaatactgccggcattgaccccactcgcctgcagcatctgccccaccagcggctgaaccgcgccgttccagtcataatgacgcacgcgcggcgccggctgacccgactgctgatcctgatgctcaatcggcccaggctgcgccgggacagagggcaccgccggtacagtcggcaccgtgggctgcggctgcgcaggctgctgcggctgcggtttggcctcttctaccggcgcgggctgctcccgcaaccccgcacagcctgcgaggaatatcgccagtgctgtgattaacgcatagcgacacattttcatcattataattaccccttacagataaagataaaggcgggccttatgcgcccccaggatattggcgctgccatataacgtgaccgaggagcgggccggtaccacgatggtgcgcggcgcgtccagcggatgcatctccagccctcgggcgtcataccagaaaaaacgatagtgcacggtaaccggctgctggcgctcgttatatagcgttgaggaggcggtagcctgaatctctgtcgccacgacggcaggctcgctggcgctgatccccgccgccagcacgctcgactccatcaccagcgcctgctggtcagaaaccggaatctccggatgtgaactacacccggcgagtagccccgccgccagacacgcgcccaaaagggtcctgagcatgacgttagcctttgtgcgccagcatcgggccaagcggacgaccgcccagcagatgcatatggatatggtacacttcctggccaccgtggcggttgcagttgacgatcaaccgatagccatcgtcggcaagaccttcatcgcgggcgatcttcgccgcgacggtcatcatccggcccagcgccagctcatgttcagcggtgacgtcatttacggtaggaatcagaacattcgggacaatcagaatatgggtgggcgcctgcggggagatgtcgcgaaaagcggtcacaagctcatcctgatagacaatatccgacgggatctcccggcgaatgattttgctgaaaatcgtttcttctgccatgactgattccttataagttttatcccgtgcgctggcctgcttctgcagataaacgcggacgcacaggttccgctaagagtatgagcgacattctccctctctttcaacctgaaagctctttttcttattcaactatagacttagctgctgagggaataagcatatggcggactgttttcagggttatcgcttgtggggcaccgactttagcgcataaaaaaggcagccagttggctgccttagtctccccgatactacgtcttaactgttacggatgtactcatccatttcagttttcaggttatcggacttggtaccgaagatggcctgtacgccagaacctgccactaccacgccagcggcgcccagttttttcaggccagcctggtcaactttcgctacatccgccacgctaacacgcagacgagtaatacatgcgtcgaggttggtgatgttctctttaccgccgaaagcggcgaccagagccggagccatctcgctggtggcgccagctttgctctcttcggtggtgtcttcacgacccggtgttttcagatccagggctttaatcagcacacggaaaatgacgtagtacacgatcgcatagcagataccaacaatcgggaacagccacagtttgctgctgttaccggacagcacgataaagtcgatcaggccgtgagagaacgaggtaccgtcacgcatacccagcaggatacagatcgggaacgccaggcccgccagaatggcatggataacgtacaggatcggcgccacgaacatgaacgagaactcgatcggctcggtgataccggtcaggaacgaggtcagcgcggcggagatcatgataccgcccactttggcgcggttttccggtttagcagagtgccaaatcgcgatagccgctgccggcagaccatacattttgaacaggaagccgccagacagtttgcccgccgtcgggtcgcctgccatgtagcgcgggatatcgccgtggaacacctgaccagccgcgttggtgtattcgccgatctgcatctggaaaggaacgttccagatgtgatgcagaccaaacggcaccaggcaacgttcgatgaaaccgtagataccaaacgccaccactgggttctgataagcagcccactgggagaaggtttggatcgcggagccgatcggcggccaaatgaaggagaggatcacgccggtgaagatagcggccagaccagagataatcggcacaaaacgcttgcccgcaaagaagccgagatattctggcagcttgatgcgatagaagcggttgaacatgtaggcggcgatagcaccggagataataccgccaagcacgccggtatcagcaaggtgttttgccgcaatctcgtcagcaggtaaatgcagcaccagcggcgcaacaaccgccatggttttcaccatgatgccgtaagccacgactgcagccagtgcggatacaccgtcgttattggtgaagccgagggccacaccgatagcgaagatcagcggcatattggcgaaaactgaaccgcctgcttctgccataacgtgggagaccacggctggcagccagctgaagttagcggaaccgacgcccagcaggatacctgcgataggcagtacggataccggcagcatcagcgatttaccgaccttctgcaggttagcaaatgcattcttaaacataattgagagtgctcctgagtatttggtacttttttacgctttcacgcattggcccggggggagaaccgtgccgtggacaggacatctaagcgccctttatttattacacagagtaaaataattaacgggatgattgtttgacggctatcacgtttcaatcagccttccggtaaaaatttacatcaacttacataaattgtatccagatgttgctaaaaaaccttcaccgccacttttgtggcggtgaactttactcgctttggctattaattacgagccttaaaataataagcagatcaagcaggttgcaaacgggcggggtcgatgtggaacagggtggcaaaattgtcggtggtctgctgagccagctgctcaagcgacacccccttcagtaccgccatatactcggcaacgtcacggaccagcgccggctggttctctttgccgcggtgggggaccggcgccaggtacggcgaatcggtttcaaccagcaggcgatccagcggcacgtagcgcgccgcatcacgcagctgctcggcgttacgaaaagtgacgataccggaaaacgagatatagaaccccatatcgagcagcttgcccgctgtctccctgtcctcagtgaaacagtgtagtacgccaccgcaatccgtcaccttttcttcgcgcaaaatagccagagtatcggcacgcgcgtcacgggtatggacgatcaccggcttattgagctcacggccgatacgaatgtggtcgcggaacgagctttgctgttgggctttagtttccggggtataaaaataatccagaccggtctcccccatcgccacgacgccctcttccgctgccagcgcgcgcagggtctctacctcccagggctcgtcctggtttaatgggtgtacgccacaggagaagacgacgttgtcacgcgtccccaccagttcgcgcatactgcggtagccaggcagcgtcgtggcgacggcgaggcaatatttcacatcgcgtgcggccgcttttgccagcacgtcgtcgacgtttttgtgtagagtttgataatccagaccatcaagatggcagtgggagtcgactaaaaacataatgtctcactcagaggtgggagacgggtaaaaccgtcccgggttgcaggtaatgttcccagcgcagcaggcgctcggtaagcagcagttcgcggttgacaccgacaacgttgagcaattgctcgcggcaggtacagacgtcatgggcaatcgcctgcagccgggcggcgggcaggctgtgcgccagctgctccagcagcggccagacgtcagggttactcaccagggtaatcccctgctgtcgtttttgcgcatcgaccagcagcgacgccagccagtgcaggcgaactgccgcctgttcatgattgagtatcggcagcagcgccagccagtcaccgctcgccagggtagccgccagcgcctgacacaactgctgccgcgccgtccacagcggttcctgtaacagttcgagcgccgcagccggcgcgctggcgcacaggcgtaacgcggtcaacaatgactcctgcggcaggctcacctcacgctccagccaggccagagcataaggctcagacggcggcgccagatgatgcaggcgacagcggctgcgcagagtggtcagcagacgcgccggctcctcgcaggcgaggaagaaccaggtattctccgggggctcctccagcgttttcagcaacgcgttggcggcggcatcggtcagcaaggcagcatcgctaatccagaccacttttgccccaccaaggcgcgcatgttcatagagcttttcattgacatcgcgcaccgcgtcaatacccagcgcgctcttgcccttctcggggctgagcgcatagtaatcggggtgcgtgccggcctgcatcagctgacagctatggcagtggccgcagcttttatgtccttcgggctggcggcacatcaggaagcggcacagcgcgtaaatcaacgcctcgccgcccatcccgttcagggactgtaacagtaaggcgtggtggcctcgtccggcctgatagctaccgaccagttgctcgaacgaggggcgcagccacggataccatttcatgccgcttgctccgccatccactgggcgatcgtggcgcgaatgtcgcgcgccacggcatccagcggctgagttgcgtcaaccgtgcggatagaaggatcggcggcggccagctcaagatagcgcgcgcgggtacggttgaaaaagttcatggactcctgctcaatgcgatccagctcgccgcgggcccgggcgcgctgcagccccacttccggcgtgacgtcgagatacagcgtcagattggggcgaaaatcaccgagtaccgcgtcgcgcagcgtcgccagcatcgtgcggtcaattccccggccgccgccctgataggcctgcgtcgacagatcgtgacgatcgccgatcacccactggccgcgggccagcgcgggcttaatcacggtctccaccaactggacgcgcgccgcgtaaaacatcagcacttccgctttatcgttaatcacttcatcgcccgtggactggatatccagcaccaggctacgcagtttttcggcaaggattgtgccccccggctcgcgggtaaacaccatatcgtgaatacccgccgactgcagcgtctccaccaccagttgacgtgcggtggtcttcccggcgccctccagcccctcgatgacgatatagttactgcgcatttttttccttaagtactttcagataatcctgcaccgcacggttatgactgaccaggtttgtggtaaacgtatggccccctttcccgtcggcgacgaaataaagatatggcgttttcgccggatgggcggccgccttcagcgaggcctcgcccggcaccgcgatagggcccggcggcaaaccgctgatggtataagtattgtatgcggtcggcgtctcgagatccttacgcgttaacttaccagtatatccttcgcccatcccgtagattacggtcggatcggtctgcaagcgcataccgatgcgcaggcggttgataaataccgacgcgacgcggtcgcgctcttccgctaccgcggtctctttttcaataatcgaggccatggtcaacagctggttctgatcggcatagggcagattctccatccgtccttcccagaccttcgccacttcggcgaccattttctgatgcgcgcgcttgaggatggcgatatcgctggtgttggcggtgtacatccaggtatccggccagaaccagccctctacccagtcggcatgctcaagacctaatgccttagccaccgtcgcgtagctatcgtcttcaagcgtgtgcttcacgtacggggcatcgcgcagctggtgcaggtagtcgctgacgcgcatgccttcgacaaagcgcagcggaaactgcgcctctttgccgctggccagcagctgcaacatctcgcgcaccgtcatttgcggcgtgaagcgataggtcccggccttgaagtgagacagctcaggttccacccgcagcagccactggaaaacgcgcgggcgattgatcaccttctcgcgatagagatcctggcccagcgccagccggccggtgcctgcttcgagggtaaagatggtctcttccttaatcagcagcttgctgtccgccagctggcgtaccttccacatgcctgccgccgcggcgatgcccaacagcacgaccagcaacaggataaaacgtaacattttcttcatactaaccagacagctcacacaaaggggctaaaaaatggtaaagctcacgcgaggaccaggtggtctcctcccagcggcgaaccggcaccagcggcatcagcgcattgcagatcagcacttcatcggcctcccgcaacgtctcgggacgcgctgtcacttcgacaacgcgaaacgtcgatggtgccagctgcgcgatacagcgctgccgcataatgccgttgaccccggcataatcgagtcgcggagtaaatacatcacgtccctgacgccagaataaattcgcggcacagcattccgtaagccacccgtcactgtcaaggaccagcgcctcatcggcgtccgtctgctcaagatgagagcggatcagtacctgctcaaggcgattaaggtgcttcaggccggcaagccaggagttgcgccccaggggcaccggactctgggtcagagtaatgccctcctcccgccagcgcgcataatgcgccgggtatggcgagaagctgagaatgcgagtgggcgacacgcagcctgccgtactgtatccccttcccccaacgccgcgggtgagagtcaccttgagcacgccctgcgcgtgcggccgagccagacgctgcatctcttcgctcagcgtcagccagtcgttaaatgggatatgtaatttttcacaggttgtctgtaaacgctgcagatgggcgtccagtagcgcaacctgcccttgctggatgcgggcggtggtaaaacagccgtcgccaaactgggtggcgcgatcgttcgctgccaacgtgtcctgtacaacgccgtttatcaagaacataaaggactccttttcactggtcggtcagtgtgtcaggacccagagcagagaacaaggggagaaagctgaataaaaaaggcccgacgaacgggccttttgttaaagcagtgccggggcaagccctgtcacacttttttgaagatcagcgaaccgttagtgccgccaaagccgaaggagttgcacagggtgtactccataccggaaacctgacgcgcttcgtgtggaacgaagtcgaggtcgcagccttcatccgggttgtcgaggttgatcgtcggcggaaccgcctgatcgcgcagcgccaggatagagtaaatcgactctaccgcccctgccgcacccagcagatgcccggtcatggatttggtagagctcactagtacgcggctcgccgcatcaccgaagacagacttaaccgcctgcgcttccgctttatcgccggccggcgtcgaggtgccgtgggcgttgacgtagccgatctggcccggttcgatgcccgcatcgcgaatagcattcaccattgccagcgctgcgcccgcgccatcttccggcggtgacgtcatgtggtaagcatcgctgctcatgccgaagccaacgatctcggcgtagattttggcgccgcgttttttggcatgctcgtactcttccagcaccaccatacccgcgccgtctcccagcacgaagccgtcacgatctttatcccacggacggctcgccgcctgcgggttgtcattgcgcgtggagagcgcacgcgccgcgccgaagccgcccacgccaagcggggtgctggctttttccgcgccgcctgccaccatcgcatcggcatcgccataggcgatgatgcgcgcggcctggccgatgttgtgcacgcctgaagtacacgcggtcgcgatagagatacttggcccacgcagaccaaacatgatggtcagatgtccggccaccatgttaacaattgtggaaggaacgaagaatgggctgatcttgcgcggtccgccgttaaccagcgaactgtggttttcttcgatcaagccgagaccgccgataccggagccgatagcggcgccaatacgggttgcattctcttccgtcacttcaaggccagaatcctgcatggcctgaacgccagcgacaattccatattgaatgaaggcatccatcttgcgctgttctttgcgcgagataatgtcatcacagttaaaatcctttactaagccagcaaatttcgttgcataggcgctagtatcgaaatggtcgatcaggctgatgccactctgaccggcaaggagagctttccaggtagactctacggtattgccgacaggagacaacatgcccagtccggtcacaactacacgacgcttagacacgtttgtcctccagggagggaaaatagattcttgtgggacaataaaaagataaaactcaggcggtcgaatgaccgcctggagatgttcacttacgcctggtggccgttgatgtaatcaatggcagcctgaacggtggtgattttctcagcttcttcgtccggaatctcagtatcaaactcttcttccagagccattaccagctcaacggtgtcaagagaatcagcgcccaggtcttcaacgaaggaagcattgttggtaacttcttcctgcttaacgcccagctgctcgccgataattttcttaacgcgttcttcgatagtgctcatactcttaaatttcctatcaaaactcgctttcgcgatggttttcgtagtgtataaaatgttgaaaaatttgcaactaaatcccggcaggtcttaccacgattttgcgctattttgaggccgtttgccctaagaacgcaaatcttttcgcacaaaaccgcacagagaaccgtgcgaagtgcgcggttcctgaacgttttgcacaaatctcggtcagaccatgtacattccgccgttgacgtgcagcgtttcaccagtgatgtaacttgcttcgtcagaggctaaaaatgcaaccgcgctggcgatttcatttggggtgccaaggcgccccgcaggaactgccgccagcgtacccgcacgctgctcatcggtcagcgcacgcgtcatgtccgtttcaataaagcccggagcaacaacgtttacagtaataccgcgggacgcaacttcacgcgccagtgatttactgaagccgatcagacccgctttcgccgcggcgtagttggcctgacccgcatttcccatggtaccaaccacagaaccgatagtgataatacgtccatgacgctttttcatcatagcgcgcattaccgcttttgacagacggaaaaccgatgacaggttggtttcgataatatcgttccactcgtcatctttcatgcgcattaacagattgtcgcgagtgatcccggcattattcaccaggatatccacttcgccaaactctgcgcgcacattttccagaacagattcaatagatgccgggtcggtcacattcaacatcagacctttaccattggcgcctaaatagtcgctgatcgcctgcgcgccgctttcgctggtcgcagtacctataactttcgcgccacgggcgacgagcgtttcagcgatggcacggccaataccgcggcttgcaccggtaaccagcgcgatttttccttcaaaactcatggttttcctcttttattgctcaagcgccgcagacatcgccgccggctcgttaagcgcggaagcggtcagggtgtcaacaatacgtttggtcaggccggtgaggactttacccgggccaacctcatacagatgcgatacgccctcggcagccataaactcaacggttttggtccactgcaccgggctgtacagctggcgcactagcgcgtcgcgaatggcgtccggcgcggtttcgcacttcacgtcgacgttattcaccaccggaatcgtcggcgcgttgaaggtgatcttctgcagctctaccgccagtttttctgcggctggcttcatcagcgcgcagtgggacggcacgctcaccggcagcggcagcgcgcgtttggcacctgcggctttacaggcggcgcccgcacgttcaacggcctctttgtgcccggcgataaccacctggcccggggaattgtagttcaccggagagaccacctgcccttcggcagactcttcacaggctttggcgatagcggcgtcgtccagaccgataatcgcggacatggcgccggtaccttccggtacggcttcctgcatgaatttcccacgcagctcaaccaggcgaacggcatcagcgaaaccgataacgcccgcgcataccagcgcggagtattcgccgaggctgtgacccgccagcagcgctggcgctttgccgccctgctgttgccagacgcggtacagcgccacggaggcggcgagcagcgccggttgagtctgccaggtcttattcagttcttctgccgggccctgttgcgtcagcgcccacagatcgtaacccaacgctgcggaagcttcaccgaaggtctcttcaatgaccggccaggcggcagccatttcggccagcatgcctacggcctgagagccctgccccgggaacacaaatgcgaattgcgtcatgtttaaatccttatactaaaaacgaaccagcgcggaaccccaggtgaaaccgccaccaaaggcttccagcaaaatcagctgaccgcgctgaatacggccatcgcggacggcctcatccagcgcgcaagggactgacgccgcggaggtgttgccatggcggtcgagggtcacaacgacgttatccatcgacatacccagtttcttcgccgtcgcgctgataatacgcaggttagcctgatgcggcaccagccagtccagcgctgaacgttcaagattattcgctgccagcgtctcatcaacgatgtgcgccagctcggtgaccgccactttgaagacttcgttgccggccatcgtcagatagatcgggttttccggatcgacgcgatcggcgttcggcagggtcagcagttcgccatagctgccgtcggcatgcagatgcgtcgagataatgcccggctcttcggaggcgcccagtacaaccgcgccggcgccgtcgccgaaaataataatcgttccgcgatccgccggatcgcaggtgcgcgccagcacatcggcgccaacaaccagcgcataatctaccgcgccgttcttcacatactgatcggcgacgcttagcgcataggtgaaaccggcgcaggcggcggcgacatcaaacgccgggcaacccttaacgcccagcattgactggatctggcatgcagaactcggaaacgcgtgcgtgccggaggtggtcgcaacgataatcagaccaatttgctccgcggacacgcccgccatcgccagcgcctgctttgcggcttcaaagcccatcgtagcaactgtttcatgcgctgcggcaatacgacgctcacggatacctgtgcgggtgacaatccactcgtcagaggtttctaccattttttccaggtcggcgtttgtacgcacttgctcgggcagatagctgccggtaccaataatcttcgtatacatgtacgctcagtcactcttgggtgatatacccgcctcgttcaaccgccgcggcgtcaatcgtggccattcgtcccgctttgctgtcgggcgttcacgtcactgtcgctttccggcagctcgaaaccagctgggtataaagattccaggcgcgcggcgatccgctgagggatctgccgctgcaccgcctgcactgcctgctctatcgcgacgctaaaggcgcgttgattggcagcaccatgactcttgatcacggaaccgcgcaatcctaacagacaggcgccattatactggtcggggttgaggtgactgaatcgcctcgccaggcttttttgtaaccaacgttttagtaacagcagccaccacgaccgttttttgccctctccctgagatttcagcagtgaaaggaacattctgacaacaccttccatggtttttaatgtgacgttgcccgtgaatccatcacaaaccagcacatcggtttttccggtcaacagttcattggcttcaagatagccgatgtagttgagggaaggcagcgttttgagcactgcggcagcatcgcggatgctgccgaggcctttcatctcttcttcgccgatattcaacaaagcgacgcgggggttggcaatgccgaccacttcttccgccagcaccgcgcccattaccgcgaactgcaccagcatcgtgctgtcgcaatcgacgttggcgccgagatccagcaccacggttttgcccttctgctggtgcggtaaaaccgtcaccagcgccggccgctcaataccttcgatcggtttgagcagcagtttcgccagccccatcagcgcgccggtgttgccagcgctgacgcaggcttgcgcccgcccttctttcacaagctccagcgccacgcgcattgagcttccgcgactgctgcggatagcctgcgcgggtcgcgcatcactggcaataactgactgcgcaggaataatctgcagacgcgaacgttgttcgaagtcagctttggcgagtaatggcgtgatggcgtcgggatcgccgactaaaagaagtgtgagttgcgaattagagttcagtgcctgcagtgctgcaggcaccgtcacggatgggccgaaatcgccccccatgacatctaacgccagggttagacgtgtcaaggtatcgtcgctgcccggttcggtgattccccagttgcccggggagtcctcactaagcttcatcacgctggcacccgcgaatattcacgctgcagacgcaacaatccgggcataaatgcccccagcgaccgggttaaccgagtttccagggacgcacacgcccgccatggcctgcaacgggaaatcctgcgagtatcgcgtgattacttagcgataaccttgcgaccgcggtagaaaccgtcggcagtgatgtggtgacgcaggtgtttctcaccagaagttttgtctacagacaggctggtgactgcggtcagcgcgtcatgggaacgacgcatgccacgtttggaacgggttggtttattctgttgtacggccatggaccttactcctcaattacttacgctttaagctggctaatacggcaaatgggtttggtttttgtgcctcttcaggcagttcgccaaagaccatgtccgcgtcggacacttcacagtgttcagaatcatgcaccggaactacgggcagggagaggataatttcatcctcgaccattgcctgcaggtcgatttcaccgaattcgttaacctcaatcggctcatacgcttccggtagtgcttcggcctgttcgtcatttctgacggggctaaaacaatacgtggtgtggacgtgatgggagaacggtttcccgcaacgctggcattcgagagttaccgttacctttgcatcgccagtaataacggcgagacgctggttatcgatagcgaacgacatgctgcattccacatcgctgtccacgctgactacagaatcggttacacgttcaacctgatcgcgggcatagatgccttcgtaatcaaggcgtttttgagccgtgcgtaccggatcaagagtcaggggtaattttaccttttgcatagggcgcgcatattaactttgtaatgtcatagagtcaaagaaaaaggcagcctcaggttgccttttgccatttattcgcacacattgcggcgcatagtttaagatgatgctctgcgaagcgctatatgtggatgaaaaaatatgtctgatcttatcctcgcgtcaacctctccctggcggcgcatgctgctggaaaaactgggtttaccgtttgaatgtgccgcgcctgacgtcgacgaaacgccccggcctgatgaatccgcacgtcagcttgtcacccggctggcgcaggccaaagcgcaaagtctggccacacgcttccctaatcaccttattataggctccgatcaggtttgcgtactggacggtgaaatcaccggcaaaccgcacaccgaggaaaatgcccgcaggcagttaagaaaggccagcgggtcaatcattaccttttataccggactggcgctgtacaactctgccagcggccatctgcaaaccgaatgcgaaccctttgacgttcactttcgccatctcagtgataaagagatagaaggctatgtgcgcaaagagaacccgctgcagtgcgccgggagtttcaagagcgaaggattgggcattacgctgttcgaacggctggaaggccgcgacccgaacaccctggtcggtttacccttaatcgcgctctgtcagatgttgcgccgtgaaaactacaacccgctgttaggctgaggcaaaaaaacggcggaactgattccgccgttgcgcttatttgctcttccgtagcacctgtaaacagtgcttcagctggttgtccagcggcgcctcaacgcgcatcacctccccgctccccgggtgggtaaacttcagcgccgccgcgtgcaggaacaggcggtttaagccggtagcggacagctgcttgtcgaactcgcggtcgccatagcggtcgtcaaaagcgataggatggccggcatactgggtatgaacgcggatctgatgcgtgcggccggtgaccgggctgcagcgcaccagcgtggcgaattcgtaacgctcttccactttaaaacgcgtctccgacggcttgccttcctgactcacgcgaacgatgcgctccccgctctgcagaatattcttcaacagcggggcctggaccactttggtatgcgactgccactggccgcgcaccagcgccagataatctttctgcatgcctttatcgcgcagttgctcgtgcagcgaacgcagcgctgagcgctttttcgccaccagcagcacgccggaggtatcccggtcgagacgatgcaccagctcaaggaagcgcgcctccgggcgcagggcgcgcagcccttcaatcacgccgaagctcaggccgctgccgccgtgtaccgcggtaccagaaggcttattgagcaccagaatatgatcgtcttcatagaggatcacctcagagagcgcggccactttctgcaggtgcggcgataccgcctcttcttcacgctccgccacgcgcaccggcgggatacggacttcatcgcccgcttccagcttatactccggcttcacgcgctttttgtttacccgcacctcgcctttacgcaggatgcgataaatcatgctcttcggtacgcctttcaattgcgtacgcaaaaagttgtcgatacgttgccccgcttcatcagcagcaatggcaaccatttttacggttggggtctcagttttcatggtgcgcgattctaaatagccggacgcattagcgccactcatttttatatgcttatatttatcattatcctgttttcacggtttacctgaccgccattttgtttgttattagaacaatctgtatgggcaggtgataaaactgtgagtaaccgggtgataaaaggtgaaagtcaacttgctataacaaggttagcaatggaataatgagaccgttttccgtattgcatcttgttagaacaagacattagcggaatgaccaattttgtctgaccgatcgcccacgcagcaatggcgtaagacgttgtgatctttcagacagttagcgggctgcgggttgcagtccttaccggtacaggctctatggatttcaagtcgcaggaaggcgtcaactccgggactcccgggagctcatctggatcgccagatcgaggtgagcaggttaagccaccatgcctgcaacgcgaaagacgacgagtataaatggaatattctctggtgatacatcccaggctgttcccctgaataattgcgctgtgtttccgtttgaaacacaggcgaccgacactctgcgcctcttaagcgcgcgacaaccgtgaggttggcgacgtgaaccagacacgaggccatcggttttcccccggaaaggcattactctgcccgcagcttagtcgtcaatgtaagaataatgagtaagttacgatgaaaagaatgttaatcaacgcaactcagcaggaagagttgcgcgtcgcccttgttgatgggcagcgcctgtacgacctggatatcgaaagccccgggcacgaacagaaaaaagcgaacatctacaaaggcaaaatcacccgcattgaacccagccttgaagccgcgtttgttgattacggcgccgagcgtcatggtttcctccccctcaaagaaatcgcccgcgaatacttccccgccaactacaatgcgcatggtcgtcctaatatcaaagacgtactgcgggaaggtcaggaagttatcgtgcagattgataaagaagaacgcggcaacaaaggcgctgcgctcaccacctttatcagcctggcgggcagctatctggtactgatgccgaacaacccgcgcgccgggggaatttcccgccgtatcgagggcgacgaccgtaccgaactgaaagaagcgctggcgagcctggagcttccggacggcatgggcctgatcgttcgcaccgctggcgtcggcaaatccgccgaagccctgcagtgggacctgagcttccgcctgaagcactgggaagcgattcagaaagccgcggaaagccgtccggcgccgttcctgatccaccaggaaagcaacgtcattgtccgcgccttccgtgactacctgcgccaggacatcggcgaaatcctgatcgataacccgaaagtgcttgagctggcgcgccagcatatcgccgcgctgggtcgtccggatttcagcagcaaaatcaaactgtataccggtgaaatcccgctgttcagccattatcagatcgaatcgcaaattgagtccgccttccagcgcgaagtgcgcctgccttccggcgggtctatcgttatcgatagcaccgaagcgctgaccgcgatcgatatcaactccgcccgcgccacccgcggcggcgatatcgaagagacagccttcaataccaacctcgaagcggctgacgaaattgcccgccagctgcgtctgcgcgacctcggcggcctgatcgttatcgacttcatcgatatgaccccggttcgccaccagcgcgccgtggagaatcgtctgcgcgaagccgtccgtcaggaccgggcgcgcattcagatcagccatatttcgcgcttcggcctgctggagatgtcccgtcagcgcctgagcccgtcgctgggcgagtccagccaccacgtctgcccgcgctgctccggcaccggcaccgtgcgtgataacgaatcgctgtcgctctctattctgcgtctgatcgaagaagaagcgctgaaagagaataccaaagaagtccacgccattgttccggtaccgatcgcctcctatctgctgaacgaaaaacgtgccgcagtgagcgctatcgaatcccgtcagggcgatgtgcgcgttattatcgtgccaaacgacgaaatgcaaacgccgcactactccgtcctgcgcgtgcgcaaaggtgaagaaacctcaacgctgagctatctgctgccgaagctgcatgaagaagagatggcgctgccaggcgacgatgagccggcggagcggaaacgtccggaacagccggccctggccgcttttgtcatgccagatgcgccgccagccccgatgctcgaagagcctgccgccgcgcctgtcgccgcagcggcaccggtcgcggccgccgcaccggcgcagcctggcctgctctcacgcttcttcagcgcgctgaagaatatcttctctggcgccgaagaggccaaaccggctgaagttcaggtcgagaagaaagcggaagaaaaaccggagcgtcagcaggagcgtcgtaaaccgcgcgccaacaaccgccgcgaccgcaacgaccgccgtgataaccgcgacaatcgtgacaaccgcgataaccgtgacaatcgcgacacccgtgcggacaatgccgagggccgtgaaccgcgcgaatcgcgtgaagagaaccgtcgcaaccgtcgcgagaagccgtcgcagaacgtggaagcccgtgatgttcgccaaacctcaggcgacgacgcagagaaagcgaaatcccgtgacgagcagcagccgcgccgcgaacgcacccgccgccgcaatgacgacaaacgtcaggcgcagcaggaagccaaagcgcagactcgcgaagagccggttgtgcaggagacggagcaggaagagcgtgtacaaactctgccgcgtcgtaaaccgcgccagctggcacagaaagtgcgcgttgagtccgctgtcgtcgagccagttgccgagatcgtgccagaagccgtagtggctgaagttatcgctccgcacagcgagccggtgaaagccgagctgccggcaggggtggagagcgttgcggaccaggacgaaaatggcgaatcccgtgaagcgaacggtatgccgcgtcgctcacgtcgctccccgcgtcacctgcgcgtcagcggtcagcgtcgtcgtcgctatcgtgacgaacgctatccgacccagtcgcctatgccgctgaccgtagcctgcgcatcgccggagatggcttccggtaaagtctggatccgctacccggtggttcgtccgcaggatcagcagccggaagaggttcaggttcaggacgccagcgtcgcgaaaactgtcgaggctgtagcggccccggttgccgtcgttgaaaccgttaccgctgctccggtcaccgtcgagccggctaccatggaaccagcaaccgctgagccggtagtcgtcgagccggtagcggccgccgagccgctggtcgttgatgctgcggaagttgccgcgccagcagccgtcgagccagcgcctcaggagccggtcaccgaagcaccggctgtcgaagcgcctcaggctatcgcgccagtgacgctcgacgccgagccggtggtggtagaacctgaagcggtggaaacgacgcctgtcgttgcagcgccagtggaaaccatcgccccggccgcagaaaccgtggagcaagcgccagtgatcgaagcggcccctgccgaaccggtcaaagccgagcccccggtgagcaagccggtcgtagtggcgggtcatcgccatgccaccgcgccaatgacccgtgcgccagctccggactatgtcccggaagcaccgcgtcacagcacctgggtgcgcccgccgttcgcctttgaaggtaaaggcgccgccggtggtcatagcgcgacccataaagccaccgctgaaccgactcgcccacagcccgtcgaataagcgtgcttaataaaaaaaccggcctttggccggtttttttatgcgctttgcggacgctgcatcccggcgagatccggcatgatctcccgcatcaggtcgaggaacttacgcaggcgtgtcgggtaatagcgcgcccagggataaaccagatgaaccggcagcgaggcgggtcgccactgcgggaacagctcaatcagccgtccggcggcaatatcctccacgaccgtccagctggacaccatcgccacccccagccccgccagcgcggtgttgcgcgcgacgtaaagactgtcagtgctcagacagggagtaatcgctgtagagacaatctgcccgcttgcctgatgcctgagccgtacctcatgctgataaaaggtattaatggcgatccatggcaggcccgataacgcctccagcgaggttaacggcggatacttcgccagcagctcaggagaagccactacgcagcgcggcacttccgccagcagtacggataccgttgctggatccacctccgcccccacgcgaatagcgcagtcgatattatcgctgaggaagtcgacggtattatcgtttagcatccactccaccgacagctgcggatggcgctgtagaaatgccaccagcggcgccagcagctgctgctggccaaacgcgtggggcgcccgcactcgcagaacgcccaccggccgatcgtcggcaatacgcaggtcatcctccagcgccagccaggcgtccaccacctgacgggcgtgacgataacagcgttcgccatcgtcagtgagcttcatcgcatgggtggtgcgcaggatcagcttaacccccagcagcccttcaagggactgcaggcggcggctgacggtcgcctgggtagtgtccatctgccctgcggcggcggagagcgatccggcctctacgatgcggatataggtgcgcatcagctcaatgcggtctatacgctcttgtcttttcattttccttttgcctatacgtgctacgtataaccgttttaccaccagcccggctaccgcgccagtcgcgttcagggaaaaatagccccatcgcatctatgaggcattgaacatgacaccgacttccctttccacccgcgacgcaggctggattatcttcattctcgcactcggcgccggctttagcgtcgcctctatttactacgcgcagccgctgctgccgttgatgggcgccaatctccacctgactgtagaaggtatgggtctggtccctaccctgacgcaggcgggttatgcgctcggcattctgttcctgctcccgctcggcgaccgccacgatcgccgccggctgatcctggtgaaaagcgcgctgctggcgctcctgctgctcctgtgcagcctcaccggccagctcagctcactgctggtggtcagtctgctgatcggtatggcggcgaccatggcgcaggatatcgtcccggcggcggcgatcctcgccccggcgggcaagcagggaaaaatggtgggcacggtgatgaccgggctgctgctggggatcctgctctcccggacggtcagcggcgtggtgggcgccgtattcggctggcgggtgatgtatcaggcggcggcggtcagcgtcgcgctgattggcctggtaatgtggcgcgtcctgccgcgcttcgctgtgcactcgacgctgagctatccgcagctgatggcctcgatggcgcatctgtggcagcgttacccggcattacgccgcgccgcgctagctcagggcgcgctctctatcgcctttagcgccttctggtcgacgctggcggtgatgctctccgaacactatcacatgggcagcgcagtagcgggcggtttcggtatcgccggggccgccggggcgctggccgcgccgcttgccggcggtctggccgataaatttggcgccggtaaggtgacacagatgggtgcggcgctggtcaccctctcctttgccctgatgtttatgctgccgctgctgccagtgcacgctcagttggcgctgattgccctgtcggcgattggctttgaccttggcctgcagtcaagcctggtggcgcatcagaacctggtatatggccttgagccacaggcccgcggccgcctcaacgccctgctgttcaccgtggtgtttatcgggatgtcgctggggtcggtgctgggcagtaagctgtacgtgctggccggctggaacggagtggtcacgctggcagtgatcactggcgcgctagccctggcgatccgcctgctggagaatgcccgcatcctcgctgccgaacgcagcgcatcataaaaaaaaccccgcttcgcctgaggcgaagcggggtttttctacccacacaaccgcttacgccgtgcgacggacaaactctttcacgcggaagcccagcaccagcagcgtggcgaaataggctaccaccccggcgataaccaccgccagcaaacgcatcagacggaacggcatcgtccccagcgaccactcaggcatgagatgcatgacgcccagcagcgccgcggccataaccagcactgcaataatcagacgcagcaggaaggccaaccagcccggctgcggggtgaaaattttctgtttacgcagctgccagtagagcagcgcggcgttcaggcaggccgccaggccgatggacagcgacagacccgcatgcttcagcgggccgataaacgccaggttcattacctgggtcataatcagggtgataatagcaatcttgaccggggtcttgatgtcctgacgggaatagaagcccggcgccagcactttcaccacgataaggcccatcagccccacggaataagccaccagcgcgcgctgggtcatcgccgcgtcaaaggcgctgaatttgccgtactggaacagagccacggttagcggtttggcgaggatccccagcgccaccgcgctcggcagcgccagcagaaaacagagacgcagtccccagtccatcagccggcaatactcgtcatggttaccgctggcgaagctttttgacagcgatggcagcaggatagtgccgagcgccacgcccagcacgccggagggaaactccatcaggcggtcggcataatacatccacgacaccgagcccgacacgaggaatgaggcgaaaatggtattgatgataagggagatctggcttaccgacacgccaaggatcgccggccccatctgcttcaccacccgcatcgcgccggcatctttcagattaattcgcggcaggaccagcatgccaatcttcttcagatgcggcagctggtaagccagctgcagcacgccgccgaccgtcaccgcccaggccagcgccagcaccggcggatggaaatacggcgcggcaaacagcgcaaagccaatcatactgacgttgaggaacgtcggcgcaaaggccggcaccgagaagcggttccaggtattgaggatcgcccccaccagcgaagccagggagatcagcaaaatatagggaaaggtaatacgcagcagctgggtggttagcgcaaacttatcggcggtatcggcaaagccgggcgcagtaatggtgattacccacggcgccgccagcatcccgataacggtaacgatagccagggccagggtcagcagcccggagacgtatgagacaaacacgcgggtggcatcttcgccctgcttgcttttatattcggcaaggatcggcacaaatgcctgtgagaaggcgccttcggcaaaaatacgccgcagcaggttaggcagtttgaaggcgacaaaaaaggcatcggtcgccatcccggcgccaaaaatacgcgccacaatcgcatcgcgggcaaagcccagcacgcgcgaaaacatggtcatcgaactgactgccgccagtgattttaaaaggttcattacgctgttattccaaaccctggagtaaaacgcccgcaaatgcgggcgctggaaagtggcgatagtctaccgggttcaacatgaattactactgtcagttgttacaatggattattcgctaatggcgtcgcgccacagtttctcaacgatccgctgagccagcagcgcctgttcgcctgcagtttcaggaactgtctgattttgcacgcattcgataaaatggcgcgcgcagccgacaaagccgcgctgctcaagggtggtttgccagccggcaaccgggcgctggaccacgccatgaccgcactcctcctgccattcgcgcatctcgctgacggcatatagcccgccatccgtgaccgcctgcacccactcgcgctggctgcctgcgcgacgatgcatgctggtggtgacctgcagccggggcgaactgaactgatgttcggcatagagcatttcgccctgcggggtgatcttcagcgcgccgccgcgcagacgcgcctgaccgtcggccagccatagcgcggtatccaccacatgcagatagtcatcaagcagcgtaaagcgcagatcgttgccgacgctatcgctacgatgcttatccatccgcagcgaggccgcctcgcccagccgccccttcagctcccgatagagcggcgcgaagcggcgattgaaaccgaccatcaacgtcagtcgacgtcgcgccgccagctcgaccagcgtctccgcctcactcagcttgtccgccaatggtttatccacacaaacatgaaccccggcattcagtaagtgattcactacttcataatgtgaagccgtcgaggtatggacaaagaccgcatcgcactgtgccgccagggcatcgagggaatcagcgtatggcatccgccaggtttcgcagatccgcagcgccttctctttacccggcgaccaggccgcctgcagcgtccagctttccgccgcccccagcaccggcagccacgctttctgcgcaatgctgcctaagccgaccaccccaatgcgcaatcttgtccccacgttttagtctcccagatggtgtaacagcgaatcgaggcgcgctttcagctccgccacctcgccctccagcgcttcaaccctggcgcgcagatcgccgtcatcgtccagcggcgcgagagcttccactgtggtgatcagcgtgtccatatcgtcgcaaaacagatgcatatagcggctttcccgttttcccggctcccggggcagccgggcgacgaaggggccatcttcgcgcgtcgccagcccttccagcacgctttccacttccgccatatcgctgaactcatacatccgctgcgcccggctgcgtagttcgcccggcgtctgagcaccgcgcagcagcagcgtcgtgaccaccgcaacctcgccggcgctaagcttcagatcgccaaattcagagttgcaaaagcgctgttcatacttggtgacgcgattaccgaatccgctgaccgtgcgcagatagtgccgtttcaccagcgtatccagcagggcctggacctcgctttcgctcagcgacatcactggctcgcggttggttttctgattgcaggcggtcaccacagcatttaccgacagcggatactgctcgggggtggtgacctgcttttccagcaggcagccaatgacgcgcgcttcatgcgcagttaactgatatttcatcctctctccttaacgtcccgcagaccagtccggcgtcgttagcgccgtcagtacatggtcacgccactgcccgtcaatcagcagataatctttggcgtaaccctctttttcaaaccccaaccgggccagcagcgcgccgctgcgctgattatgcggcatgtagttggccataatgcgatgaatatgctgcgtgcgctgcatatagcgaatcgccgacgtcagcgcttcaaacatcagcccctgcccctgccacttctcgccaatggaatagccaagataacaggcatggaaagatccgcgcaccacgttggagaaattcgccacaccgatgatctctttttcctcagggtcgagcagcgcgaaataaaaagctgacccctgcttatgaaactcagcgatcatcgacagacgcgcctgccatccggagggatagcagtggctgtcgtcacgaaccggctcccagggttttaagaacgctttattttcggcgtaataatcggccagacgccaggcgtcacgatcgtgaaccaggcgcaccaccagccggtccgtcgtcaaacgcaccttcggcacgttactgcgatagccaaacatttcctttttcagtccccctgactacactcttgctttcatcactatacctttcctgcacgatagtgtgaaaacagcaacataccattttctgcgccatctcctcttttcgatgaataggctcaatcgatcttgctttttgataaaaaaatattgtcgcaagggtgctgggaaaagcagcagattgctcgcagaatatcctcgcttatctctatttttccctggaggggaaatgtcccgcgtctcgcaggcaaggagcctgggtaaatatttcctgttagtcgataacatgctggtcgtgctgggcttttttgtcgtttttccgctgatttccatccgctttgtcgatcagatgggctgggcagcgctgatggtcggcattgcgctcggcctgcgccagctggtacagcagggattaggcatctttggcggcgccatcgccgaccgcttcggcgcgaaaccgatgatcgtcaccggtatgctgatgcgtgccggcggtttcgcggcgatggccgtcgcccatgagccgtgggtgctgtggttctcgtgcatactctccggactcggcggtacactgttcgatccgccgcgggcggcgctggtggttaagctggtgcgtccgtatcagcgcggccgctttttctccatcctgatgatgcaggatagcgccggcgcggtgattggcgcgctgctgggcagctggctgctgcagtatgattttcgcctggtgtgcagcgccggcgccgcgctgtttatcgcctgcgccgcgtttaacgcctggtatctgccggcatggaagctctcgacggtgaaaacgccgattcgcgagggtctgggccgggtgctgcgggacaaacgcttcgtcacctatgtcctgacgctgaccggctattatatgctggcggtgcaggtgatgctgatgctgccgatcatggtgaatgacatcgccggctcgccggccgccgtgaaatggatgtacgccatcgaagccaccatttcgctcaccctgctctatcctattgcccgttggagcgaaaaacgcttccgccttgagcaccggctgatggccggtctgctggtgatgaccctggccatgctccccatcgggatgaccagcagtttacagcagctgtttaccctgatttgcctgttttacatcggctctatcattgccgaacccgcccgcgagacgctgggcgcttcgctggcggacgcccgggcgcgtggcagctatatgggtttcagccgtctggggctcgccttcggcggcgcgctgggttacgcgggcggcggctggctgtttgatgccgggaaagccgtcggccagcccgaactgccgtggctgatgctcggcgccatcggggttatcaccttcctggcgctatggtggcaattcagtccgaaacgctctgcctccggtatgctggagccgcgcacctgatgcgcgcggcggcggtttctcctgctttcagcctattctgctggcgcgatgggtgctgacaggtcatgatgctttgtgtcaggatgaaggaaggtatgagcttgaggaaccccatgaaaaagatattgatcgccgccgcgctaattgtcagcggcctgctgagtggctgtaatcagctgacccaatacacggtaagcgagcaggagattaaccaggccctgcagaagcgaaaccatttcgccaaagatattggtctgaaaggcgttgccgacgcccatatcgaactgcagaacctgaccagcgctatcgggcgcgaggagccgggcaaagtcaccctgagcgggatcgccaacgtcgatcttaactccctgttcggcacgcagaaagcgacgatcgatctgaagctcaaagcgctgccaacctttgaccgagagaaaggcgccatcttcctgcaggaaatggaagtggtcgatgccaaagtggcgccggagaagctgcagtcggttattcaggccctgctcccctacctgaatcagtctctgcgcagctacttcagccagcagccggcttatgtcctgcgtgaggacgccagcaccggcgaagcgctggcgaagaaatacgccaaaggtatagaggtgaagccaggcgagattgtcatcccctttaccaattaatctccagggcgctacggcgccctgaattttttacggaaatgagtgcaaaggaaaacgtttacgcttatccttagtgcccggcaaaaaacagccctgatgactgaacctattagccggagccttccatgacagcacaatcccaggtattgaaaatccgccgcccagacgactggcatatccatctgcgcgatgacgatatgctgaaaaccgtcgtgccttataccagtgagttttatggccgggcgatcgtgatgccgaatctggtgccgcctgtcaccaccgtcgcggcggctatcgcttaccgccagcgcattatggacgccgtgccggccgggcatgattttaccccgctgatgacctgctatctgacagactctctcgacccagcggagctggaacgcggctttaacgaaggggtgttcaccgccgccaagctctacccggccaatgccactactaactccagccacggcgtcaccagcaccgacgccattatgccagtgctggagcggatggaaaaactggggatgccgttgctcgttcacggcgaagtcactcgcgccgagattgatattttcgatcgtgaagcgcgctttattgagacggtgatggagcccctgcgccagcgcctgcccggcctgaaagtggtttttgaacatatcaccaccaaagacgccgccgagtacgtgcgtgacggtaatgaattgctggctgctaccatcaccccgcagcatctgatgttcaaccgcaaccatatgctggtgggcggcattcgccctcacctgtactgtctgccggtacttaaacgcaatattcatcagcaggctctgcgggagctggtcgccagcggcttcagccgcgccttcctcggcaccgactccgcaccgcacgcgcgccaccgtaaggaagccagctgtggctgcgccggctgctttaacgccccgaccgccctcggcagctacgccacggtgtttgaagaaatgaacgctctgcagcactttgaggctttctgctcgctgaacggcccgcgcttctacggtctgccggtcaatgagagctacgttgaactggtgcgtgaagagacgaccgttgtggacagcatttccctgcctaatgacaccctggtgcccttcctggcgggtgaaaccgttcactggaccgtgaagaaataaaaacgcagccccctgttgtcaacgctagccggatactgtataaataaccagtatcgaacgcagggggcaattatgcgcattgaagtgtctatcgccaaaacgaccgccttacctaacggcgcgctggaagcgctgaataacgaactctctcgccgtatcgccgagcaattcccggccatcgatagccaggtgagcgtccgctacgccaccggtaatcagctctcggtgtttggcgccctgaaagaagacaaagaccggataagcgaaatcctgcaggaaacatgggaaagcgcggacgactggtttgtccacgatctctcctgaagcatggcgggatccagttactctggtttgctccctcattgtgctttttttgccgggtcgccccggctttttttatcccctcttctgttcagaatagtcctgattattctgctcaatatcgactaaagtggccattttacgcgcttatcttgagtaaaaaagcggcaaaagaagaaaatcatgctgcctttcatttaatttctcgagtttattcttgatccctgatataattaacttgcttcaaaaaatatgcattaaacctcgagaattgttgtcttttaacatatgaataaggggttatgatggaaaaaaataatgaagtcattcagacccatcccctcgttggatgggacatcagcaccgttgatagctacgatgcgctgatgttgcgcctgcactaccagaaccccactcaagaaaacagtaatgatgctgagatcggccagacgctatggctaacgacggacgtcgcacgtcagtttatttcaatcctggaagcaggcattgcgaagattgaatctggcgaataccaggaaaacgagtatcgccgacattaacgcggcttgcgaatgacttaacattaaacttaacaggcacctgcgggtgcctgaattattttcgggcttgtataagcacagggagttaattaccctgctaacaaggcaattacccggaactcaccatgcaatacgatcttatcattattggcagcggctccgtcggcgccgccgctggctattatgcgcgccgtgccggactcaatgttctgatgaccgatgcccatcaacctccccaccaggaaggcagccatcacggcagcagccgtcttatccgtcacgcctatggcgaaggtgagaaatatgttccgctggtgctgcgtgcccagcagctatgggatgaactggcagagatcagtggcgaagccgtgtttgaacgcaccggcgtcattaacctcggccccgccagctccgcttttctcgccaacgtcgccgccagcgcccgtgcgttccagcttgaggtggaagagctggatgcccaggccgtgatgcaacgctggccggagatacgcctccccgatgactatcgggcgattttcgaacccgcttccggcgtactgcgcagcgaactggccgtcgaaacctggatccgtctggcgcgggaagcaggctgcgcgcagctattcaactgtccggtctcggctattcatcaccatgctgacgggatcaccatcgataccctcgacggtgaatatcatggtaaaaagctgctggtcagcgccggcacctgggtcacccgcctgcttccggatctccctatccagccggtacgcaaggtgttcgcctggtaccaggccgatggccgttacagcagcaagaatcacttcccggccttcaccggcgagttgcccaacggcgatcaatattacggtttcccggcggaagataatgaactgaaaattggcaagcataacggcggccagccgatctccaccccgcaggaacgggtagcgtttggcgctgtcgccagcgatggttccgaatccttcccgtttttgcgtaacgtcctgcctggcatcggcggctgcctgcacggcgcctcctgtacctacgacaataccgtcgatgaggactttattatcgatacgttgccaggcaggccagacacgctgctgatcaccgggctgagcggccacggctttaagtttgcgccggtgctgggcgaaattgccagtcagtttgctcaggacgaagcatcgagcttcaatctggcccccttttctctggcgcgctttaacgcgtaatggaatgcggcacttttgccgttgggtaaagaaacggcctctgctgaggccgttagtgattgagagcggttatgcgtcgcctgtttaatatgctggtcaacaacgtgcgcgagcattttatgatctacctggcgctctggctgctgctggcgatcatcgatctcgtctggttatggtttttctgacggctccgggtcgaggatcccgagtttggtattcagccggccacgggatttattaaagattttgttgccgttttcacgcccggcgcgcagcttacgctgctcctcttccggtagcttatgctcttccatgcaggcttcgctacagcagccggcaaacttctcggcgcagctcgggcactggataaacagcagatggcagccatcgttcaggcagttagtatgggtgtcgcacggcgcgccgcactgatgacagtgcgcgataacgtcattggagatccgctcgcccatccgctcatcaaagacaaagtttttaccaatgaagcgcaccggtagcccctgctcgcgggcgcgacgggcgtactcgatgatgccaccctcgatgtgccagaccttattgaagccgttatgcttcatccaggcgctggctttttcacagcgaatgccgccggtgcaatacatgacaattttcttgtctttatggtcctgcatcatttccacggctttcggcagctggtcgcggaaggtatccgccgggatctccagcgcgttttcgaaatggcccacctcatattcatagtggttacgcatatcgataaacacggcatccggatcgtcaagcatcgcgttgacttccgccgccttgagatactcccccacattggaggcgtcaaacgagggatcgtcgatgccgtcggcgacgatacgatcgcgaactttcaggcgcagcacccagaaagacttaccatcgtcctccacggcgatattgaaacgcagccccgccagcgccggatcgaagccatagagaaactcacgcagagcctcaacgttgctttgcggcacgctgatttgcgcgttgatcccttcccgggccagatagatgcggccaaagaccttcagctgggttaaggcaacccacagcgcatcacgggtcgcctgcgggtcgacaatggtgaaatatttatagaatgagatcgtcgtgcgcggctcggtctcagccagcatttgcgcctttaacgtctcatttgaaatgcggttgtgtaacactggcatggtgtacctgctcgacatagaaatgaggaaataaacggcgggcatgatatagcaaagctaattaatttacatccctacattttacgctacatttctctcacccggtcgcgccccgcttaacaaaacgagctgactgtcgccgcctttggctggccggtaaaaaaatgcgataatataagacgttgctcactgatacgggtatgaaatgactcatttgcctaaattttctccggcgctgttgcatccgcgctattggctgctgtggctgggtatcggcctgctgtggctggttgtccaactgccctacccgctgatctaccgcctcgggaacgccatcggccgtctggccatgcgctttatgaagcgccgggcgaaaatcgcctatcgcaatcttgagctctgcttccccgagaaaagcgagcaggaacgccaccgaatggtggtgatgaactttgaatcggtgggcatggggctgatggagaccggtatggcctggttctggccggttcgccgtatcgcccgctggaccgacaccatcggctttgagcatattcgcgatgtgcaggcgcagcagcgcggcattctgctgatcggtattcatttcctcactctcgagatgggagcgcggatgttcggtatgaacgagccggggattggcgtctatcgccccaacgacaacccggtgatcgactggctgcagacctggggccgcttgcgctccaacaaggatatgattgaccgtaaggatctgaaaggcatgatccgggcactgaaaaaaggcgaagtggtgtggtacgcaccggatcacgattacggcccgaccgccagcgtcttcgccccactgtttgcggtcgaccaggcggcgaccacctccggcacctggatgctggcgaaaatgtccaaagcctgcatcgtgcccttcgtccctcgccgcaaaccggacggtaaaggttatgaactgattatcctgccgccagagtgttccccgccgctggacgacgcggaaaccaccgccgcgtggatgaacaagatcgttgagcagtgcatcatgatggccccggaacagtatatgtggctccatcgtcgcttcaaaacccgccccgaaggcatgccctcccgctactgatcccttttcccggccgcgctcatcccggccgggaagcttcgccgctcaggctttaggctctcctttagctttaaaagctctcctccattgcggcatctatttctcaggcgcataattagcaggctcatattttctcttaatttgacctgccgcgcaggccagtggaaccctatgtcgtctgctgaaacccccattaactggaaacgaaacctgaccgtgacctggcttggctgctttttaaccggcgccgccttcagcctggtcatgccctttctgccactctacgtcgaacagctcggcgtcaccgggcatagcgccctgaacatgtggtccgggctggtctttagtattacctttcttttctctgccatcgcctcgccgttctggggggggcttgctgatcgcaaggggagaaaaatcatgctgctgcgttccgccctcgggatggccatcgtgatgatgctgatgggaatggcgcagaatatctggcagtttctgctgctgcgcgcattgctcggcctgctgggcggttttattcctaacgccaacgccctgatcgccacccagatcccgcgccataaaagcggctgggcgctggggacactgtctaccggcgcggtaagcggcgccctgctcggcccgctggcaggtggcttcctggccgaccactggggattgcgcaccgtcttctttatgaccgcggcggtactatttatctgtttcttgttgaccctgtttttaatccgcgaaaattttgtgccgatcgccaggaaagagatgctcagtgccagagaggtgttctcctcgctgcagaatcccaaactggtgctcagcctgtttgtgacctcgctgataatccaggtggccaccggttccattgcgccgatcctgacgctttatgtacgcgatctcgcgggcaacgtcagtaacatcgcctttatcagcggaatgatcgcctcggtgccgggcattgccgcgctgatgagcgccccgcggctgggcaaactgggggatcgcatcgggccggaaaaaatcctcatcgtcgcgctgattatctcggtgctactcctgatcccgatgtcgttcgttcagaccccgctgcagttaggtatcctgcgattcctgctcggcgccgcggacggcgcgctgctgccggcggtgcaaaccctgctggtgtacaactcgaccagccagatctccgggcgaatcttcagctataaccagtctttccgcgatattggcaacgttaccggccccctgattggcgcgtcggtttccgctaactatggcttccgcgctgtatttctggtcaccgcaggggtggtattatttaatgcgatctactccaccctcagcctgcgtcggccagccgcggatacttcgcattcagtaaattaacgtcgagaggggctctgtcccttgacgccgtgcgtaccgccttctatagattgaatcgtgttcaattcatattcttctcaggagattcgctatgccaaaggattcgatgttctacgccacgcttgaagaagctattgatgcagcacgtgaagaatttctcgccaacaaccctgacagcgatgaagagagcgccaacgttgagcagctcaacattcaaaagtatgtgctgcaggatggcgatatcgcctggcaggccgaattttttgctgacgaagaggaacaaggcgaatgcctcccgatgctcagcggcgaagccgcgcagagcgtcttcgacggggattatgatgagatagagctgcgtcaggagtggctggaggaaaatacgctccacgaatgggatgaaggcgaatttcagctcgagccctcgctggacaccgaagaggggcagacggcagccgacgagtgggacgagcgttaatcagttataggggccgtggctggcgtccagaggcagcagaagcgtatcaaataccagcgagaacggtaggtcaagaatggtgagatagcgccatgccgaatcgcgaacatcccactgtacgcccgggtaatattgattgccatgcccctgcccgggcaccgtacggctgataatgctgccgcagccgctgagcagcagcgccatggcaatgatcggtagtattcgcatccacatcctcgtatttcagataaaaaaataccggcatcgctgccggtattttccttaacgtacggcttatttcgttttcagcgccagcgggttaagcgccaactgctgataggcgttcacccatgaagagtatttctccggcgcggcccatacgcgatagtgcagacgcgacatggttaccgggtcgctcaacagcaccagtcgacgatcgcggttcagcttatccggcgtttcattcagcgcctgctcgacatggcgctcgcgggcgatctccaggatatgcccctgacggtggcgcgcagtggccattgcggtggcgagggcgttaaacgacgggttaaacaccgcgtgcataaagccatcgtccagcgaacgctgacggttcatcgtcaggtacgcatcggtatccttgagcacctgcggcggcgaatactcttccgggatcaggaacagcttccagcgcttggtgcgcaggcccactgtcgcccggctggaaatcgccgatacgaacggcgagaggatcagcgagacaacaatcggcgccagccagaacaggaagcgtagatccagccatgccatcccgaccgcccacaccagccccagcagcagctgcgagccgtggcgcataaaggcttccccccacggcgtggagtcatcatcacgctgcggcgaattccataccacctcccagccgaggaaggcgctgaccacgaagaccgtgtggaacagcatacggaccggcgccagcaggaccgagaacaggacctccagcagcagtgaaagcgtgacgcggataaatccgccgtactctttcggccctttacaccacaccagaataatactcagcagcttcggcaggaacagcagcaccatggtcgaagcgaacagcgcgatggccagctcaggccgccactgcggccacaccgggaacagctgacgcggctgcaggaagtactgcggttcggtcagggcatgcaccacctgcaacgccgtcgacagggcaaggaacataaaccacagcggcgccgacaggtaggacatcacgccggtaaggaacaccgcccggtgaaccgggtgcatccctctgactaggaacaggcggaagttcatcaggttgccctgacaccagcgacggtcgcgtttcagctcgtccagcaggttcggcggcagctcctcataggagcccggcagatcgtaggcaatccacaccccccagccggcacggcgcatcagcgcggcttcgacgaagtcgtgcgacaggatcgacccggcaaagttgccctcgcccggcagcggcgccagcgcgcagtgctcaatgaacggcttcacgcggataatggcgttgtggccccagtagtgggactcccccaactgccagaagtgcagacccgccgtaaacagcggaccgtacacccgggtggcaaactgctggcaacgcgcatacagcgtgtccatgcccgaggcgcgcggggaagactgaatgatcccggcattcgggttcgcttccatcaggcgcaccaggctgctcaaacactcaccggtcatcaccgagtcagcgtccagcaccaccatatagctatactggctgccccagcggcggcagaagtcatcgatgttgccgctcttacgcttcactcgacgacgacggcggcggtagaagatctgcccttcgccctgcacttcggcaatcagctccatccacgccttttgctcagccacacagatatcggggttatagctatcgctgaggatatagacgtcgaaatgagcggcgttaccggtcgctttcaccgactcccaggtcgcccgcaggccggcgaaaacgcggtcaacgtcttcgttacagatcggcattatcagcgccgtacggtgcgccgggttcaacggttcgtcaccgaccgtcgaggcggaaatactgtacttatcgcggccgatcaatagctgcaggaagcccattaacgcggtccagaagccggcggaaacccagcagaacagcaccgcgaagaggatcagaatgccgctctgcaacacgtacggcagcagctgcatgaacgagatccacaggttctgccccaccatgtcgaccgggttgatcagcgcccagccctgataaggcagaatggttttcatataccaggtggccactacggtctgcgacagcgtcagcagcagcaggatatagcgacgaatggtgccgacggtacgccatttttgctcactctcgcgctcttcttgcgtcagacgggagagatagcgcggcgtgacatcgcgtccgcgcagacggtcccagaagcggccgaccgggttggtacgccacgggtccgggatcattgaggagcgcttggctttaggcatcgcatgcagctgagtacggccttcatcgtccttcaccagctgatcgccagacagcgaatccggccagctatgcgccagccgtgccttcaccgaccccagcggggagtcgtcttcgcgggcgaaggtctgatggtcgtcatccagggcctgatgaacggcctgcaggctggtgtccggcagcgccgatttctcggcgtccgacagcggcaatgcgtcaatgtactttgttatcttattcattggcaggcagctgatagctccaggtttcgctcaacgtgtcatcaccgttaaccagcgcggcgcgcatttccgtcgttttcttcggatctttcaccttcaaacgcaggatcattcgccagcctttggtcaccggattgtaacgcacggtattttcaacgatttcagcgttatcgccggtactcgcctgggcggcgaccggggtatccgccggcagttttttcatatcggcgccggtgaagtcgacaatgaaagcaatggtgccgtccggctggcggatcaggttcgactgcttcacgtcgccggtagagcggcgggtctgcataacgtacgcgttatccggcgcatgcagcttgtcttcatcgcggctgaaggtgatggtgtacttgaagttcatctccttgcccggctccggcagctgatccggcgtccagtaagtcacgatgttatcgttggtttcatcgttggtcggaatttcaaccagttcgattttccctttgccccactcccctttcggggtgatccaggcgctcggacgcaggtcataacgatcgtcgagatcctcgaagcgcgagaactgacggccgcgctgcagcaggccgaacccttgcgggttttccatcgcataactgctaacggcaaggtgtttcgggttgttcagcggacgccagatccactcgccgttaccggccaggatcgacagaccattggagtcgtgtagcgccggacgatagttaagcgccggagaaggctggttagaaccgaacaggaacatgctggtcagcggcgccacgcccagtttgcccactttgtcacgcaggtaaactttggactggacatctaccacggtgtcgcgtcccggcatgatgacaaagcgataagcgccggttgcccgcggggagtccagcagcgcatagatagtcagacgtttgtcggtggctttaggacgctcgatccagaactcgcgaaaacgcgggaactcttcgccggacggcagcgcggtatcgatagccaggccgcgcgcggacaggccgtaaacctgaccctgacccagcacgcggaagtagctggcaccgagcatgctgacgatctcatcgttcttatctttgctattgatcggatacagtactttgaagccggcgaaaccgaggtctttcaccgtgtctttatcgtgctgaacgttaccaaagttaaaatagtccgggctatatttaattttgcgcacgctggtggccgtcacttcattgatggtgaccggcgtgtcgaagtacataccctgatggtaaaattcaagcttgaatggggttttctggttattccagtaagctttatcgtgattaaactgaatttgctggtaatccgcgtatttcatgtcgcggaaagcggagggcaggttactcttcggcgcttcatagcctttcccggctaacgttttggcctcttttgcaacgtcatcaatgctaaatgcccatgcagatgaagtacacagggacaacattacggctgcgcttaaccaacgcattttcatcatctgtggtttatgtttcatataagtaagcacttccccctttgtgtgcttaaatcgatccgatctattttaatggaaactcaggcaatccgacaacataatccctgctttgttcagcgtagcggcgcagggaataaacagttcgctatcccgtttgcactttgcgtgcttatcctggagacaggtaccccgagttcatgtagggttgctgataatgtaagcgttatcatcttgagtgataagacgaattatctgagattgtcgtgaatcgtatgaataatactccggtacagcgtgaatatttcttcgacagcatccgcgcctggctgatgctgctggggatccctttccacatttcgctgatctattccagccacagctggcatgtcaacagcgctgagccctcgtggtggttgacgctgtttaatgacttcatccatgccttccggatgcaggtctttttcgtcatctccggctatttctcctacatgctgttcctgcgctacccgttgaaaaagtggtggaaagtgcgcgtcgaacgggtcggtattccgatgctgaccgctatcccactgctgacgctgccgcagtttattatgctgcagtacgtcaacggcaaggcggaaaactggcacaccctttccgggtacgacaaatttaacaccctggcgtgggagcttatttcccacctgtggtttttactggtgctggtggtgctgacctcgctgggcgtggtgctgtttaaatggctgacgcgccgcccggcagggggcgcctcagcctttggtgacactgtcactatgggccagctaacgatgattttccttgcgctgggggtgctttacgcgctgatccgccgatcgctgttcctgatttacccgccgctgcttagcaatggtctgtttaactttgtggtgatgcagacgctgttctatcttcccttctttgtgctgggggcgcagacctttattaatccgcgtctgaaggcgatgtttaccaccccgtcaccatggtgctgcgcagcggcgctgctgggatttatcgcctaccggctgaaccagcagtacggctccggcgacggctggatgtatgaaacggaatcggtgatcaccatggtgcttgggctgtggatggtcaatgtggtcttttcgctcggccatcgcctgctgaacttccagtcggcgcgcgtaacctatttcgtcaatgcttcgctgtttatttacctggtgcaccatccgctgacgctgctgtacggggcgtggatcaccccggtcattaagtccaataccttaggctttattggcgggttggtttttgtggtgggtattgccctgatcctgtatgaaattcacctgcgcattccgctgctgcgtttcctgttctccggtaaaccgatgaacaaaccggccaaaaccccagcctcggccagctaaccattagcctgtgcggcacgccaggcgtgccgtattatgcctgctcgtcaaaaagccggtcgaaaatcatattgtacagggcttctaaatctgccttatcgaccggggtggaggcgctcagctcacagcggtaggctgccccctctgtcagaacggcgatgagctctgatgcggcattgcgtcgcgcatcgctgagcccgggatggtagcgctgcgacaggcgaccgccctcctctttcaaccgccgatcggcctgcatcaggatctcacgcaagcgggggttacgcgaggcctcggcattgatctccatcagcagataattatcgcttttggtggctgccgacgtcgggatcctgccagccaaaaccgccgctttacgcgccagattgtggttctcatcgatcatctccccgactctggcgttgacgatttcgctaacaatcgcttcgatgatcgcttccttgctggcaaaaatgcgatatagctgaccgacgctcaggcccgcttcccgggcgatatcggcgacggaagcgccgtgcagccccttttcagcgaaacatttttgcgcagcgacaacgatctccgcgcggcgcgcctgctgtttctgctggacttttccttctgacaccctgctccctcctgctacccatcattcccgtcaagactggcggttatcatagcctattctgttgaatcaggggtatgacgccagcaggcggcgatagatagccgccgtttcctcgtcaaaacagacgaacaggacgcgctcaagagggttatagcgagtgagaaacgcggtgacggtgcgcacggcgatcgccgccgcttcctctttcggatagccatacacgccggtgcttattgccggaaacgcaatggagcgatagttatttgccgaggccaactgcagactgtttttgtaagcatcggccagggtttgcgcctccatgcggtcgccgccgtgccagaccgggcccacggtgtggatcaccgcgctggccggcagattgccggcaatagtaattaccgcatgcccgggagggcattcgccctgctgctgcagcacctgcttgcaagccgccagcagcgcgggaccggccgcccggtggatggccccgtctactccgccaccacccagcagcgagggatttgccgcattaacaatcacatcgacatcaagtgtcgtaatatcgccgagaattacctcaggtttaacagccatttctcctcctgtcggcatagcgtgtggatacggctttctgccgatactagggcattctggcctgcgggagcaagactatcgctttgtccggtgacgagaagataaaaaaacaggacccgtaaggtcctgttttttagtcgtcccgccgatcaggcgttgtcgttgacgaacaatttatgcttatccgcacgggccgccagccacaggccactatttttcatggcatagccaaagaccagacccagcgccagggaagggatcaccagacgccagtcgccgtctgccgcgaaggtcgcgcaggcgccgataaaggtgcccgggacaaacgacagtagcgtccgtcgcgcctgaatgcacatcaggaaggcgaccacaccggtcatcatatagctgaggatctgcacctgtggcgccagcgcgctaccgtggataatcactaacgcccaggccacgccgctcatcaccgtgcaggacgagatggccagccctttcaagccgccctgcgggcaggcgaaataggccgtacagccgaggaatccggcccagctcagcaggccgagagcgaccgccacccacccccaaatcccggagaggatgcctgtcgttaatgcgattgcgaagagtatgttcatggcgcgtatcctagcagatacgcgccggaagaatgcgatctaaaacacagtatatgaatgaactttctttcagtttcattcaaacagtgatttgcatcacatattattgctcatcttcttcctgaagctcgtcccacatcgcggcgatggcgtcgcgggtcaacggcgccatggtgcgccagaacggcgtgtgcgcatgggcttcgactttccccagcatcgtcccgcaccacggcaggatatagtcggcgaacaggagctccagcgtctcgctctggtcttctgcggcatgatcctccagccaggaggcggccagcagcagcgagccgagatgatccgccggaccttcccctgtcgggatgccgtgttcgctcagaaaagcccgaacttccgcttccgaggaaccctccacccacgcgctacggtacggcgggacgctgcaggcttcaccgacgaacagcgcattatagtccgtcgccagggactgcatttcacagcttttctgcagacgcgccagcagctcgtcctgctcaagcggccagctggcggccagtttgccctcgcggatcagggtaaacagcggcaccagcagcgggtcctgcggttgacggtaatacagcgaacccagcacgcgacagaggattgaaaactcgttcattcagttattccagttatacaaattaaaggtcagcaaattccgggatcgccggcatgccccgcgactcgaggaagttaagcaggcgacgcggagaaacgttgaggatcctctcctccgggaaatcgaccgcatcaaggatcttgcggcactcggtaaactccccgagggtaaaggcggtgtgagagtccgagcccagcgccacccatcccccggcatcacgcactgcggcggcgatggcccggcagttgtcttcactgcccacgcgcgatgatacgaacgaggagttattaatctccagcgccacctggtagcgagccgccgcttcggcaatcgccgggatatccaccgggaatttcggattacccggatggctaatcatatgcactttaccgctggccatcgcggctatcatcgcctgtgtatgggtgtcacgatcctgcggcggaaacaccggctcatgaaatccggcgatgatcagatcgagggaagtcaacatcggtccggaacagtcgatctcgccttcaatatttttaatattcgactcaataccgcgcaggatccccaccccgtctaccaggcggggccagatgcgcatattaacgaagtgccagtagtgcggagcatccgccatgtccgggccgtggtcggtgatggcgaagagtttgatccctttacgctttgcttccgcaatataatcgtgcagggtgctgtaggcatgggtgctggcgacggtatgcatgtgcaggtcaacgggatacatcacattctcctcttctgtttgccgcaagaatagcaggaaaccgggctattgattagcaaaaaccccgccgtggcggggttctctcgtcttaataaccgcgctggcggtcgacctgaccgcttaccggctcccctcgctcaagccggctaatggtctccgcaatgtaggtgatagcttccattggacgggtcactgccgccacatggggggtcatggccacccgcggatgcgcccatagcgggctctcctgcggcagcggttcgctactgaagacatcgagcatcgcccctttgagcttaccgctgttcagcgccgccagcagatcctcttcaacgacatgcacgccgcgagcaaggttgaggacatagctctcatcaggcaactgcgccagcagcgtctggttaataatgccggcggtttcggcggtattcggcagcaggttgatcagcacgcgagtgccctgcaggaattcgcccagctcggcctggccggcgaagctctgcacctgcggccaggatttgcgactacggctccagacgcgaagcgggaacccccagggttgcagactttccgcaaccttcgcccccagcacgccggcgcccataatcccgacggtgaattcgtcggcgcggtactctggcagcggctgccagcgggaagccagcttcagcgcctgatagtcatcaaagcggcggaaccagtgcagcacctggctcacggcatactcctgcatctgccgtcccataccggtatcttcgagacgaaacagcggaatcgacagcggcagcatatccggatggtcgcgcagcttgctgagaatagagtccacccctgccccgagggcgaacacggccttcagcgcccggccctgcagcatctctaccggcggatgccagaccagggcatagtccgccggccggttatcgcccgctttccactcgcgcacccgcgcgccgggtaactgcttttccagctcacagatccagtattgggtatcaaaggtcggatggtaaaaaataatctccataggggctcctgatagcagacgcctttggccgattaacgctggcgtcttattttactcattgttttctattggtttgccagcataacaaatttcccccgagcgaaaagggaaaagctactggcgacaaaaaaaacggatttcgcacgtttaaggagcaagttgctcgaagtttgtctaaacgcgctttttttgcaaaaagttgattgacgggcgatacgtatttccctacattagcgcccgttcccgacaacaacgggaaagacaatatggtgaggtgtccgagtggctgaaggagcacgcctggaaagtgtgtatacggcaacgtatcgggggttcgaatccccccctcaccgccatattcgagatgagagcctgtacgcaagtacgggctcttttcttttatattctccgcagggggggatgagaacccccgaccagggttcgacaactggcgcagccagttggacagaccgcgcacgcagtaagcgggctgccccgcaggggcgagcgaagcgagtcaatcccccctcaccgccatattttaagaagagctcgtacgca

SEQ ID NO: 5463 - DNA, 218 bp, Unknown
  gut microbiota DNA sequence
catttcccgaacggtatcccgaacccgctgctgccggagtgccgccaggacaccgccgacgcggtgcgtgcgcatcaggcggacatggggatcgcctttgacggcgacttcgaccgctgcttcctgttcgatgacgaggcgtcgtttatcgaggggtactacattgtcggcctgctggcggaggcgttcctgcagaagcagccgggggcgaaaatcat

SEQ ID NO: 5464 - DNA, 197 bp, Unknown
  gut microbiota DNA sequence
ttctccacgccgatggccgccaccagcttctcgtcgctgttgatgtagcagttttcgctgttgtgcacccacgcgtcgccgctgaggacgttaccctgctcatctttcgggctgacctcccacagggcggaccaggagccgacgtcgctccagtcggcatcgagaccgaccaccaccgcgtcggcggttttctccat

SEQ ID NO: 5465 - DNA, 6058 bp, Unknown
  gut microbiota DNA sequence
atgaaaatctccccgctccaccattaaaaattcacaagggtaggcatacagatattccgtaatgatcggaagtcctctccggtaaaatatggtcttgcccgcttccagtctgctcagatattccttccggaatttatctatggcgtggttcatctgttcctggggaagccccgtattggtcagctgccattcataggcatccaggatcacacttttgacattattatccttcgcctgttgtaacagttccttcagttcctccggatgtgtcagatccatgtacacctttgccatcatttcataggccttgacataggttggaaaataatttagacaggctctgccgttctggatcacccctgctgcattccactgcctcttcgccgcttccagttcgttggcatatgcagcgtaaacctgataatccccgatcagtttctgggatatctccgcacagcgttcatactcttccatctccacatagatctgtgccttttcgatcagcataccgatatccttcggtgttccggtctcggctttttccgcttccgcaatggcttcggcgaatttttccggctgtacatagccataagcccgatagcactgcatccggatcatatgtgactgtcggatccggtctctgtctttttcctcctcttcggcatctgtatcccagaggatctttttctccaggctttcttcccatttggctgccgtggaaattgccttctcatattctgccgcttctgccagcagttttgtcataagtcccagatattcctcacacctgtccgcaggaacttttgcttccagttccctgaccgtgcggattcccagatcggtcctgccatcctgcagataacaccagcccagatccagtcccagaccgggatcatggttctgcgcatattcccgtttcatttcccgttccagttcggtgttgatcttctgcagtgtctccagaaatgtgtcgtctccgcctacggaaagaatctcttccgcacatttttttgcctctttatagttcccctgctcataataccagtccgtcaggcgcaggttcgccatgtagtgtttcggcagcttctcccgaagactctcataaatagcagacgcttctacgcgcccttcatttctccacagtatttccgccgtattgtaagcgatcagatcatcctccggatattttgcagacagtttctttaacaaagtaatggcttctgcggtctgtccctttccttcatagagggacgcacggcagatctccataacagggtgggtaatccccagagcatccccacatccgatcatctgctccgcttcctgtaattttttctcctgcagcgcctgataagctctgtcataatattgcagaaactgatcgtaatccgcatcttccgcaccacggaactcggaaaaatccacttcttccccggattcgcacttatgtaccatatagcttacaaactgtgccggaaagcgctctctgaaggcccccgcattctgtacaatgtggattttctcatccagaagcttccagattgcggtcggcagcttataatgttccatcagaaaacgaagcagataagtggtgcagttttcctcttcctccagagaaagaaagtcatccgcctcaaaaagcgctttccatttttccacatcacagcggtccgtaatattctcatagaccttccgaacaccacgtacccactgtcctgccggagtatcgtcctccagcgtcggttccgcctcctcgttctcttctgcatccggcgttccggcatagcggcaggcctcctcataagccatccgcagtcgcttgaagccttccggatcatcctccggattcgttaccgtcagcttgtcacgataggcattcttcagtgccctttcgtcttttgtctgttcgattcccagaatctgaaacacttcgatcggttccacgctgtcccctccactgtaagtatcaaagttttcgtaccaatagaaaaagatattgaaaaggagcagaaaaatctttctgctcctgaatagtgatcttagaatgtaaacttatctgcaaagtaagcatccagatctttgatagcaacacgctcctgctccatggaatcacggaaacgtacggtaacgcagccatctgtctcggaatcaaaatcgtaagttacgcagaaaggagttccgatctcgtcctgacgacgatatctcttaccaatgtttcctctgtcatcaaattcacagttgtatttcttggaaagctctgcgtagatcttctccgcaccctcgttcagtttcttggacagaggcagcacaccgatctttaccggtgccagtgcgggatggaaatgaagcacagtacgaacatcgccgccctctaactcttcctcgtcgtaagctgcacacaggaatgccagaaccactctgtctgcaccaagagaaggctcaataacgtaagggatgtatttttccttcttctcatcatcgaagtaagtcatatcctcgccggaggtattggcatgctgggtcagatcataatcggttctgtccgcaataccccacagttcgccccatccgaaggggaacaggaactcaatatcggtggttcccttactgtagaagcacagttcctcaggagagtgatcacgaagtctcatctcgtcttccttgatgccaagagacagcagccagtcacggcagaagcctctccagtactggaaccactccatatcggtgccgggctcgcagaagaactccagctccatctgttcaaactctctggtacggaaagtgaaattgccgggtgtgatctcgttacggaaggacttaccgatctgtccgataccgaagggaatcttcttgcgggaagttctctgtacatttttgaagttaacaaaaataccctgtgcggtctcgggtcttaaataaacagtgttcttggcatcctcggtaaccccctgaaaggtcttgaacatcaggttgaactgacggatgtcggtgaagttgtgcttgccgcaggtaggacagggaacattgtgctcctcgatgaaattcttcatttcttcctggctccatgcgtccacactgccttcaatggcaatgccgttctcctcacagaaatcctcaatcagtttgtctgcacggaaacgctcatgacactccttacagtccatcagaggatcggagaaaccacccagatgtccactggccacccaggtctggggattcatcaggatcgcacagtccacacctacattgtaagggctctcctgcacgaacttctgccaccatgcctttttcacattattcttcagttctacaccaaggttaccgtaatcccaggtatttgccagtcctccgtagatctcggaaccgggatatacaaaacctcttgcttttgccagggctacgattttctccattgtcttttccatgtcagtaccaaacctttcttgctctatatttgtattactgtaaagcctattttttcatcagtatcgtaacgacaccatcggattgggaggcatccacatacccatcctctcccatgaccacaccctcgctgatatatagcaccggataaggacagtatatatatgcgcttgcatttgtaatgatcagatgattcttttccaacgccttgtccagcttctcagaatccgccggagtgccgtccgctgcgtttacaaattcccgattcaccgtgagtccctgtgccagcgcttccactctggtcccgtagaacaggtcctgttcgttgtactcggcataactgtccgtatcggcgaactcctgtaccacctgcaccatggctccgtctcccaaaacctgcaccgttttcacattcatgggattctctgtagcctctgtatgtgtggcattgaattcctcagcctcttcctccaccatctgtgtaagaccgtccagattgtagaagtctttgtcaaaagtattcaccagataagaggtcactttgccgtccttctccaccaccagagaggtattctctacagtctcgggaagctttgccgcctgaccgcagcctgtgagggacagtatcaaaagccccgacaatcctgccgtaagaaacttttttattctattctgcctcataaatgagtctccttttttggcatcagccataaccgattttaacatagagttttcagtatttcaagacttttgaacgacctgtccatgaaacgcttccgatattccgacgcgatctgtgaaagttctgcaagaaccttgtccgatacggtaaaggtatataacttttccacagaactctccgctatgtaattcagtgcataccgtgtggattcttccagtttgcgctcctccggtactcccggatattctccgttgacaacgatggccttcagttcaaaaatactgcgcaccagttcattgggaagtgccggtgcacacaaagcccgcagcgactggtagaccagtttcatcatttctttctcatcgttgttctcccggcagtaaaaatccgccacttccgcgaaatacataccgtagcatgcccccacgtagtccgtcatcagttccggaaaatagttccggatctctgcttccgatatcgtataagagttccgtccttcatacagacgaaaagagccaaaagcaaaagggttggtcgctgcagccagccggttaccgggctttctggcccctctggcaaaagcagtgatcttccctttttctctggtaagcaggcatacgcgcctgtcatattcaccgaaaggtgtctgttttaatacaattcccgttacatacagggattcctgcatgatccaacctcccctgcggacaggtctgtacgcccctccgctctgcaatccaccagggggcttttacattccgcaccagccaaaggtttctccttttccgcgctctgcaggtatttcaggtaatcctccactctgccggtatgttcaaattgctgccagtaattcgtgaattgcatcttacgcatccccctcttctatcagtgtattatcctctgtaaaaatagggtctgcaaatttcgtttttctattcgcccatctcaatgtctttcggattatatccgaagtttttcaataagatgtcgctgtctctccagtccttcttcaccttcacccaaagctgcagattgaccttcatttccagcatatcctcgatctccgggcgggcctgggagccgatctttttcagcatttgtccgcctttgccgataatgatacccttgtgggaatctctctcacagatgatcgtggcctcgatgtcacagatccggcctctctccttcatgctttccaccgtcacggcaataccatgaggaatttcttcggacaaaagtctcagagccttttcacggatcagctccgccacgatctgacgcatgggctggtcggtgatggtatcttcatcataaaatgccgggccgtaaggcagatattttaaaatacactggatcagcacatccgtgttgtctcccttcagtgcggacaccggaacgatctcctggaaatccagttctttgcgataggtatcgatgaacgccaggatctcttcctttttcacggtatccgtcttgttgatcaccagaatcacgggagtcttggtcttcttcagctgctcaataatatgacgttctccggcaccgataaagtttgtgggctccaccagccacaggatcacatccacgtcgttcaatgtatgctccgcaacattgaccatgtaatcgcccagcttgtttttcgccttatggataccgggagtgtccagaaatacgatctgtccctcgtccagtgtcagcaccgtctggatacggttacgggtggtctggggtttgttggatgtaatggcaatcttctgtccgatcagtcggttcatcagtgtggactttcctacgttgggacgtccgatcagtgtggcaaagccggatttgtatgccggattttcgttcattattatttctcctgttcttgtctttttccctgacacttttctgtcagccgccggtccgtccggcttatcttatgtttccttacttatttcctttttgggg

SEQ ID NO: 5466 - DNA, 335 bp, Unknown
  gut microbiota DNA sequence
ggcgaatttgtggcggtggtcggcacttccggctccggtaagtccaccctgcttcacatgatgggcggtttggatacccccacctccggcagcgtgatggtgcgggataaggagctggcgaagatgaacgacgagcagcttaccatattccgccgtcgcaatatcggctttattttccagaactacaatctggtgccgatcctaaatgttcatgagaacatcgttttgcccgtggaactggatggggatacggtggatcagaaattcatggcggatgtggtgtccatgctgggactggaggataagctgaagaatatgccaaacaacctctccgg

SEQ ID NO: 5467 - DNA, 9206 bp, Unknown
  gut microbiota DNA sequence
aagagaaaaatctccgtaggcgataagatggcaggccgtcatggtaacaagggtgtcgtttcccgcgtgcttcctgtagaagatatgccttatctgcccaacggacgtcctttggacatcgtgctgaaccctctgggcgtgccttcccgtatgaatatcggacaggtcctggagatccacctttccctggctgccaaggctctgggattcaatgtggcaacacctgtcttcgatggtgcgaacgagaaagatattatggatacgttggatcttgccaacgattatgtaaaccttcctttcgacgatgcagaaagtgcagagtggaaagaaaagggacaggaaactaccgcagacggtaagccctggacaggagagacctttaccagcaagcatggtgaagagcttcttcctgaggttatgcagtatctgtctgagaacagagatcacagaggagtatggaagggtgttcccatttccagagacggtaaggtgcgtcttcgtgacggtagaaccggtgaatactttgatggccctgtaacgatcggacacatgcattacctgaaactgcatcatctggtagatgataagatccatgcgcgttctaccggaccgtactccctggtaacacagcagcctctgggtggtaaagcccagttcggcggccagcgtttcggagagatggaagtatgggctctggaggcgtatggcgcatcctacaccctgcaggagattctgactgtgaagtccgatgatgtgatcggacgtgtgaagacttacgaagcaatcatcaagggagacaatatccctgagcccggtatccccgagtccttcaaggttctgttaaaggaactgcaggcactgggtctggatgtcagagtgctgcgtgaggatcagaccgaggttgagatcatggagactgtcgattacggcgataccgattaccgttatgagatggaaggtgatcgtaagtacgatgacgattacgacaagagctcccttggcgagatgggctatcagtcacaggaatttgatgacaatggtgagctggtgaactctgaggacgacgattacgttgacgatgattacaccgatgatagctttgacggcagtgatgatgaattttaatgctttgtatagaagggagtgccattaatgtcagaaacaaaaaatgaaacaacctatcagcctatgacatttgatgccatcaagattggattagcttccccggagaaaatccgggagtggtcccatggtgaggtattaaagcccgagacgatcaactatagaacactgaagcccgaaagagacggtctgttctgtgagagaatcttcggacccagcaaagactgggaatgtcattgcggtaaatataaaaagatcagatataagggcgttgtctgcgaccgttgtggtgtagaagttaccaaagccagcgtacgtagagagcgtatgggacatatcgagcttgcagctcccgtatcccatatctggtatttcaaaggtatccccagccgtatgggcctgatcctggatctgtctcccagaatcctggagaaggttctgtacttcgcttcctatatcgttctggatccgggaaccacgaaccttgaatacaaggcagtgctgtccgagaaggaatatcaggatgcaagagagacctggggcaacaagttccgtgtaggcatgggtgcagaggctatcaaagagctgctgcaggccattgacctggaaaaagaggcagtagagctgaagaccggtctgaaggaatcctccggtcagaagcgtgcacgtatcattaagagactggaagttgtagaagctttccgtgagtccggtaataagccggagtggatgatcatggatgtggttcctgtcattcctcccgatctgcgtcctatggtacagctggatggcggacgttttgctacctccgatctgaatgatctgtacagaaggatcatcaaccgtaataaccgtctgaagagactgttagagcttggtgctcctgatatcattgttcgtaacgagaagagaatgttgcaggaagcggtagatgctctgatcgataacggcagacgcggacgtcctgttaccggccccggtaacagagcactgaagtctctgtccgatatgttaaagggtaagaccggtcgtttccgccagaacctgttaggtaagcgtgtagactactccggacgttccgttatcgtcgttggaccggaactgaagatctatcagtgtggtctgccgaaggaaatggcaatcgaactgttcaagcctttcgtaatgaaagaactggtagccaagggaatcagccagaacatcaagaatgcgaagaagctggtagaaaagctggatacacaggtatgggatgtgctggaagaggttatcaaggaacatcctgttatgctgaaccgtgcgccgacactgcacagactgggcattcaggcatttgagccgatcctggtagaaggtaaggcaatcaagctgcatcccctggtatgtaccgcattcaacgcggacttcgatggagaccagatggctgtacatcttcctctgtcccaggaggcacaggcagagtgtcgtttcctgctgctgtctcccaacaacttactgaagccttccgatggtggacccgtagccgttccttcccaggatatggtacttggtatctactatctgacccaggagagacccggtgcgatcggtgaaggtaagtatttcaagagcgtaaacgaagcaatcctggcatatgagaaccaggcgctgaccttacattcccgcatccatgtgcgtatgcacaaggtaaatgcagagggcgagaccattaccggtacggtagagtccactctgggacgtttcatcttcaatgagatcctgcctcaggatctgggattcgtagacagaagcgatcccgagaacttcctgaagctggaagtagacttccacgtaggtaagaagcagttgaagcagatcctggagaaggtcatcaatacccacggagcatccaagaccgcagaggtactggatgatgttaaggctatcggttacaagtactctaccagagctgctatgaccgtatccatttccgatatgaccgtccctgagaagaagggtgaaatgctggcagctgcacaggctaccgtagacaagatcgcaagcaacttcagacgtggtctgatcaccgaggaagagcgttatcgtgccgttgtagagacctggaacgagaccgataaagagctgaccgacgtactgctgtccggtctggataaatacaacaacattttcatgatggcagactccggtgcgcgtggttccagtcagcagatcaaacagctggcaggtatgcgtggactgatggctgatactacaggtagaaccatcgagctgcccattaagtcaaacttccgtgaaggtctggacgtactggaatacttcatgtccgcacatggtgcacgaaaaggtatgtccgataccgctctgcgtaccgcagactccggttatctgaccagacgaatggttgacgtatctcaggaactttctatccgtgaagtagactgctgtgagggtcaggctgagatccctggtatggtagtcaaggcattcatggatggcaaagagaccattgaaggcctgaaagacagaatcacaggaagatattcctgcgaggatatttatgataaagacggacagttgatcgttaagcacaaccacatgatcacccccagccgtgctgccaagatcttaagtgttggtgtcaatgcacagggtgagcccattgaggaagtgaagatccgtacgatcctgacctgccgttcacacgttggtatctgtgcaaaatgttacggtgccaacatggcaaccggtgaagccgtacaggtaggtgaagcagttggtatcatcgctgcacagtctatcggtgagcccggtacccagctgaccatgagaaccttccacagtggtggtgtcgcaggtgacgatatcactcagggtcttccccgtgtcgaggagttgttcgaggccagaaagcctaagggacttgcaatcattgctgaatttggcggcaaggctgagatccgtgataccaagaagaagcgtgaagtggtaattaccaacgaagagaccggtgaatccaaggcatatctgattccttacggttcccgtatcaaggttatcgacggccaggtactggaggccggtgatgaactgaccgaaggtagtgtaaaccctcacgatctgttgaagatcaagggtatccgtgccgtacaggattacatgcttcgtgaagtacagcgtgtatatcgtctgcagggtgtagatatcgcagataagcatatcgaagtcctggtacgtcagatgctgaagaaggttcgtatcgagaataacggcgataccgagttcctgcccggaactctggtagatgttctggatttcgaagaaatgaacgagaagctgaccgctgaaggcaaggagcctgcagaaggtaagcgtattatcctgggtattaccaaggcagcactggcaaccgagtccttcctgtctgcagcatccttccaggagaccaccaaggtcctgacagaagctgccatcaagggtaaggtagataatctgatcggtctgaaggagaacgttatcatcggtaagctgattcctgtaggaaccggtatgaagagatatcgcaataccagactgagcaccgatgccgtagagaccattgacttcggtggtgatatgtacggtgacgatgcagaactgaacctgagcgacggaagcgaactggatgcagaaggtgcagaactgaatgaagatgtgaacacagaagcagaaactgtggaagtgggaacagacgctgataatcagtaaaataaaaagactttattaagaaaggctctccgggattttcccggggagccttttagaatcggaacaattattgcaattcttctgtattcagaacctgccaggcagtgatccggtaaaaggtatcttcatcagattccggatagaggatctcaatggtcacctgcagggtctgtaagtcggagattggaatcacgtaagattttccgtaacctaccgccacaaaataggcttcttcgctgtcactggatgcatacatgcgttgcaacgtcttatccatacctgccagggattgttctgcctgattgcaggcggcataataagcggtggtacgttccagcacacgggcgctgagtttgctatcagcgttggcactgacgatggacagtacggcaaaagacaccaggcagaggatcacgaataccagaaggatcgaggcggatccgatattcatgccgaattgtttttttctggaggaattattcatgggatcccctcctttctgcggtgtgatgcatgacagagagtgtgtaaatgggagattccggtgtagatacatcatagacggtgatctcgcctttcatgattccggtctcttctgccggagtgctttttagttctgcataaaagccggcgttatcttcggcagtgcacagagtccagctgctgtcaaaggcaaggcggagagtgttttcatcggtcagctccgatggggagaacaaatcctgcatggcagccacattgccctccagagagagataggactctgccagattctgtgcctgaatgacagcatgattctggtttaccgtctgtgtgctcaaaagatgtgagcgggcaaacaactggatacagacggcactggccagtgaaaaaaacaggatcgctatgatcatttccattaaaaataaactggatctggaatgtttcataataagttcggaatcctttctgttcggtttctattctgtggtagtattacagtgcacgtggatataaaaagtatggtcctcttcggaggcggttctcagggatatccggatcagatcgtccgacgcataggataaggagaactcctgcaagtccataatatccgtaccggcaggcaatacctgtccgccgagagaagctccttcccgcataaaaagttcttttaaatgtccgtcatacagatagaggtaagtacagtaggtttcttcgtcaatttcggaaagcatgcagagcgccggaacattttccagatcggtcaggaaaatactgtcagcggtatcgttctgccgcaccttttccatgatataagacaccgccgtccggctttcgtaattgacgcccatatcttctacagtgtgctggtatacatctgctccgatggtaacaagggcaagtgcggagacagcgaatacaccgaacaacgccagaacgaacaagatatccacaataaaatgtttttcctgcttctgatgatttctattgttcatatgtcagaaactcctttagtgagcaccggtccggcgaagtacagtgacttccggaagaaggttgctgccataatattcatagtcaatgaagaagctgtcctcgtcatacaacagtccgtaatgctgctccagatattccagagaaggaggataacagccttctacggcatagcactgggaaatgctgtgttccaatgcggtttccagactttcctgctgcttgctcagagtagattcaccgacggagccgatgccccgcagaaaaagaacaaacaatatcacaaaggccagaatgggaagtaaatagatcagtttacgcccgagggacatacttttttgctcaaaacggttcatagtatcgtactcctatccgatgctggtcataatacccataagaggcaggatgaccgataacaggatcaagcccacgatcaccgacagaataatgacaagggtcggctccagaatggcaatgatggattgtagtctgtggttggtattttcctcgtaacgatccgctatttttttgagaaccacatctacgttaccgctgcggaaaccgacagataccatttgggaatacaggtggttgaaaatgccagcaccggtcagagcctcggcaaaattggcaccggcattaatggcttccttacagctcagaatcttctgtttcattttctcgttgcctaccagagcggccaccatatccaggctggaataggtatccataccgctgcttaaggtcagtgccataccgctggcaaaacgttcgcaggccacactttcataaaaacgtctggtgagggggaaccagttcaggaaccgggcggtgacacgtttgccggtctgggttctggtagcaaaaaggtacagtaacaacaatatgcacagaatacttacgaaaataaaggaataccggttcagatggttgccgagacgcaaaagagatgcagcaaacccggtcatctcactgcccagctctatatagacctgctcgaagatcggcatgacgcggctgaccagtaccacgatgacagcggccatcatggcgatcatgataaagggatatgttacagcatcccggatactgcctgcgatggcatcttctttttcataataatctgccagagagctcatacacacatcgagattaccggattcttcacccagagcgatcatatgcaggcagtaatcggggaagaccttggtggcttccagtgctttgtgaaagctttctccctgtcggcatacggtaaggatctcctcgaagatcgccttgccttcgggagactgggcatcactttgcaggatggacatgccctccacgggcggaatgcctgcctgaaacagcatggcagcctgactgcaaaaagaagcgatctcttcattggaaagtagttttttctctgtggtcttcatggcgttttgttccctttcactaatacattttctgcaggatataattactgccgtcaccgatgaactttttcagagtcttgtcatctgtgttggcaccgaacgtaggatccaccagggtccagacattgccgtcaaattctatgatgccgttcagccatccggtatcggcggtgtagacactgatccaggcatggtaggcatcctgggcatagccgacctccagccgggtcgggatccgctgacttcgcagcatgcttgccattaccgcggcataatccagacagataccggtgccggaagcaagaatggcatccacatcggaggtatagcccgtaggaggatcggaggctttgtcatagtcgtaagtaatattctgggtaatataatcatagatccgggtgatcacttccagatccgaggaagcaccctcggcaagttcctgtcccttggccaccactttgctgtccgcagtaaaattcacgtactggttggggtagagaaaagggctgaatgcatccgtaatctgtacatccaggtctgcatacaggcaggtggcatagttggtaccggagatattttcatagatcgtcacgtcataatatccgtctccggaagacaaggggaaagtctcatagccgccaccgtgcagatcgtaagtatagacaacagtatccggcccggtaatgcgcagtttgaccttgggacaggtgccggtgtaattggcacagacatagccgtcagacatatgagaatagtcaatgacagccacatcattggaagctgttgctgttccgtcggcccggggcacaagacagacaggcgtggcatcccggagaggctctgcgtcagttacggcttctgtttcaggagaagaggcatccgcagagctgatattcgtatccgcagaagaaggaactgcggaggattgtgatggttcgtcgtaagtgtttgcgacgggggcatccacaggcagattgtcagagccggatccgcaggcacataagccgattgtcatggaatatgtaattagcaaaatgcgcagtcgcgcagataattttggcatccgcataaaaatcgttacatcctgttgttattgttccaggcccgttacattatcgggagtaaaaagcaggtggagagtctcaccgtttttgacggggacataaatattggcttcctcggacaaaaacggaaaattgatcacacccttggaggaatccacagagagcggttcgatgatctccccggacacagtctccataaaagcctcctcgtaaagaatgttgtcaccggtgaatttcagacttaaaatattattttccacataatccagtgtaagcaccgcaggtgtgggggccaacagtttctcagtcatctcagagagaggaacgatggcgagcggcgacaaaaaggtcagcacgaagatcagtgtcgtggcaacgatcagcc

SEQ ID NO: 5468 - DNA, 14544 bp, Unknown
  gut microbiota DNA sequence
atttcggctggatcatcacatcctataggaatctgggacagccggagaacccctatgccaaaatactggcagcagccctgggcatctacgggattatactggcttttagcctggtgctcatgatctgttccgaggacggaaaagaaaccatggagatctggcagagcatcggcaggtcatcggaatacctgaaagccgtgaaacaggatattgtatatccggatgacgtgttggacggtctcacggagacggacagtgaggaaggcagatttgcttccgcgaagacctatacctgcggagacagcgaggtagtaaaagaagcttatcatgaagcccttttagagagaggattcctggagatgcagcagtatccggaaggcttctccgtgtataagatcgaagatccttcagaatatatcgtagacgaagaagaggagatgttctatcttgtgatccgcgcagaaaatgcatcggaaggaattgcggtgactgcgacactggtggatgagaactgggatccggtacaggaataaaaatagaataagaaaatgcgacaaagggcccggaggagaaatcttccgggcccttttagagggaaagtgttcgttgtaagcttattgtgtaagaggaattctgtggaccaccctgcgatagagcttccacaggagcacagcagggaaactgattgccagatatgctgtggataaaagtccggtagcaccgcctacgattgcaataattaaaattccgatgttcatgatggattcctcgcttttttgtcagtctgtaaagtgcttgctgattccttcaaaaactttacatatcgtattatagtaaacggatctccctgggtgaatagttttgccagacccttaacaccattttgtcgggatatttacaaaatctttgcaacacgtttacagaatcttaacggcaggacttacggtcgggaacgatcccgggagttaggtttgcaatagtagggaatatcaagtataatagagaaaattgactgttgctcagagaaaaatagtcggagaaaataaaacggaggtaggaatatgagtatgacactggaacaggctaaggagaagcttgctaagtatggtcaggaacatgttctgaagtattacggggagctcaacgaggaagagaagcagggaattctggatcagatcgaaactacggatatgagcattctggaagcttgcaagcataaagaagatctggcaaaaaaaggagtgatcacaccgttggctgccatgcagttagacgaaatcgaagcaaacagggaggaatttaccgcaaccggtatcgaagcgatccgacagggcaaggtagcagcggtccttctggccggtggtatgggcaccagactgggatctgacaatcccaagggaatgtacaatgtgggactgactcatgaactgtatatttttgaatgcctgatcaataatctgatggaagtcgtacatcaggcagacagctggatccatctgttcgtaatgaccagtgataagaacaacgatgcgaccatagcctttttaaaggagcatgatttcttcggatataatgcggaatatgtgcatttctttaaacaggagatggctgcggctaccgattatgaaggtaagatctatctggaggaaaagggcaagctgtccacttcccccaatggtaacggcggctggttcatttccatgaaaaacaatggcatgctggacattgtacacagagaaggcattgagtggatcaatgtatttgccgtggataatgtattgcagcgaatcgcagatccctgcttcatcggagctactattcagaaaaattgtgtggtaggctccaaggtggtccgcaagaatgcaccggatgagaaggtaggcgttatgtgcttagaggatggcagaccttctatcgtagaatattatgaactgaccgatgaactgatgaatgctaaggatgagaagggagaacccgcgtataattatggtgtgatcctgaattatctgttcaaggtacaggatctggaaaagatcatggcagagaagatgccgctgcatatcgtagagaagaagatcccttatctggatgctgcaggagagttggtaaagccggatactcccaatggttataaattcgagagtctggtgctggatatgatccatcagatggacagctgcctgccttttgaggtagtcagaagaaaagaatttgcgccgatcaagaacaagaccggtgtggactctgtggaaagtgccagagaactgctcaccgagaatggtgtggtgctgtaaacatttcgacagattttcacaacataaggttattgaggaatcgatagaattacagtaatctgatactgtaagaaacgaagaaaaaatttcatccggctctgacagatgagagattgtgcagccgccatagtgaacaaatagtattgtcctatgcacggcggataggagagagtgtatgagaattttggtaacaggtggtgccggattcatcggcagtcataccgtagtggaattacagcaggcaggctatgatgtagtcgtattggataatctctgcaatgcaagtgagaaagtgatccccagagtagaagccatcacaggcaagaaggttcctttctataaggcagacattctggaccgtgaagctctggaagagatcttcagcaaggaacagatcgacgcagtcattcattttgcaggactgaaggcagtcggtgagtccgtacagaagccctgggaatattatgagaacaatattgccggtaccctgactctggtagatgtcatgagaaaacatggtgtgaagagcattatcttctcttccagcgctaccgtatacggcaaccccgcatttgttcccattacggaggaatgccccaagggacagtgcaccaacccttacggctggacgaaatctatgctggagcagatcctgacggatatccagaaggcagatcccgaatggaatgtgattctgcttcgttacttcaacccgatcggagctcacaagagcggtaccattggcgagaatcccaacggtatccccaacaacctgatgccttatatcacacaggtagcagtcggcaagctgaaagagctgggtgtcttcggtgatgattacgatacccccgacggaaccggtgtacgtgactacatccatgtcgttgatctggcaaagggccacgtaaaggctctgaagaagattgaggagaatgcaggactgaagatctacaatctgggaactggtgtgggctacagtgttctggacatcgtgaagaacttcgaagcagctaccggcgtgaagattccttacgtgatcaaaccccgccgtgcaggcgatatcgccacctgctattccgatgcttctctggcagagaaggaacttggctggaaggctgagaacggcatcaaagagatgtgcgaagactcctggagatggcagaagaacaatccgaatggatatgaagaataatctatagtttagtaaatggaaagttagcatagctacgagccatgcagaaatagagtggaacagcgtcgatgggagcttgcgcacaagcgacgctgtttcgctctatttctgcatggttcgtagcgtagggctgtcatgcaagggagcctgccgcaaacatcctgttcattccatcctgtctttcaatgcttttcgagaaaaaatcaccaccttccgacaatcattcttggaaggacattccatctgacgtgggcgttttgtgctttctcataatatctgtacactataggcatttctattgctttggtgcaaatcgcatcaaaatatcaaaatcagtacaaaaaacttctaaatccaacattttttgtactgattttattatttttcccattttagcgaaaataagctcttataaaaggccaaaatctcctgcttttgtatttttttagcaaaaaacggcattttcaatacaaacagaacttccggagtggtggcagcccatactacagctggttgttgacattttcttaaaaagtgttagaaggcaggggcaatgcggacacgatgtcagccggagattttaagctgtggtatgggatgcttgagtatacagtgcaggagcaaatttgagtgtgaaaaatcttcgctttacatttagaaactttttacgttgataagcttatcattaagagaaaaactgtaaagtgcattatttgcagacggaggaaaatgtctgtatggtacggaacacctgctctactgtatccgtcatattggtcatggcattgtcggtatgcatagcctcatccagggacaccacgttccgcagaatcgggaaaaaggcatcaatgccctctgcgttgcaggcaacggcctctttgaccacgcagcctgaaaaagcaagtaccggtttttcatattttttggcaatcctggcaacaccgatgggagcttttcccataaccgtctgaccgtcaaggcggccttccccggtgatcacgacatctgcatcccggatatatttttccagatgggtttcttccagaatgatcttaataccggattccagtgtggcattgcagaaggtaagaaaagcaaatcccataccgccggcagcaccggcaccgggatatttggcatcggcatgaggaaactgttctctggccagagcggcataataagccagccatttgtccatctgcaggatcatagtggaagtagcgcccttttgcggtccgtagatggcggaacatccctgctctccgcagagcgggttggagacatcgcaggctatgcggaaagtacattccttgagttcgggaagcacatgatccgtagtgatggattccagatcctccagtcctttggctccgaagcggatctgatttccgtttttatccagaaagccaaagccaagtgcctgcagcattccgacaccgccgtcattggtggcactgccaccgataccgacaataaaatgccggcagccattctggatcgcatctttgatgacttcgcctacaccgtaagtggtggtgttcagaggattcttttcctctccgctgacctgggtaatcccggcggcactggacatttcaatgattgcggtatgggtctcgtcgacgatgccgtaaggacagacaacggggtgaccggaaggacctgtgacctgcacctgtgtcatacggccgtcacagccgtttaccagagcatcgacggtgccctccccgccgtccgccagaggacggacggtaatatgtgcatctttataaacacgtttgatccccgtggcggcgctcaaacccgcctgcatggaggtcatacttcccttgaaggaatcgatagctattactacattcataaggttcctttccgctgccgccggaattcggccgacaactgtcgttttcgtatagattttcggaaaatggcataatttctgaggatattatagcaacaccggaacaaaagaggaatggttcccggagaaaaataaaatttagcgtggtacagtggcaaaaacatcctataagatcattgcatctgagaaaacaatccagtataatgaaagaagtgcacatttagatgcacattacgcataagaagtggaataacaggaggacgagcatgattcagttaacacagggcggcgcttacctggtaaacggtacggacatcgtagcggataccccggaagcagccagtcagatacaggcgaagaccggcattacgatctccaaagaagaagcagcgaaaaacaccatggcatatggtattctgcaggagcataatacctccggcaatatggacaagctgaagatccgttttgacaagcttaccagccatgacattacctttgtaggtattatccagaccgcgagagcatccggactgcagaagttccccatgccctatgtactgactaactgtcataactctctgtgtgccgtaggcggcaccatcaacgaggatgaccacatgtttggtctgacctgtgcgaaaaaatacggcggagtctatgtaccccctcatcaggcagttatccatcagtttgccagagagatgttagccggcggtggcaagatgatcctgggttccgattcccatacccgttacggtgcactgggtaccatggctatgggcgagggtggtcccgagctggtaaaacagctgttgaaccagacctatgatatcaacatgcccggcgtggtagccgtatacttaaagggtgctcccgtgaagggtgtaggtcctcaggacgtggcactggctatcattggcgcagtattcaagaacggctatgtaaaaaataaagtaatggaattcgtaggtcccggcgtggcttccctgagtgctgatttccgtatcggcattgacgtaatgaccacagagaccacctgtctgtcctccatctggaagaccgatgaccagatccgtgagttctatgagatccacggacgtaccgaagactataaggaactgaatcccggccaggtggcatactatgatggattgatcgaggtggatctggacaagatccgtcctatgattgccatgccgttccatcccagcaatacttacaccatcgaagagctgaatgcgaacctgatggatattctggatgagacggaaaagcgtgcgaaagtaagtctggacggtgcggtagacttcactctgaaaaataaagtaaagaacggcaagttcattgtagatcagggtattatcgcaggctgtgccggcggcggattcgagaatatctgtgcggctgccgacatcctgaagggcagatacatcggtgcggatgagtttactttaagcgtatatcccgcatccatgcccgtatacatggagctgatccgcaacggctgtgcggctaccatcttagagaccggtgcagtcatgaagactgcgttctgtggtccctgcttcggtgccggtgatacgcctgccaataacgcattcagtatccgtcactctaccagaaatttcccgaaccgtgaaggctccaagctgcagaacggccagatcgcttccgtagctctgatggatgcccgttccatcgcagccactgcagccaacaagggtgtgctgactcccgcaacggacttcgatggagatttcggaaaatacaaatatcatttcgatagcaatatttacaagaaccgtgtctttgattcccacggtgtggcagacgagagcgtagagatccagttcggccccaatatcaaggactggcccgctatgggggctctgcctgagaatctggtactgcaggtagtatccgagatccacgatcccgtaaccactaccgatgagctgattccctccggtgagacctcttcctaccgctccaatcctctgggactggcagagttcactttaagccgtaaggatccgcagtatgtaggacgtgccaaggagatccagaaggcagagaaagagcgtatgaacgacggacatccctgtcaggcagttccagtactgaaggatgttatgggtgaagtaaagaaacagtatcccgatgcaagtcgtgagaacaccggattcggttccactattttcgcagtgaagcccggagacggttctgcccgtgagcaggctgcttcctgccagaaggtattaggcggctgggcaaatattgccaacgagtatgccaccaagcgttatcgttccaacctgatcaactggggcatgcttcctttcctgatccagcccggagacctgcctttcaagaatctggattacctgttcattcctggtattaagaaagccgtggaagacaaggccgaggaaattaaggcatatgtggtaacaaccggagaaggcatgaaggaattcaccctgaagctgggagagctgaccgacgaagaacgtcagatcatcctgaagggatgcctgatcaactataaccgagtgtaactattcagagacatgtgactaaccatcgcagatgcgtttcgcgaagagaggctgaatagttacaatgagaagtaaggagaaaaaatatggaatttaacaaaccggtatccaaccccatgatggtgggatccattgaattattaaaagcagaggacaccccggaacacagacagatgttcctggatgaactgcagaaagcaaagttcctgtctccggtcgtgatcgatccggtgcctgtgcccgatgaaaacggccgggtgaccatcgcaagagatgccaaagtacagttcccgatgctgtccaccgaggacggtcggaagttcttcatggcgttcactgactggacagagctaaaaaggtggagagatgaggagaatcagcagactttcgccatgaactttgacgattatgcgggaatgctgctgcgcaaagatgcacagggcaatatcagtccggcgctgggattcgtgatcaatcccttcggtggcaacatcgtagtgaccagagaaatggtagccagcatgatcgcagcaaagctgaaagcagccggcagaccggtgcctcccgcacccggaacccctggcgctcccactcagccccaacagcagtaaattaacactaaataaaatgtccatagcggacgatataagtagcagagaggtgacatggccagtcacttcctgctacttattttttacagtttgataatgacaccacggatggtaatcagacagaggcatattatatgtattctgtttctttaccatctttttttagtttaacagttcagccatgcaatatcatatgttctgcgtgggtgctggcacacaaagcagaacatatgatattgcatgagcggagcgccgcatgtatgaaataaaagatgagccgcttagcggcgtcgactgcggagcaggcgcttttatgaatacatgcggcggtgaactgttaagcgttacaggaagcgcgccctgttggttcgtggtgaggtcggggaaaggagaaaattacagatttgagaattgattccgcaagcataggaatggattccgccagaagctatcacgcttctaagacaagcgtcagacgatttgagataacggattatcaggcaggtctgacagatgtatccactaagggacagaagacaccgaatggtgaggataccacacagaacacggaggaacaggagaacactgcagagaacaccacgatgacagccaaagactggcagagtcgtttgctggtatcttctgccagatgggatatgcgaagcagtgccagtgaacagacattgtctaccatccgggaatatacggtgcgttatatttttgatttattattcccgtccaggaacagcactttgcgggactggatgcaggaaaacggatggagcagcggtaatcagaccggaaacagctggaatacagggaatagcgtaaataatacccagacgaattccggcagcacacagggaaccgcaacacctgcatcagacgtgttcaatctggtcacgtcccgtgtgaaaatattgaactatgtgagcgagacctggaacatagaacaggaggataccagtttttccaccgtgggaagcgtacggaccaaggatggcagagagatcaattttaatgtaaatgtaaatatgagccgcagatgcgaggaatactacaaagagcaactcaatgtagcagaattcacgctccatgatccgctggtgatcaacctggatactgatgtggcagaagtgtcggatcagaccttttattttgatctggatgccgatggcaaggaagaagagatctccgtgctgaatggcagcggctatctggcactggacaagaacggtgacggcactatcaacgacggcagtgagctgttcggcacccggaatggggatggctttgcagatctggcgcagtatgatgaggatggcaatggctggatcgatgagaacgattccatctggtcaaaattaaaaatctggtgcaaggatgaaaacggcaacgacgtactgtacaaactttctgacaagggtgtcggtgctatctgtctgcaaaacgcttctacggattttaccctgcagggagaccgtaaggctcaggacggcactaccaatgccaatgcgaccaatgctgtggtccgcaagaccggtattttcttatacgaaaacggaaatgtgggtacggtacagcacgtggatatggctgcctatgccgcacaggcatagaataaatataactattcagttacttcgccctataaatagcatcaaatgttcttacgaatgcaaacattcgacgctatttacatggctctgaatagtttcaaataaatgcaaatttcatatcgaagacattctgaataaaacccatgaatcgggcaagactataggataaaccagggaaagtggttgaaacgattgtatagcaggcagttgactcagggaacaggaaggatgcggataagatatgagaagaaataaaaagagcggtattaacaaagagcgtattataatgttagcctcttcagcctttgttctggcagcattgaccatgacaggggtctatatgaaggggcagaatgtggagtccagggatgatggttataccttggacttcactgcgcttcccaacaatgcggatgacaaattacaggagatcacggagaataacgacgaacatcttctgaaggaggacgagaacatccccggactgacggcaaataatacagcgggaaatgagatcgcgggagctcctgtcaccgaggatgatctggattatatgccccaggaggtaggctccggcaacgtagagattccggggctgacggatcaggagacgctgctggaggccgcacagaaagagcagcagaattccgatgccgaccgacaaaaggaagagaccgggggaaagcagacagcaggcggggatgtggtcgttgagaagacactgcactttgcagaaagcgacggattacagcaaccggtgcagagtgatattctgatgcattactctatggacaagagcacttattttgctacactggatcagtataaatacaatcccgccaccattttttccgcggaagaaggtacggcagtgaccgcctgtgcacagggaaaagtgacttctatcttcgaaaatgaggagatcggcaaggcggtgaccctggatctgggtgacggctatgaggccacttatggacagctgacggagatcacagtgaaagagaattcctatgtgaatcccagcgacgccatcggcagtgtggcagcgcccacgaaatactacagcaccgaaggaagcaacgtatactttgctctgacccacaacggggaaccggtgaacggggaggcattgttccgctgatgtatattgtaggaggcaggatcctgaccatggcgggcagagagatccccgaaggaatcctgcagataagaaacgggaaaattgcacaggtaggtgccagaggtgaggtgaagttacagccggaagaaggagagcaggtagtgatcgcaaaaaatgcgctgatcatgccgggcatcattgaggcacactgccatatgggtatcatggaagaaaaaaagagcacggaaggggatgactgtaatgagacagtggatcccctgacaccggctctgcgggctatcgatggtattaatcctatggatgcagcctttgacgatgcggtgcgggccggaattactgcagccatgatcggacccggaagctctaatgtggtgggcggccagtttgccatggtaaagactaagggacgccggatcgacgacctgatcctgaaatcaccggcggccatgaaggtggcttttggagagaaccccaaggtcaattattccgggcagaacaaaagtcctgtcacccgtatggccatcgccgccatgctgcgcagggaactctgggagagcagagaatatctgcggcaaaagcaggaagcggcggagaagggagagtattttgcaccggattttgaaaaagagtgctatcttccggtactgcggggagacatcccgttaaaagcccatgtccaccgggtggacgatattttcacagcaatccgcattgcaaaagaattcggtataaaaatgacgatggatcattgctcggaaggtcatctggtggcggaagaactggcgaaggaaggatttccggccattgtgggaccggatcttaccagccggaacaagatcgaggtgcagaacatgtcttttaagaccgccggagtgctgaaccgggccggtgtgatggtcgccatcaccacggatcatccggtgtcacagatccagacactgccgttgtgtgccggacttgcggtaaaagcgggacttccaatggaggaaggtttccgggccatcaccatttatcctgcgaaaatctgtggcgtggcagaccgcattggcagcctggaagtggggaaagatgcagacattgccattttcgacggaaatcctatggaaattttcacacgaaccctttatactattatcaacggggagatcgtgtactgtaatgtccccagggaatgaccggaggaatatcttgagatacagcaggaaaagtgcagggatcctgtccctgctattactatttaacagtataggtatgaccgcctgcgggcaggcaacggcagagacagggcatgtaagcataagtatgaccggcatggaaaacacaccggtcatcaactatacagtgcctacactgacacccaatgtgctggtggatcagcaggggtatgccgcggtcggtgaaaaacaggcagtggtgaagggcagacagtcggtagagactttccggctggtggaccgggagaccggagagacggtctatgaaggcacggtaaagcagactgattacaacggggagctgtctctgtacatcggaacagcggatttcacggactataccggggaaggtgagttctatctggagtgtgacaatgtgggaagatccctgacgttttctctgaaagaagaccactatcaggaactgttggaagcgttgtgcacgaatgttcatgacagatgtcaggatcgcagtattaccgaggatgagatcatcactttgctggaggcctgtgagtggtatccgcaggtgcttgcggatgataatggcaatgatatcccggatctgctggaatctattgccgactggctggaaaaaacggccaacgacacagaaaagccggaaccggagaacatgtgttacgtggcggtgatggcaaaattcagttatctgtaccagaaatatgatgtgcaatatgccacacaatgtctgcagcatgcgtcgtcggtgtacaccaagctgatgtcgacatccggcagagatgcggagaaattcatggcgctgacggagctttaccgggcggcgggactatacacttaccgcaatcagatcctggagtataaggactttttcgaggacaataccagttatctggaagaaacggcctatctgtatggctccatgacgtatctggccaccagacagccggtggatgtggacctgtgcactgtattcatggaaagcatccggaatcggggcgaggagctggccaaacgttcccataacatgatcgatgccgtaatgaatgtcaacaatggaaccgaggatcttctgaagcgggcagaagaattgtcctgtgctaattatgtgttatacagttatcagtacacggagattttagaggattttctgcattacctgatgggacggaaccgggattcggtgagttattatcccgaagagggagacgctgcggattatctgttactgatagcccagcaggtctccctcgcggatagacattagaaagatcagatcagttctttgtttttgaaataagtttcggagataatattctgtacataggtgcccatgctcttgcgagtctccttgtccagttccttcggataaataggcttaccgtattcaatgactacggtggccttttttattttcggaaaatgatcttcaaataccgcagcggaattcacaatagtcatggggataatgggaacatttgctttctctgcgatcttgaaactgccctcgtggaagggaaggaaggtatccggggtcttgttgcgggtgccctccgggaagatgcagatggaaatcccgtttttggctttctcaatggcctgcagaatggttttcagtcctgccttgatgtcctggcgatccagaaagagacagtgaagatctttcatccagatgttaagcaggggccattttaacatttcttttttcgcaatataaccggtaggtctgggaacacggacataggtcagcaccacatcgaaaaagctgcgatgattgccgacgtacagcacagcagtgtcggtgggaatgttctcttccccaatggcaatgactttcgtgccggaaagacggatgacccagcggaaggcccagtttacaatggccagggaactgcggtccttaagaccggggttaaatttgccgatgatccattccaccagcattaacggcgtggacaggatcaggaataatactacaaataatacgacgaatataaaacggatcataataataccaatgcctttcagtaacctgcaaactttcaggtgccttggcaccttgtgcaggcacaaat

SEQ ID NO: 5469 - DNA, 915 bp, Unknown
  gut microbiota DNA sequence
atgatcacggactgttccttctcgaaatcataggcggtctcatccacctgcatctgctccttaatactttcgatcagaagctgtttgcattcggaaggctccttgatatgcttttcttttacctgctgttttaatctctccacaatggcagtggtggcattgacaccgatatctcccataatgaggatttcttccagttcttcgtagaaatcatcatcaatggcggaaaaaccgctgaagaccgaatcgattccccggacaatgttatcacgggtcttggtcagcccttctttcagcctcgcaaaaaagcctttcttttcctcactcatcccttttcctccaatcagcattctatccagaaaaacgcttgcgtttttcttgtatgaaacttagaacttcttcacgaaagagcctttgctctgagtgattagaagttcttttcatactctaatcgtccaggtccttgtcaatgaggttgacgctgactaaggtagatacgcccttctcctgcatggtgataccatacaatctatccacctgttccatagtgcctcgtctgtgggtaatgacaatgaactgggtgttcttggtcagcttatgtaaatactttgcaaaacgtcctacattggagtcatccagtgcggcctcgatctcgtctaacagacagaatggagacggcttcaggttctgaattgcgaacagtagggatatggcggataaagccttctctccaccggagagctgcatcatattctgaagcttttttccggggggctgtgcgatgatgcggatgcctgcctccagaatatcctcatcctccatcagttccagtgttcccttaccaccaccgaagagttccttgaataccttatcgaactctctgctgatctctgcgaatttctccgtgaactgttt

SEQ ID NO: 5470 - DNA, 19900 bp, Unknown
  gut microbiota DNA sequence
ataatctctcctgctcagtccgcagggcatccctgtggctctgcaggtctacatatgtcaatgtcacatcctgtacattctccgaacgactggtcacattgcccagctctgagaccgtattttggaactcctccagtctgtccttcgggatgcggatggtcagattggcattccttgtagaacgataactataatatgtactgccgttataggcatccagactttcgatatagccgccgagctctgttactttattctctaccgcgcttaacagcttatcatactccctggtctcgacatccatattcacggtcttgatcagtttccggtctgctgtggctgcagtctcctcaggcactgtagtacttgtgtcctgagcatttcctgcggaatcgtacccttctgtcatgccaaatccatcttcataagcggacgcctccggtgcagctgcctcattggaagcaacagcataatccgcatccttgagatcactgattccgtaactgccgttcgatgagctgccgcaggcggtcagcgataatatcatgccggcagtgagcaaccctgtaatgatctttgtttcaaaatttcgttttttcataaccctctccgttctgcggacggcatcctgacagcctgtcggatccgcctgctgttgactttttattgttcacctctataaacgaaataatatcacaaaagttctttatttatttgatctttttacgattcagaaccacttttgcaaaatcgcagctttccttttgccgttttaaaaaagattttccaccttcaggaatctctcctgttcctcctttatcttagaagccgtgcctacgacacagagcagatcctcctgcataaatgcacggatatgtgcggacaatgcacggatatcctcttcggtagccgccagtagttcgtcgcgttctctctgtaaagtggcattatccagtcctgtcatataggcactcagggaatacagtccctttgccgccggattcatgggtacgtccagatcactgaccgcaccgatgatatactgggtcatggtacgttcatctgctgtgaactctgcaatggcatctgcagctttctcgtaagtttcaatggtcttgcccagattcggatctctgtaggagacaaagtagctgtcaccggatctgccgaagctgcacatgcagccgtaggcaccacccttgacacggacattaacccacagatattcataccccatcatgactttgagtactcttaatgctcccgtatattgcagtccactcttgcggaaattaccggcacggcatacgtaattgacctgaccggaggttaagaaaccttcgtttttccgggaggtttccggaatgtaatgttctttttccacgttttccatataaagtgctgctttgaaagcctccaccggagcatctaaaagagccacggctttttcctcacctacgaaatccaccatgaggttttccggacggaagatcattttcactaaggtctgtaagatttccaccaattcttcttttttctcgtcaaaatgagcttccagatccgtgatcagacgatagaacgggataccggaaatctcttcgctcacagctccgggaatactgccgtaggataaggctcttccggccgccacactgtgtcctccggaggtcatctgtgcctgcatccgggacttgccctccgccagaatctcatacagtctcttggcatccgtaaaatcactggtcattacgatctcacgcatcagatcgattgcttccgcaaggcggtcataaaataccttcgtcttcagttccagagtcagtataaactgatccgtatcctgcagcttgccatagacattatttaccgcagccatgccgccggtgaccagattcatctcattaaacagatctccataagcataatgctccgtatttaacagtcccaggcagcccttcaaaatgccgatatacgggaaatatttaccggggatctgatccaatctgaagatcagacgtaaatagccgatgccgtttgtaaacagatcatgatacaaaagtgtggtatctccaatgctccgcacttcgttcaccggcagatttgcctctttcttcatatcttcccgttttaacagagggattttctccagatcttcctttgcgtcttcgctctcctggaattcggtcagcttctggaaggtctccttcacgttctcgatctcttccggactcatggcagctttcacctgtgccatcttttcccgctgtttctgctcctgctcttccagaagtcccagcttcggctgcaagatcaccacgctgcgatgggtattttccagcagatatttctgtaccagaccctcaaaatatccggtcttcactttccctcgaagttcagcgaaagtctcgttggcctcgatgtgaatgaacggcagtctgtcatcgtacagccagctgtccagcacctgtaaaccgtacataagtcccttggggtaggaaccgaaatccgcctctctgtatttgaattcataataattgatgccggcaagcaatgccttttcgtcgaagccgtcctttaccagctttttcagcacttcttccgttacctgtaaaaattcctgttctttctctacggaagtgtccttcgccaccacactgaaatagggctggcggataccattctcatagatactgcagacatccttacccacaccacagtccaccagggcctgttttaagggtgctcctggagcggaacacagggcatagtccaggatctggaacgcaatgtaaagcttcgggtccagactattgcccacgcagaagttctgggacaggtaggtattctcctcctcgtcctctccctcgccgatgggacattccctgacaatacgattcggcgtggtaaatgccgcctcttccgtcacttcggaatccacctcaagggcatcgtaggcagacagataatgctcatcgataaaggtcagtttctccgccatatccatattgccatagagatagatatagctgttggagggatgatagaatttccggtggaaattcaggaattcttcgtaggtcagctcggggattgcttccggatcacctccggattcgcagccgtaggtggtgtgaggatacagggaattcatgatctcccgctccagcacatcatccggagaggaaaaagcacccttcatctcgttatagaccacaccgttgactttcagctcctcgttgtcaccttccagctcataatgccagccttcctgtcggaaaatagattcgtttttgtaaatattcgggtaaaaaaccgcatccagatagacatgcatcaggttctggaaatctttgtcattgcagctggccacggggtatacagtcttgtccggataggtcatggcatttaagaaagtgttcagagacccctttaccagttccacaaaaggatccttcaccgggaattccttcgatccgcataatacggaatgttccagaatatgggctacaccggtggaatccttgggtgtggtgcggaaaccgatatagaataccttgttctcgtcatcattggatacaagtgccacccttgctccggtcttcttgtggcggcacagataggtcacgctgttaatgtccgggatctgccgtttctctataatctcatatgtggataaatcttctactctcatttctgatgtgtcctcttttattctatcttaatcgatttctccgtgctacgcactctcgaaatcgtaacgaccattcgcaatccggactatcgtccttcttgctcatgttcgtttgctcccctcatagaaagccttcgccgcctgcaagcagtcgctcatgctttctatgggtgagcttaatctatcaaaacgcggccagtgccagcttgctcatggagatttcctgaatcacgacacccttcgcctctttctcctccggtgtcatggcaactaattcccggatgttcaattccttcgtgacataacgctttttgcctctgccgaaaatcctttttttctcctcgatgatattgatcttcacccgagccttgatccggtcgtagatcttcacaagaaaactgtccggcttcagataatacagatgagtctccagcgtatcctggggatccacctctttttccgctaaaatatagcgttccacgatcaggcggaatttaaacgccacctcgtcctgatccagcagctctgcaaaggtatattttgcgcctatgtagacctttgccgtatcctgcaagctgtatttataattctcataaactgtcttttgcattgttgtcgatatcctcaatcttgaaaccgctcattcttatggcatcctcgatcatcttgcgggacataccggtctcttccatcagttcctccgtggtcaccttgcggtgcagttcttccgccagttctctggccttatccgctaccttgttgaccttatcttccactcgcttgtcgatcttggaattttctgcatgttcggctatgtattcttccatggcatccatgatcattttgccgagcattccctcgacttcgtccggcttctccagactgcccagcatggtcacaccgaaggaaagcgccagattgccttctcccaccagatcttccagcaggacaccctgtccggcatagagttttgcgatctctgccacatccgccagatgaatctcgatcaggcgctgctgcgcatccgtctctcccgccatggccgcaatggaaaatgccagtttttcaccgtcactgtaggtcggtaatgccgctacttcatccagatattcctgtaagtaatccttttcttcctccgtcaggaattcatcgggatccataggctgtccgataccgattttatgttttaacagatagtcaaataccatctgcagctgttcattgctcagatccagctcggcgaatgcttcctttacctgttcttcgctgatgcagttgccctgctccttggcggtcttgcggacctgctctaaggtcttggcaaataatacttctttgttcatatagggtctcctttataataacatcactttctccgtgcttcgcacattgcctgcaagcagtcatgccgtatgcctcttgcaataatacactttctccgtgcttcgcactcccgaaagtgtacaggcattcgcaatccggactattttacgtgctcatgggtaaataaatgatactggcaatattcgtagttgccgttacatttggagcagaaacggaactccagattcggatcgtcctcttctgtccgtccgcagacggcacatttgtgtcttgtgactttcgcccgtccagcattggattttcgttcgaactgcgccttgcggtgcatctgtttcggcgagatacggctgcgatgcagtctgtaaaagtataacacaaaattcaaaagtgatgccactaccgcaaacttggtgaacagatttccagcaattaccgtatagaccatcagaatggcatccagaattcccatccattttaccttcacagggatcacgaacatcaacagtacctgcatatccggatacgttgcggcaaacgccagaaagatggacaggttgatatagtaggtgctgaacgcataggacccgctgtaaaataccacggatgcggtctccgttgccatacctccggtgagcaggtaaagaactcccatgcacaggaagctgccggcaatcgtgaacagcataccggaaaaaatatagacgttgtaacggtaggttccccaggtccgctccagtgctgttcccagattataatagaacaacagcataatgatcgtaaaaatatccaggctgtccggcggaacgatcacccaggtcaccagacgccagatctgcccgtgcagtatccggtaaggatccagtgtcagaaatcccagcagattatttccggccgcgctgcccatcagttcgatcacatagcccgccacataacacatgatcaataccatggtcaggttatggatcgcatattttccaaactttttttcgaatttgctcataaaacaatgtctccataaatagttatattttgatttttctctatcgagattgtaacatccggaagagaataagtaaactgcacgttctcttttttcagagttttcccgaaaaatttaagttacattttacaaaactttaacaactaaactcccccattattcgttgcattgtggtgttttttgtcgtataattagaatgttttgttgatgaaaaaaaaatgcattaaataagtagatttatttttatttcaggaaggatgtatcacatgaattcacaggaaaaatacgcaactctcggcatagatatcggttccaccactgtcaagattgctattttggacgaagaacacaatattttattttccgattatgagcgtcacttcgccaatatccgggaaactctgtctgagctccttaagaaagcttatgaccagctgggagaattgcagctgcaccccatgatcaccggttccggcggtctgacactggccaaccacctcggcgttccctttacacaggaggtcgtagccgtggctacttccctgcaggagctggcacccaagaccgatgtagccattgaattaggcggtgaggatgcgaagatcatctattttgaaggtggtaacgtggagcagcgtatgaacggtatctgtgccggcggtaccggttccttcatcgaccagatggccagtctgattcagacggacgcttcgggcttaaacgaatatgcgaaaaattataaatccctctacaccattgctgcccgctgtggtgtatttgccaaaaccgatatccagcctctgatcaacgaaggtgctaccaaggaagacctgtctgcttctattttccaggcagtggtgaaccagacaatttccggtctggcctgtggtaagccgatccgcggtcacgtagcttttctgggtgggcctttacatttcctgtctgaactgaaagctgcctttatccgtaccttaaatctggatgacgagcacatcattgacgtggacaactcccatctgttcgcagccatcggttccgcactaaatgcgaaggaggaagtctgcatcagtctgtctgacatggtgaaaaagctgtcctccgacatcaagatggagttcgaagtagaacgtatggagcctctgtttgcggacaaggctgcttatcaggaattcgtggagcgtcacagcaagcatcacgtgaccaccggagacttacagtcctatcagggcaaggctttcctgggtatcgatgccggttccaccaccacgaagatcgctctggtaggtgaagatggatccctgctgtactctttctattccagtaacgacggaagccccttgaagacagcgatccgctccctgaaggagatctactctctcctgcccgaaggcgtggagatcgtacgctcctgttccactggttacggcgaagcgttgatgaaagctgcttttctgctggatgacggcgaggtagagaccgtggcccattactatgccgctgctttctttgaccccagcgtagactgtatcttagacatcggcggtcaggatatgaagtgcatcaagattaaaaaccagaccgtagacagcgtacagctgaacgaagcatgttcctccggctgtggctcctttattgagacctttgcgaaatccctgaactataccgtgcaggatttcgctcaggctgccctgtttgcagaacatcctatcgatctgggtacccgttgtaccgtattcatgaactccaaagtaaaacaggcgcagaaggaaggcgcttccgtagcagatatctccgcaggacttgcttactccgttatcaagaatgctttatttaaggtaatcaaagtctccgatgcttcagagcttggtaaaaatatcgtggtacagggcggtactttctacaatgatgctgttctgcgcagctttgagaaaattgcagactgccaggcgatccgtcccgacatcgccggtatcatgggtgctttcggtgcggctctgatcgccagagaacattacgaagacggttatgtgaccacaatgctggattatcagaagatctgcgatctccagttcgagaccagcatggcgaaatgtaagggttgtaccaacaactgtcgtctgaccatcaacaaattctccggtggccgtcagttcatctccggcaaccgctgtgaacgtggtatcggcggtcagaagaatgcccacaatgtaccgaatttatacgaatacaaattacatagactgttctcttatgaatctctggacgctgacaaggctcccagaggtgtagttggtatccccagagtgctgaatatgtacgaggactatccgttctggttcaccttcttcaccgaactgggctaccgcgttgtgctctctcccagctccaaccgtaagatctacgagcttggcattgaatccatccccagtgaatccgagtgttatccggcgaaactggctcacggccatgtgacctggctgattcgtcagggaatcaagttcatcttctaccctgcgctattctatgagcgcaacgagttcgaggatgccaacaaccattacaactgccctatcgttacttcttattctgagaatatcaagaataacgtagaggaaatcgccggcggtgagatcactttccgcaatccgttcatgtcctttagagatcttggtaccgtgacggatgcgctgacgaaggaattcaccgagattccagccgcagagatcgccgcagcctgcgaaaagggttggaaggaactggcaaatgcccgtcacgatatggagaaaaagggcgaagagactctggaatacttacgcaagaccggcaagcgcggtatcgtgctggcaggccgtccctatcatgtagacccggagatcaaccacggtattcccgagctgatcacctcctacgatatggcagtactgacagaggattccatctcccatctggcaaaaccggaacgtcctttgattgtatccgaccagtggatgtaccattccagactttacgctgccgcaagctatgtaaagacggtggagaatctggatctgatccagttgaattccttcggctgcggtctggatgccgttaccaccgatcaggtgaacgatatcctctccggctccgacaaaatctacacctgcctgaagatcgatgaggtcaacaacctgggtgcggcccgcatccgtatccgttccctgttgtctgcaatccgtgtccgtgaaaagatgggcaagcaccgcaacatccgttcttccgctatcgagaaggtaccgtttaccgaagagatgcgtaaggactataccatcatctgtccgcagatgtccccgatccactttgagatcttgcagcctgcgttcaatgcctgcggttacaatttcgtggtattggacaacgataacaagcactctgtggatgttggtctgaaatatgttaacaatgatgcctgctatccttccctgctggtagtaggtcagatcatggaagctctgctgtccggtaaatatgacctgaacaagacagccatcatcatgagccagaccggtggcggatgccgtgcgacgaactatatcggcttcatccgtcgtgccttgaagaaagcagacatggagcagattcccgttatctccctgaacctggctggtatcgagagcaatcccggcttccatctgaatgcggatctgctgttacgtgccgctgtgggtgcggaatttggtgacatcttcatgcgttgtgtatatcggatgcgtccttatgaagcaactccgggttccgtggatgccctgcacaaaaaatggcttgcgaaggtacagaaatttgtctccgcgaagcatatcagcattccgaagttccgccggatgtgtaccgagattatccgggatttcgatgcggttccggtactggatatcaagaagccccgtgtcggcgtggtcggtgagattctggtgaaattctctcctgcaggcaacaatcatctggtagagctgctggagagcgaaggtgcggaggctgtagtaccagacctgatcgacttcatgctgtactgcttctacaaccagatctacaaagcagaacacttaggtaccagcaagaagactgcaaagatttccgcgctgggtatctgggccatcgaacatatcctccgcggctctgccgtgaaggcttttgaagaaagtaagcattttgatccgcctaccaacatttacaagatcgtctcctatgcggaaccgatcgtatccatcggcaaccagaccggtgagggatggttcctgactggtgagatggtggaactgatcaaggaaggcgtaccgaacatcgtatgtacccagcctttcggctgcctgccgaaccacgtagtaggtaagggcgttatcaaggctctgcggaaggcatatccttcctccaacatcgtagccatcgactacgatcccggtgccagcgaagtcaaccagctcaaccgaatcaaactcatgctctccaccgcccagaagaatctgaagaagggtgaaggaagcgcggaataaaacatttatagtctgaaaccactgcccgcggcaagggattccattggaattccatgccgtgggtgttttgtattcagatctcttttcccaaacaaacatcttttcagaatctcccctgtcatgttataatgcactcagatatgcttgtgccttcaaaagtgcccgctctattgcttatctgcatgtcccacaatgttcatttatctccattttcgctaaaagctgttttccggctattttagtacaaaatttctcatattttttctttttttgtatctattttaccctttttctttattttgatacaatcatccctttttccacttgaaaattagacttttttgtatttttttctggtattttatcctatttacaccaaaccattttgaaaggagttttttatgattcagaatttagacactcgccttaataaattacagacacaatgtgactacctacgccgcaaaatttccgcctttccagaaggagaattatccattcaaaaaaatggatcttaccaacgctggattatcagaaaagaggaacaatctgtatattgtcctaaatcaaatcgttctcttgcagagattatggccttgaaaaaatactactctcttctgctactggaagccgaagaagaattttctctgctaagttcctataagaaaatttcatcctcacaaagccgctccaggaaattatcctcctctgaccttctagaggaatcttcaccatattatgaattgctgcaaagtcattttgcgaaggacaagcttccggtatcgatgcagaaatggtgtgcggaaagctatgaaacaaacagttctcacccggaaaatctaattcatactacactggcgggacataaagtccgttccaaatccgaggttatcatcgccaatcttctgtacacaaatcatattccatatcgttacgaggcagctctggccttaaatgagttgacagtctatcctgatttcacgatcctgcatcccaccacgcagcagttcttctactgggaacacttcgggatgatggacaagaacaattattgtgatgctgcctgcaacaaactcaagtcttactgctacaacggaatctttccgtccatgcagctgatcaccacttacgagaccggcaaggttcccattcgttcagaacaggtacagcagattatcacgcagtactttttatgatatgatgaagcaaaatcacttgcttgcaagtgtgattttgcgaaatgcattgagtgagctgtgctcacgatataatgagcgcaagagagccaacatgcttgcatgattggcgataaccaaacgggcacaaaaaaagaccgggcgtgtatcggcctccagtcattagattgattctgtttctaacttttgggcggtacagctccggttctttaaggtgagcaagctctctttcacctgcaatctcacgatgcatttgcgctacggttctcaatgtattgttgcaagacttcggtgacttcctccggtgccaggccggcatcctcgatcaggtcacttactgcctccagttctttgcgcctcttctgctcatataattcttccagttcccgttcctcggattcaatgcggatattcagcgcattgatcaactcctgttttgcctggatcttttcctccagggattttctctgtcctcttggcatatactgtgtgctcctttccttatggcaatactatcgaaaaggccattcaccagggatcacaagcgtaacataagctgccgtgatcagtcatgaatggcctgatatgttacagtatatggacaacattgtaaaaatataccatatgtctgttaatattataccgctataatttttgtcctatcggaacaagcgtccacagatatttttctttgctcacatcaaatctgtcggacctagcccaggttgtctactgccgccttcagcttgtccagtgcaagctctagagttgctctggggcaggcaatattcactcgctggaagtctgctccactgggtccgaacattgctccgccatccagccagagtcccgctttctctacgataaactgatccagttccttgccggaaatcccaagttcactgcaatccagccataccagataagtaccttccggctctaccagatgaatctgcggaagcttctcctgcagatatgctcgcaggaaattcagattctcaagcaaataagctctcaactgatccagccactcctgtccgccacgatatgcagcctcgcaggctaccgctcccaacgcattcggctcatcgtatccggtcttgtcgatttccttctggaatgcttcccgcaatgtctcatttgagataaaaatattggaaatctgtaagcctgccagattgaaggtcttactgggtgcggtgcaggtcacggtgaactccgtaaaacggggatccacattggcaaacaccgtatgctcaaatccgggatatacaaaatcattgtgaatttcatcactgactacgatcacatgatggcgcaggcagatctctcccaactgctgcagttcctctctggtccatactctgcccaccgggttatgagggttgcacagaataaacagttttatatgttcctgcacgatcttgcgctcgaagtcttcataatctatgctgtactgcgactttccttcagttacccttttttcgtataccaatgtattatcaatcaccctacggtcattgtccctaatgatattggtaaagggataatacaccggattttggatcaagaccgcatctcccggctttgtgaaagcttttaccgctgcacccagtgcaaataccacaccgggggtcttcatgatccactctctcttcgtcttccaattatggtttttttccatccaattggttatggcattataataagcatccttaggctgggtgtatccgtagattccatgatctaccgccgcgtgaaggcttttcgtaatctcctccgatactgtaaagtccatgtctgcgacccacagtggcagcacatccgcaggcttgcctctctccacggcatagtcgtacttcaggcagttcgttcccttacgatttataattttatcaaagttgtatgtagccatacgaatcctcttacctttcgacaacctgcaagctttctgcctgtggccccaagttgcaggttaaatttttctgtcaatcgtacctattctaccaggaccttctgcacgtcctgactcgttgcgtctgttgtgggacttccgtgaaactttccgcggaactggctaaattactatgtataccaatcaacccctctcaggcaaaagcctgcaccaggtctgccagcaggtcatcgatattctcaataccaacggacattctcagaagcttctcgtccactccaagggcttctctgacctctacgggtacatctgcatgggtctgcttcatgggataagtcagaagactttccacgccacccagactttctgcaaaacgaatcagctttacgctctccaaaattttaacagctttctccgcagaattcaatcggaaagaaatcattccgccatagccgctgcactgtctgttaatcagctccttatccggtctggaatccagtccgatataatagacttcttccacttccggtctctgttccagccagtgtgcgatggccagagcattcttctggtgctgttccatgcggactgccagtgtcttgataccgcggagtaacaaccagctgtcaatcgcagacagacaggctcctgtagtcttgtagatattatagagctggtcatacagagcattatccttcaccaccagaaaaccggacaaagtatcattatgtccttccagatatttggttccactgtgtaccacgatatcagctcctaatgtcaacggcttctggaaataaggagacagaaatgtgttatccacgatcaacaggcatccattctcatgcgcaagatctgcaattgcctgaatatccgctactttcatcatcggattggacggtgtctccagatagatagcttttgtctccgggcgcaacgccgctttcaccgtatccacgttggaagtatctacacaatccacggaaataccattcttgcgactgatcatgttccacagtcttaatgttccgccatacagatcatcggtagcgatcagatgatctccgggagaaaagatttccatcattgcagtgattgccgccattcccgtagaaaatgccagtgcctctgttccctgttccaacagagcaaccgtcttctgcacttcgtctctggtggggttgctgcagcgggaataatcatatcccgtactcttccccagtcccggatgcgcatacgccgcattctgataaatgggcatgctgatggcgccgaacggatcctttctctcattacttccctggacacatatggtctctgctgcaaatgccatctttttatcctcctatgtctatgtatactatattattccctttatatttcctactgttccaataggtatagtatatatttatcatagtacatagaaaaagtcaagtttctattccatatttaccaataaagtttcatttctttctcagcttcctgctctgagatattcagtttcagtctcaccttttgtaaagtttcttcataactggtattaaaatccttgcacattataataatcccttgcgcaactccctgagaaatcccctgcgaaattccctgtgcaatcccttttcttgtatactgatcaaataattcacacaccctgatctcatcctcctctttgattcccatttcttttaatgcatctccggtatcatcaacatttgtatctccggataatacccgtagcatcttaactgttgcttctttatgaatcacttttcggtccgaccgatagctatctccctctgcaagataatccacgatgattctcatatcactttgaaaaagctctcgtatttctctgggtaaatgacgcatttcccaaacatgaagttgtacatcatctacatacttccatataatatctgcagtcgtcccttcttcatcaaataaccggtgcaaactgcatacccctttccacctgctctttccccagtataacacaatttctatcacaggatataggctcggattttgtttttcatattgtctgcggtattctccacctgcatacccggccttgcgcaataccatgcccttatccacctttgtctgattggcaaataaatacaataccttaggcaccccatttaccacatggtactttgctacatcttccaattgatttcgcaatccattttctttatccaagtaaagactctcagtagccgccgacaacatttcataatctttaacccttcttctcccttcatgtaacagaacattaataatgtccgccgccacatccgcatagctttcaaaatttttcgtcacaatatcgtttgtttccaatagttttctccctgtccgattgttctgtcaatccatgaatttgcggcgatccgccatcgactgcacctacgcattaaagcattttcagaatattgcctatatagactttcttaagatgtgattactatagcacatgcatatcgattctgcaagaaaattgcaggtaaaaaaccatacaaaaacagagctgtggaaattggtacttttccacagccctgctctttgtgcaatttgtcttttctgcgtcgcccgcaaatcctttaatccagctcaaacagctccgctgcgctgaccgtcaggctcttaacagcgccttcggtccgcttggctccgttgtcgtaaacggttgtcgcccggatgtagatggtggcggcatcctgatcgttaagcgtcatcttgccgctgccggagaacaggcccatctccgatgcagggaatgccagcgtgtatacaccgtcactggtcacagaataatacgacgtacctgtgacataatagtcctttccaccttccgtaaagtgattgtctccaccggtgatcacatgtgcatccactgctgttcctgcggaattcattaccgtaagcccggtcagaggcttcactttcagcttgtccttgccatatgcgatctctatggcatccgcatccgtggattccttgaagaactctacccggatctccgttgctgaagacaggatgttgtaatcggtagccttgaaatccacctgaatcttattgcttcgatccaggatcatcttgttggcagcatcatacatcatatatacggagtcaatggtgttgccgttgtcatcccggaaaaatacggaaggtgccttggttcctgcattgtaagccgctaccatggtgttcacaaacagcttcttctccgccattcctgtaggctccgtatgtcccgcaccggaatacgtgacattgcccatgctgtaaatataatagttatttaccacatctttggggctgacattatacaggttcacgccattgtcattgccccgtccgttgttcctctcagtctgtgtctttctggtcttggcattgtcggacaggtcagacagacaataccataccacaatatcatttttgccgtctccatccttatccagctccatgttcggctgcagccactgataatgtgttgccgccactgtcagagtctgctgttcttctgtagtgatctgataaggataattagtgatctgtccctgatttacctgcgtaacgatcatatcaggaccggcaccgtctccgaattccttgtaatctcccaacaccgtgatctgcccctgagagttcgtcgtcttatccataccctgataaaacagagaattgcgaatcggaaaatagaaactcgtataagacgttcccttccgcaggatcgcattgatccgattctgcacataacggactgtcgtatatttggtcgtaccctcgatatttccgaccgtctgatcactgctccggtccgttcccggcttccatgccgtatcgtaattgtactgcgtgtccagaatattgtaataagcatcataacgctttctctgggcatcggataaactggaattgttcctctggtcatcataatattcccgaagcgcaccgtatcggtccagtcctaccgccgcacgcatggtcttgttgaactcatagccccagtaccagcttttaccgcttccggccgtactgttgatatacgaactgctgtcatgggtgaacaggacactcttaccatcttcgatataatcacggattgcttcggatactgccatgttcttcaggctctgatccttgcttccgaactgatagttgtctccgaatcccaggatcagcatatcgtactgctggaaagtggtgtatgccgcattgtaataagcctcagacttctgttcatcggtcttaagctttttcaactgatcgtctgaaatcaatccgttgataaaagttgaagtcttcacggaatcaatagatacattaaattcccggataccgcttaacagtgactttacatcactgtcactttccagattccacagtgtcttgtcattagatgcttttctgtcggacatcagctgcaatacctgaatatccactctggaacctctgtccacagccgtataaccggacaccgccgttctcaccagagcatcggaattatcatagaagatcatcttccagggcaatactccctgataatcatccggcagcactctgactaccttataggtatatccggtgcgcagctcataatgaccactgtcgtttttcgccacctctttccactcctgcccggatctgacatacagattcagtccggaaagctcctccgtggaagaaagtgtctgcccgatcacatcggaaccggaaaagcgaccgtcggagttcttatcaatatacagcttgcaatcatacgtcgtgctcacctgggaggcagccgcatcattggacagagcaaaaatatactgcagatagaacttaccgtccgtcatcttcaggaacgcatcgttgataccgtccccgttgtaatgcagctctgtaggaatataatcttccccaagatttttcacccattcgatctgcagtttggaaagattcagatggttgccaaagtttctctgtctctcttctcttgcttcctttgccgcctttgcggcagccagcgcctctttgctgtcatccgccgccttttctgctgctccgggtactagctgactctccgcaaatacattctcctgccagtatttgtaattgccgctttcatccgtggacaaggcaaactgtatcaactggtaaaaataggaactttcgtccactgttgccgtattggcactcaccttaccgtcaattcccgtcagaagtgcatccgcaaatactaccggatacccggcggaaatatactgctcgaactccttttctctggtggagttcatatcgtttccgggtccccgatactgattggaagtgtgacttaaagaatcatccttcagacggttcttgttatcatccgattcatccttataatcatacagatccccgatatgcgtatagatcagcccattcatggaactgtcattgtaaacggtctgattgtttttcacattcatggttccggtgcgggcacccacatagatcatatcatatcgatcgttgagatcctctatcttgccaatgaactctgcggaagccatctgggtaatggaaatacttcctccgtaactgctctgccccagaaatcctttcacggaatctgcagataaagctccggttccgaaatcataacagggctccagatccaataccgcaaggctgtcctttacctggcttctgtgcatataccagttcataatatatctggtgatggaagctttgctgatctcttcattcaaagtgaccgccgtggcattttcctgtgtgatcagaaaattctcgtagcggatctctttcaggacatccgtgtagatccatgctcttgtcgtatctgacttcagatccgtcagataatcctctgccgcataagctttggaactgtcgttgttcaggtatacattttcgttcaggtattccttcaaggtatccaacgtcagggtatccgcatttgccgcctgcattgcagacgcataggatctgatatttccctctgccgcgcttttcagcgtatcgacacttacattttcccaataggaatctccctgacttgcgattgcgtttgccacattgtcatccgacacctgcagcagagtcaatgccagtttcgtcaacacttcattgctctgggtgctgttcttggcataaaaattataatccatgaccaccggcaccctggatgccatggttctggttccgccatcatccacaccgaatgccatcttt

SEQ ID NO: 5471 - DNA, 37854 bp, Unknown
  gut microbiota DNA sequence
ggacggctctgctccgtaagttccctgtccggaaaaatagaacagatccacatctgccagatcaattccacaataagaatcctccgctgtaatggaagcatctgccagatcagccagttcctgcagggtaagtgttgtcacttcgatcttcagtgtatcgatatcgtctccggtggctgtaccactctcataacgactggtaccggacagattcaggacatttttcttgaaccattctttgttgtagaaaccgccgttataggcaatagtctccgtagcatcctctctgtcatcccctacaaaatcatagctgttggcggtgtcaaatcccgtctcatccttataggtcacctgaagagagcccggtgtaaccagcttgtaactgccggcctcatccttacgataggtatcgatcagacggtaatcaccggccttgtcacttactgtcattgcagatacataatagtcgccgttatcatttgctgtgaaatccacaagataggcactggctatggtctcaaatgtatatgccttcgaaacatcatcccattttgccaaaagctgtgcgctatccggctgtgcatgatccaggatgtagagattctgggtaatatctccggcagaataggctgctatcgcatctcctccggatgtcgtgcgtgcctgcacagcagtacctgcatcatttccggatacccccctggacgtagtctttaatccatccggcagtgccgcatcggtaccgtatacaatctgtccgagataggtataaacggcagtctcacccgtacctatcttctgatagattgtcctgtccacataatcttttgcctgaaaactcgttttatcaatagcggccagatccgtctccgaaattgcatataagccctgcgcatatcccctggcgctgtctgaaccattgataatcgtagtctccagtccgttgcttcctccggtagatctatgggaaaataccggagtcacgcttttggcatcccggttactgtctccagcggcctccaatgcactgtatcggttataacgttctcctgctgctaccgtctccccattggcaatctcacgatagaccgcatcgatctgttggtaattgtatctgccggatccgtcctgtcggaatacaaagcgtcctcttacgtcctcggttctggaagctccggtgctttcgctgtaggcagaaaaagtaaccggacctgtcgtcggaaactttgcagcatccagactgtccatagctgtctgacgctctgtggctgacggcatctcggaaagctttctgccctcagataccggctcctcgccgcctgccagatagccgatcgtggcattttccttcgacggaacgatctccagaatatggaaagtaccatcagaagaagctaccgtatcctgtaccagtttttcaatacccggaagggttctttcctgcgcactgacctccatagagccatagctctgaccggctccgacggccaaagctatggtgaggattcctgctatatacttttttgaattgcgtttccaattcatggtcatttattatccttccattcccaccactccggattcttctctacttccagtaaaagatttctcttatgatccggatatcgttcatcataaatggtcataattaaataatcattttcttcatgtgcgccaatatcaaactgtacctgcgaaaaaggaagatgcatattatcaatttctgcaaatttcgtgttggaatccaacggcagttctccctggaaatatcctgccagttttgctgctctatgtcctttctctcttccagactcaaaaccatacgcatgcagatcataacgattcgtccaggtaggtctcagcaccgtaatcacatgctgatcattggcaaataagatatccactaccggcaccagtattaccgtttcggccactaatgtggaatcatccaggctccatgcctgaagcttcagacgatattcggtatcccaggaaatatagctaagtgctcttacctctgtagattctcccgtattttctgttgtcagataggcttcctgatgaacattatcatatgctccgtcatagacttcaaaaccgacctgatatgatttttgtattccgttccataccttgaaatcattattcagctcactgggaatatctgcaaatctccaatttacttcccctttataatttcgaatctcgcaattaatttttccattacggtttaatacaaactgactggagtaaatatacggttccttcgcgtttacaaccgtcttcaggggagggattgtaatatcgatttctctggtaatcttaatatctactgataaagctatcaccgcacgtacacgtactaccgtatccgtcatatttccacattccagttctgcctggaactgtcgaccatcagaatctgtcaaaccggttattttgtaattattggcataatcatctaccacactccactcaatctgtggataaccatttctgtaatccgcccaggacggcagacattcaatcaatgccttataaccgatcttttccgtacttccttcggtaaaatcatatgtggtcagattcttggcaatcagtgttgcatcatattttccgtcaatgttggtatagggtaataccgatacctttgtggatgcagacattccgggatccgccacggaagtacaggttacctgtagcacaagtgttccggtcggctcatatctgtcagccgtcaaaagaccgctcccatttatcgtggttcctgccttaagtccagttgcgtccactcttgccacgctccaggtcaccccggcatttttagcctcttctgttccttccatagtataagagtactgcaggctgtccccctgaatcaccgaagcatctttcggttctatatccagagaatccaccatatgcttttgtaccgttacggtagccgttgccgctatggtaggatccgctacggcggtacaggttactgtcagaatattctctgctatggtctcatccgctgccacactcagtttaccgttaccgctgatggtactcttacatgcgctgccatcctgataacttacggcccaggtcgcgccctgagcaatggcttcctcgtctccggtgatctcgtaatcgaagacgaaagtctgtccctgtttcagatcttcgtgctcgggaatgatacgaatgccgctgatccaggaatagatgctggacggctctgagctcagatcatttctcagcttgatggtctcggaaatatcataggacttgtcctgataggtaaaggtcatattcagaacgacttttcgcttatccagttcactgaggtccacgctgaaactgctgacatgctctgccatcagtgcgggcttagccgcgtcaaaatctcctaccacaactttgccttcgccgtccttagtatttgttacctcgtaaagatatacctgattggcatcggcgtaatccgccccggcaccaccctgccagcggatcatatagctgttgtcattattgatcagacgcaactcgctgacactggcatttgttacttccatgccgttaacgtcttttgccacattgccatcaacatcaaccgcttcctgatctgtcagattggaaaagctgatacccttctccacatcaatgatcagatcgatcatctggttggcggtcagctgggcttcttcctgcagagtcagttccttgtttccccgcatataggaattgttgccggcgatcacgaatgctcccaccgcacctgctactatggtcatgattgcaagagatacgatgatctctaccagagtaaatcctttcttaccaatccccatggtcaacctccttacttcgtcaggatcttgccggtcttgccgaccgttgtgatttctatgtttctcgttccgttgcttacgacgattttcagacaatattccttcaacacattgtttgccgtacaggtatccttctcaaaggccccggatgcacggttaaacaccagatgcagcccatttgaagatgaaacataaggtaacaggctgtcggatcctttcagttccgtcagggaatatcccgtggaatctccctcaaaatataccttgatatcaataggttcttttcccagtaccctgttggatacctccacatctccctgccggatctgtgccgtatattccttggtcgtatcattatagctgataacgcactccacctgattctgttcttttccgagggtcagcactctggtccgctccagtgttgtcacaatttcgtccgcacatttccggactttcctgccggtcagggatgtaatggatgtggccatcacacccaccagcaccgccatgatcgcaatgacaatgatcagctccaccagggaaaaaccactgttgttattctttctgccagttttcataaactatcaaatctcccagatttatatcactgttcttataggacttaccgttactgctcaggtaaccgtctccgccatttaaaaaatctaccacatgatattcctgtgtcttaccggcagcatctacgatcgttctggaataggtcagggcatgaagcaccgcatcccggtcaggttccacattgacattctgatccagcgtgatcgttccgccggacaggatcgttccctggaattcctttgtcactttgacatctccggtagcaatgatcagtccactgaactcgccgaatccggcttccggataggtataatcaccctttacaataactgccttatatccctgctccgcaaggcttcctgtggtattgccgaaatattttgactccaccttatttccggtactgccgtttaatacagcatggaaggtcgttatccccccttcatttaccagattggtataagcattggctgcatccgtcttctccgaaggaagcagctgctcatagacatcgatcatcttcttggacaatgcctggaatttcaactgatccgatgccaaaagtgcctgatatcctgcattggcaccatcactggtcagtgtggcatccaacagcttctcctgacttcccgcagccgcactgctgtcatacatggccacattgcctgccagatgcatgatgtacgctccgttctgctgtccacgcacctgaatggctttggtatacagaccggtataggcttccatggtctgctggttggcaccgtaataatcctgaaaataccggttggcattggctctcgcggtatcagaggtgctgtcaaagcttacataataatacaccagcgtgatcttgctgttgatccgcttgaaaatcttctggatattgttctgggtcagtccgtactcggccagcgtatgaccattcagggtagcggacggaatattcaatgccacttccgttacatccgcctggtccctgatcttgtccttatactgctccaacgtgatcgggttgctggcaccgtttaacacggtcttgccggaagcatccacgccgatacactgcgccggaacgaggtaagccagctggtcactcttcacagcgatagactgtcccatcatcacatcctgtactccggtgttgctcacaccatcctcactggtaattccatccttggctttcgtcagagaaatgtaagaatttccggccagcgtaagattcttcaattcattcagatagatctccgtatccgtgccgttgaccagaatggcgctgctgtccacgctatttccattaccgaagccaatatactgtccggcatattctccgtcgatctgtgctccggcggtaaatacattccgttccccggtcatcctgaggtctccggccacatatacgttgtttccctgaaagctcaacgttccgttgcttcccgtattgcccggaatacctccgttcatggcaatggaacctgcccatacttcaccgtactgatctgtggtaagtgtggctccttctcccagatataagtcggaagccatcaccatacgcttgtcttcgttttcattgccggtggtctctttccattccaccgtcacaccgttacccttgccgggctcttcgctgcccacgataaaacgttccgcataaaagctgccgccaatgacatttttactgatcagcgtggaatcagaaggaagtgcctgaatattctcctgcgccaccatggagattcccgtaatggaaggcagtgtcactgcctgtgcaaaatccatatccggcatcttcacccggatatcggtctggatcacggacacatagccatcggtatccgtataagtcactttcaggccgcagaaggaaagtccgtcggtgtacagctgaaaacgtccggtaggaatatccgtggtctccactctctccttgttgcccgtcaccggatccgttgtcattacatataccttcagactgccgctgctgtccagagccatccggtacactacttccccggagtcattcaatgtctctagcaccgtcccccgctttatctccgaagacaggctgttgaacagcttggtcagatcataattgttgatattcatacttcctgtcactgcataataatcctgcatatccttcaggaaataatatctcagtttgttctgcttctcctctgcggaggttgcctcataatttttcaggaccagttcataggcacttccgacagaagcggacacccgctctcccatagccgtccggatctcatccagcacagtctctgcggagtaaaagttgtccttcgccttgagattgttcaccttcatctgatagttcagcagtgacatatacatcaaaacactggctaaaatgccaataaaggccatggcaatgatcacaacgaccattgctgagcccttattgtccgttcgtctgtggaattgtcttacccttgaaaatattttgggatttcttccgcatatcttcatgtttctcgtcttccttccggtatctcctctatcttgcgtccgtcagatcattcgatcacggttcccgtcatggtaagtacgggggactgcactccgatcatatcttttacatacacctgtacccgcatgtcatagatacggttgcgtcgctccgtcggtgtcagaccgccgtccgcacccataatatccttcgccacgtctccggcagcattacctgccgcaccggacacgctgagatcattgaaaatgtattccgtattgcttcgcttcaccagattcgtccgcagtctacaggcggaatcaatgctggctcccgcagaggacatccagcccggccaggtctcccgcagttcaaatgccgccttgtaattgttgttccaggaggaatacgggttaaaaccggtgctttcgtccgtgaagctgtctattctctccgctgacggagtctgctccaccaggaacagatttgtctgtacattcttcgggttatttacgatcactttgtctaccgcagaaatcaccgcactctgggtagcctccactctgggctgcaggcacacaatgatattggccagctgggaaatgatctcctcactgtccaccgggttcccactctccttctgtttcttaagttccgccgctttggctcttaccgcctcttcgttggaaaagatcacataatccgtaccgttctgggggtagtctccgctgatgcccgtaaggatagcggaattacaatgatagactgtggaggccgtcaccagatacacatctgtctctacgttctctccatctcccagatccagcaaaatgcggctgctgtctatggatatttcgatggtcttggtagtattcctggcaatctccataacgtctctgccgccggaatacgcttcaaaataaccgtatgcctcctgtgcggcatcttccgattcggaatataccgcattcagattgcctgccaggttctggatatttacaatatccttctcattcagtgccgtgtaaccgttaggatccagtgttactaccacatcatagatgcaggaagtcgtcttctcatcccggaaggtatattgccagataccatcttctgctgcgccgtctccgtccacatccagagagacatctctctgcacattgttagtgaaatcagtgggcgtgatcgtctcataggtgtctgccatctcctccagtgtatgtgcctcgaactgctccatgacatcctctgcgatggccgtggcatgcatggtgttgcgggacttggcattggttctggcagaagtcacaaagctgtgcaaaagcggcacaacgatgatcgacaggatcacgatggcaatcagcagttcaatcagagaaaagccttcgttattcagttgtcttctctccgtgtgcttctgcatgtaagtcgtccttcctgcttctgactaataccggtctctccgcactccgtgctcccgaaaccggacaaccattcgcactccggactatcgtccttcctgctcatggttgtttgatttgctaatcatagcagtatcctgcctgcaagcagtcgtatactgctatgattgcaaatctattattccacgtttccgaaaatagtgtctacgcccatctgcatatccgggatgtaaggtgaactgtataccttatcggttcccagcagataataggtgttcatggtcatgttgccggtgagcattccgtcggtctcgttgtagctgatgctgacgccctggatgctctcgcgttcctgctgattgtaaatgtatcttaccagtcccttgaaatcgtcataggtgcaggaaatgctgatgctcaggggtacctcatacatatgggtatctgcataagcagtaccgtccgtagataccggacttgctgccgtcgttgcggcagctgctgtggtatctgccgcagcatcggctgctacatccgtggcagctgttgcatccgcagtcgtcgttgccgcatccgctgcaggagtatacaccacctctgcttcggaaccgaatgcaatatttgccacctcggtacgagtataatcttccaatgtctttaccatcataatgctgtcttccggtaagatatctgccgggaaacggttctcaaaattcgtgatataggactgcatcttctcggtagcctcaatgtagtctgccttgcgctggtctaaggcttccagcgttgccacctgggatgataacgttacattctgtgcctcaagggcatctgatttttcattaaaactggaatataccagaaaatacgtacacacaacaataagaacaccgatcactgcgatcaaaagctgaatttcactcttcttaaccttcatcttccgctgcctcctactgtgctgtctgggtgccggtctgtgcctcaccgctctcttcggtctcatccgtcagatccttatagcttccggtaatggaaaaagtcactatggacgtgccggtctcatccttgctgtccgtaatattgctgatctctacatcatcaatgctctgcatgttgcggatattcagaatcgtacgggctgccgctgctttcccttccaccgtcactgacatgctgatgccggtctggtcggagctgaagctgttggtatagaagctgtccggcaggatctgttccagttcattgatgaactccaccagattctcattgggagtctgggtataagcatataaatatgtgtatttatcatactgggcttctgccgccagataatcgttgtatactgcctgtgccggctgtagctcctgtacccggttctgcagatacacattctgcgccacatttcccagatatctggtcacagaggtggctgccatggcgatggacaggatcacgcccaacaccagtaccgccacactgacgaaggtatagttcgtgccgctgaccacggtcagtcccttggccttctgggtgctcttgtcaatcagtcccacgggggcgagcaccgcacccagacaggaaatataggctgcgggtctggtggaacggatggccttgctcatgccgatcttgtcatccatctcggacagggtatgtaccttgcgctccagacagttggtgaacagcttgctcatgccgctgaagctgccgcccagaccggtaacataggacttttcaatgggattttcactgttcctggaatcatagaagtcaatgacacggctcacacccacgatcagaggctccagcgaagcggtgatcttctgtctcgcttccgtgacttccacattaccggcatcctcatcttcccagcgtccggcattttcttcccagactttgtctccctgatggagtactctgttcagacatgttttcttctggaaacgttctaccgcactcatgggatcgttcacggcataggctccagaagcgatcatagtatcaatagcatcctgcacaccgtaagccaccgttctctgtaataacaccttaccggcggaaagcacggtcacaatggtgctgttctcatcgatcttgatgaccatggtaaccttctcagacttctcatcgcggagaatctggtataagctgttgctgctgtagtcgaagcactcgacctcccagccgcacatctgcgccagctggtaatagctgtctaacagtgccttgggcaccgccagtgccatgacacgcagtttcccgttctcggtcagtccgccggccagataatgtccgatctcatactgggtcagatccaccgggaaatattcattggcgttggtcttcaccagtgcctcgatcttactcgccttaacgttggggatctgtacctcacggcttgccactctagtagaagaaatggtaaagatcactttcttcgtgcggatgccattcgtcgccagtgcattcaccagatggtctgcgtactcctgtgttggctgcagcataccatccaccacgatgccttccggtgtctccaccgtcaataccttgtagaccttcggcttcttcaccttgtagtccatctcgcagatcttcgtaaaagagtttccgatctcaatactcaatacgcgattgttcattgccatatttctacccttcctcttcccggtatttatcgtatttcgaaagcattccgctggtgcggagcttttgaagaactttctgaaatcatgttcgaaatgcaggtatcttcttatacataaaaatgcagataccactgtaagaattcattgccccagaggacggcgattgccacccctgcggagagatacggtcccatggcgagaacatgtccttcgccgcttaccttcatacggatcagatggatcacggaaccaatgatacatcccagtaaaaatgcgaaaataatcaatttccagccgagtaacagcccgcagaccgccatcagcttcacatcaccgccgccgatggctctgccaccggtagtataatacagaataagtaaaaatacactgacacacaggaagccgatcaggaaatccagccactgtgtatagtggaaggttccatggatcagccccagtgtcagtataaataagttaaatcccacagggatctcatatgttctgaaatcaatcacacttaaagcaagaagtgcactaaacaacaagcagtagactagggaatccacgctcatcccatatttccagaatacgatcaggtacagcactccgttcagggcctcaatcacggggtactgaacggaaatgtgtgccttacatttccgacatctacctcccagtaccaggtagctgaacagcggtacgaggtcgtaccaccgcagctgataaccgcagttcatgcagtgagacctggtcattacaatattctcttttttcgggatacggtagatcaacacattgaggaagctaccgatgacgattccgtagaggaatacgactatgtagagtaaaattgtagggagcatgtcagttacctttcagaaattatgcgttaggttgtccggtaacagtaaccttccaaaccttagcagttccatcataggcaagggaaatagtaatagcctgtgccttataagatgtggacttgtaagaataattctttgctgtatcaacagaacccaaagaatcaaaaattgtcttcaaatcgttagaaattgtgatctttccggtagtatcagatgtaacagtataagttttggtgctgtctaatgtaacatcaacatcagatgccagaacagtcatagctccggtaaattcctctacctgctgagcatcagcagatactctggacttttcaacatacttgatatactgaggtgctaatacacctaccagtactgccataatagcaataacaatgatcagctctaccagggagaaacctttgtttgttaagttcttctgtttcttgttcataataacattctcctttttatgtgttttttaatttcagggtagtaagttttccgccccatttattaattatcgttctgtccctacacagaacggataatcctctttacatcgaatccagtgcctcatacatattcatcataggcaacatacaagcagcaaccaatccgccgaccacaattgccagtaaaattataatcatcggctctaacgctgccattactgactgtactgccatttcaacttcttcttcataataatctgccagtttgtctagcatttcctctgtattaccggattcttcaccaatgcgaatcatctgatataccataggtggaaacaatccactctcttgcaaaggtctggataacggcataccaatagtaatttcttcttttgcatcctgcaatgcttctttaaaataaacattgctcataacgccagatacaatatctacagcttcaattaatggaacgcctgctccaagtaaagtgctcatcgtacgtgccatcatagaggatgctgtttttactgttagctttccgaaaataggaattttaattgctattttaccaaatacatgttttcccaaatctgtttttgcaaaatatttgattcccataactattgcaataatcacgggtacaataataaaccaataattaataatagcatggctcaaattcacataaaactgtgtaatccaaggaagctcgccgccaatttgtgaaaacatttcttcataagaaggtattactttgaccaacattacaatagtaacaataatggcaacgatacacactgcaatgggataaatcattgcttttttaaccattgcctgtgtcttatgcgatttctccaactgcaccgccactcggtcgagtgccgtttccaggctaccggatgcctcaccggcagccaccatgttcaccataatccctgggaataccttcgggtgttctgccatggagtctgccagggtctcacccttttccacgctgatgcggacttccttcagtgcatcctgtaatctcttgttctctgtctgttcgcagagcattttcagggattcgaggatgctgacgcccgctttggtcatgctgacgaactggcggcacatgacgcttagatccctggccttgggccatccgccgatctggatatcgatgtctttcgtcaggaagctctgttctcccagatcgataacggtcagctcctgccttctcagttctgccattgccagatctttgttatccgcttccaaacttccctttacttcttttccagcctttgtgatggctttgtagccataggtcgccatgtgccttccctccaatgcgtctctatctttaactttctccccaactatgtaagacgggccccggtcctgaaaaggtccaggtttttgaaaaatttttataaattttgataaatttctataaaatattgcgatttttatagaattatacgtcaaatgatacctttaccatctcggagaaggaggtggtgccgtccagtacatagtccgtggcactcatacgcagggtatgcattccttcttttaatgcttcttcttttaagatatcggcaccctcccgcttgctgataatggttttcagtttcggagtgatctgcatgatctcatagacaccgatacggcctttgaagccggtattgtcgcatttgctgcatccacagggctcgtagatggtcacatcttcctcttccctcatgcccatgaactctttttcatccttggtggcctgcttcggctttttacagaaacgacagagtctgcgtaccagtcgctgggcgataacgccgatgacggaatctgcgatcaggtaggattcgatgcccatatcttccagacgggtgatggtgctggcggaggaattggtatgcagggtacttaccaccaggtgtccggtgatggacgcctgtacggcgatgctggcggtctcctggtcacggatctcaccgatcatgatgatatccgggtcctgacgcaggatggaacgcagtgccgatgcgaaagtcaagtctgccttggtgttgacctgtacctggttgataccgtcaatattggcctcgacaggatcctcaacggtgatgatgttcacgtcttctttattcagttcgctcagtgcggtatacagggtggtggacttaccacttccggtaggtccggttaccaggatgataccgtgaggatttttcaggatatagtcaaactgttttaattcgtagggtttgaagcctaactggctcttgtcgcggttcagtgcactcttcgcggcaagacgcattacgactttttccccgtatacggtaggcaggatggatacacggatatcgtattccacacggtctaccacctgggtgatacggccgtcctgcggctttctcttctcggagatatccatgccgccgataatcttgatacgggcgatgatggcagacaatacattgacaccgtatctcgctctctcatagagggcaccgtcgatacggtaacggacacggatgatattttccatgggttcgatatggatatcggatgcacgctggcggacggctttttcgatcatatcctttaccagcattacgataggggagctgttgatgttctcctccgtggcgatgtcttccaccacatccagctttttctctttggcataggctgccagtgcctcggttacttcctcctgaccgaaatatttatcgatggccagcatgatgctgcgggtggtggcaaccacgggctctacctggaagttggtgatgatgttgatgtcatcgatggcattgtaatccaggggatccgccatggcgaccatgagaacgttgaagttattttctttgtaggcgaaggggaagatcttgttcttcttcaggacgttgaccggtaccagattcagtacttccttgtccacattgacgctctggagatcgatcatatccagatccagctggcggctcagtgccttcgccagatcatcctccgatacgatgccttcatctaccaggaattctcccagcttcttgccctgacgattggggttgtccagtgcctgttgcagctgctctgccgtgatcaccccactgtttaccaataattcacctaaacggactttttttctgcctgtttccataaactctctcacccattgcttttgtcgataattggaaatatgtgtgaaattgtagtattttttggctacaactcacaaatattttgtctcaatacggaaatattatagcatattttagatttatgtaaattgtttttagtacttttgttccaatttctgagaaaaacatttttgttactttctttcctgttacacagtacaattatttcattttattttgaaagtttctaaatacgccaattcttcggcgaattttcccaacatttattggcttcacgtattatacgtgttaccttaagaaaggagagataatccatgcgttttcgcgaattagagcgaatcatccttgacgatggctgggttttgtctgatatcagaggcgatattcctttgcgagttgttaattctatttttaaacaggctggcctaaaataatatggaacagcctttgaaaggagtgatcttatgaattatatatatccggctattttttacccggaagcgaatgggaaatactctgtcatttttcccgatcttaatgatctcgccacctatggtgacagtcttgcagatgcctttgccatggcacaggaagcatgtgcacaatatctgtttacttctctgagagacggcgatgctcttcccgcctctactgcaattaatgcagtgaaatcagatgatcccactgcattaataaatctaatctgtgtgaatttggataattatgcccgtgcttatgatgacagggctattaagaagacactgactattccggcgtggttaaacactgcctgtgataattgcggtatcaattattccaaagttctaaaggacgctctcattgccaaactgcaacaagtgcaaatgtgaccgtatcacaaagtcaccgcgtattcactgtcgtacattttcttcagattttctacgctgttatatttttcgccgatgcagaattccttggaccaggtcatgtagtaagcccaggggattctacttttttgcagaagatctatgtccgggaggtaaccgatctctgccagtgcggtaatcttgttccgggaggttgcggtcaccagctttttgtaggtctccgcatagtccgtaggcaggtattccgggaggtagacatccatggacaccacatccacgtaagaatccccgggataggcttccggtacgtcgctgttccatacccataggaggttatgcaggtctttctcacctgtgtagtaatcgaacatcaggtgatacaggtttctcgccacttccgggccctgcgctccccaccagaaccaggtaccgtaggattcatggaacgggcgccagagaatgggaatccgctcttcctgaaagcgccgcaggatctccgcaatcacatccatgtcatgatagaatgccgctctctccggggttccctctttcaatacttcccttgcatcaaaatccgtgtgttcggtatagaaactcttgtctttgccttccagaggcgagaaccagtgaaaggtaaaggtgagaataccaccatttccggcttcccgctgttttctggcccattgcaatgccgtctccacggtccccttattttcttccacttcctggatgcatttcggggaagcatcttcataattgatattcggagaatacgccagcagttcaaagccccgcagcttcggttcctttccggtgacctgcctgatgtaatctatctcttcgcagggaatggtctgggtgtgctgaccggtgatgatcttttttcctgcgacgcaatgaagctcccgcagcagctcctgcgcttcctttgttgcctctgaatccgctgttgtaatatttttctcgtccatatatacacctctttctcctccatacccgcacttacgacttccccgggtatacaagcttgttttttctctccatgcccgccgccacaaaaaaatcgagggtacagagacaatctttccctctctgtaccctcagtttaatgcaatacggaacgaatcgcaagctctattccggctttatacttcctgataatcgttaccggtgtcgttcttctctactggctttgcatcttctgccttttccttggcaaagcccttcgccagcatctcgttgatatcgagtccggtagactccttgataccatcggtaacctgggtcacggtggtcatgatatcgcctgccagcttgctggaatcgccgccgaacatcttgatggaatctacgttcatgtagcccttagccacagcctctgcgatcttgggcagctgctcgaagtataccttcagagtatccagctccatctgctgtcttgcagcgtcgccgtactgcttcatagcttctgcctttttcaggataccggctgcctctgcctctgccttcgcctggatagcttctgcttccgctttacctttggctgctacggctgctgcctctgccaggcctgctgccttgactgcctctgccgcctgctccttggcaaatctttctgcctcggattttgccttttcagcctctgcctgtctctggatctcgaagagttcggcctccgctctcttctgtctctcatactgctcggcatctgccttctgctgtgctgcgtatttgtttgcttctgcggtcttcttgacctcagcttccagagctttctccttgatggatacttctctctcctttaattccagttccttctcctgacgggccagatttgcatttgctgtggtgatctccacggtcttacgctgttcctcttcctggatcttatatgctgcgtcagcttctgccttcttgatatcggactctttcttcagttctgctttcttgatggccagttcggtctgcttctgtgcgatctcggtctctgcgatgacctgtgcatcgttggcatccttctgggcctgtgctctggcgatggccacatctctgtcagcctgtgcctttgcaacggaagcatccttctggatctgggacatgttatcctgtcccaaagcagtgatcaggttgttctcatcctcgatcttctggatgttacaggactcgatccagatacccagggcattcatatccttctgcgcctttgcctgtacctcatcaccgaaagtcttacggtcattacacagttccttcaggcactgggtaccgatgatctcacgcatgttaccctgtaaggaatcggtcagtgcatcgcggatctgatcttcgttcatgttcaggaagttcttcatggctgcgttagccatctcggtggtgattctcttgttcggatccgcacctgccacgacttcacccttcgcatttacggtgacatctctctgggtcaggactctgacctttgccacggcgtcgatatccacaccgatgaaatccttggtaggtatataaccgttggtcttgatgtcgatactgatctgcttcaggatcagctcatccttcttctccagaaaaggaatcttgatgcctgcacgaccgatcagaaccttaggttctctcttgataccggaaatgatgtaggctttgttcggtgacgccttcacataaccggatgccaggatggccaggatggcaatggccaatacaataattgcgataataccaatgttaatttccatatgtactccctcattctttctgcttttgtaatatatgaaaagctgcttgtatggtatgtattttaccatacaggcagccttttatatagataaattttcattcttttatgaaaaataactgtgcaaaaagtgcacgatacatcatcttatttctctgaaaaatctataaacggtaaattataggcattatacggcgatgctgccgtaatctgtgaaataatgggtctcaaatatcccagcaacaatgatggggcattttgattcaataatttttctatcattcccatattcagactatccggccatctgaattccgccatttctgttgcacacacatagaacggatctgatgccccctttttcccaatttccaaagtaaggctgacttttgcgctgttatcaaccttgcttctgtcaatctggattcccatgttcaccgccatctttacttctttatcccgtccgttttcaaaatcttcattaatgcaaaattccatttttgtcagcgagggattactaaactgaaatgcactttccatgtttcctcctatgctgccaccaagatcattccatcacttgttgtgttttcatataccgatgttttctgtgtatccaccaccatttgcgcccgattttcattactactgtttgagtagaaaaattcttctttttgaatattgaccgtccatgtaacctctatattacccagactgcattgcggcttttcttctaaaaagcttaagtccagatccttaatttccgcatcatacccattatctctttccgtgattgtaatattgttatcaatccgttccagaacgctcctgttatatagtaattcctcttccgttgggcgataaagcatatacgcaagtcgaatagcatcgttgccatggagtacaatgtctccaactctttcctcattcatatattttccctcctattcatatatactgtctatgtattccgtaaattcatcttttttctgcatgcaatctaaaaacattgaaacagtaacaccatcctgccccggtgtattatataccattttgcgaaagccgagtttttcataccacataaccagattttctctggcatctatcgtaattaccctgaccggccagttggcagccaataattccacattttttattattgcctgaatcgtagccgtaccaatcctgttatgttgatatttttcgtctattgctatataacgaatatgaacagccgatactttccggtccttaatttccggatcatagtctgctatctccggaggaaaatcgtctaattctatctcccgaaacattatcatataatatccaagaacaatccctctgccactaatgctataaccatatgcctgctgtactatggtaggataatatgaatttttcacatattcatccatggatggaacaccacatgtaaaagaagtattttccacttctctcgtgaccttccgatattgtaagtttcccatttttgccccttttaatcgtgccagtacacaatctgactttcactagtaaaaaatgccccaggaatttgttctactcatcttctgagaaacttacatcctagagcattatttgacatgacttttctatatctgttatattacatttcttttttactactgtcaacaaaatttaacccagatttttcagatactccataaagttctgcttgttctccagtgccgtggtggtgggtcttccgagatcttcccttgcgccgataccacattttacttcgataaaggtcagggtctctctctcttttgcagcggtcagttcccggtccagttcctcataggtggtaacggatactgcatggggatagccgcaggcctttgcaatggagacaagatcaatatcggctgccacggtaggcatgccgcctacggtctcatgggcaccgttattgatgacgatgtgtaccatattttcaggtgccgtactgcccagtaccgccagggaacccatgtgcatcagcactgcgccgtcaccgtccacgcaccataccttcgtcccgggcttctgtactgccacacccagggcgatactgctgctgtgtcccatggaacctacggtcaggaaatcatacttgtggctctgtccgttatgttctctgatctcgaacagttctctgctggctttgcccgtggtgctgacaatgggatcctcgccggaagcctgcacgatgtggcggatgatctcttcccggatcatgggattgtcgttgcggtactctaccttttcctcataactgagggcacccttccggatcacgaacgctacatcctcaccacgatccagctccttgcggaactcctgcatggcagcacttacttcctcttccgttgtgtcttttccgatgacaaaatagcggattcccatatcctccagcaatttcagggtcacttcaccctggtagatatgctggggttcgtcgtggatccccggctcaccgcgccagccgatgacgaagatcatggggatggcatagactttatcgttcagcagggatgccacggggttgatgatattgccttctccgctgttctgcatgtatactaccgggacttttccggtagccagatgatagccggcggccagtgccgtgcagtttccctcgttggctgcgatcacgtgatgcttcggatcgatcccataggtgtgcatcaggtaattgcagagggccttcaactgggaatccggtaccccggtataaaagtccgcatttaaaattttcgcaaagttttctgctttcatgtaagtattcctttcctgcccctgtcagttaaatttcgtctattaaagttataatatctttgatcggcatcagtctgctgtccacttcctgtgccctgtgataccgcaggatgtcctcggcggtctgctgcatggcggggaaggcacttctggtcagctggttcgcatagatcacgatattgacgccgtgggcggccagttcgttttccgtaatgctgttaaaggaagacggcaccaccacgataggtgtcttcggatcctctgcccggaatttatcacagaattccagaatctcatccggggatttcttacggctgtggatcatgatgccatccgctcccgctgccacgaaagctctggcacggttcagtgcatcttccatgcctcgctccaggatcaggctttcgattctggcaatgatcatgaaatcatccgtcagctgtgcctttttgccggctgcgatcttggcactgaagttctcgatgctgtcctgagtctgcaccacatcgtttccgaagagggaatttttcttaagtccggtcttgtcctcaataatgatggcggaaacacccattttttccagtgttctcactgtgtatacgaaatgctccgtcagtccgccggtatctccgtcaaaaataatgggcttcgtggtcacttccgtcacgtcatcaatggtacggaaacgggaagtcatgtccaccagctcgatatccggcttgcccttcgccgtggaatcgcacagagagctgatccacatggcgtcgaactggtccagctcaccatcatgctccacgatggtcttctctgcgatcagtccggtcaggccgctgtgaacctccagtgctttgacaatgggacggatctcaatgagctggcgcaggcgctttctgcggtattccggcatggccagcttttccttgatcctcgtatcaattctttttacttcttcattatatgtataagggacatctatgatctcaccgccgtatgtcttcagcagtccttccacgttgtcacggatagccttcaaagcaccctcctgccagttatccccatggatcacgtagtcggggcgcaattcttcaatgaccttatcatacattacatcatcctgcacgaccacattgctgacttccgggatatcttttactaactgcatacgctcctcgaagctgatggtgggaaaacggttaaaacggatcattgccgcatcacttaagacgccgatggtcagctcgccgtattttccggcttctctgatgatattgcggtgcccctcatgaatgacatctgtacagaaacaggtatatacacgcttcatttgatcctatgcctccttatattttgccggaatctgaattttattgacttccagtgcttctctgaacactttgaaaaaggcttcgatatccggtctgtcaatcgcacccagtgcacacaggcggaaggtattggtagtagagattttgccggggtaaatggtaaatccccgctcatagcaataatcatgtactttttcaaaattccagtttggatcatcgggatacttcacagacacaaccagtcccgactgccattctctgcggatcacatcgtggaatcccagtgcatccagtccttcatgaatggcctcaaagactctcgtatgtctcgcccacttggcttcctcgccctccgcccagtattccttcaatgcctggatcgtagcgtagatggtctgtaccggcggggtaaaatgcatttctccggtcctctggaagaaatcatactgttgatacaggttgcagtaataggaacgtttcggatattccttcgaagcctccagaattgcccggctgcctaccacaaaggatagtcccgtcatggccatgagacccttctgtgcggatgccatgcagaagtcgatgttatcctgctcgatgttaatgggacgcatagcgtaggtggatgtggtatccacggtaaaggtagcatgatatttatgagcaagggctccgatctcgcggatgggattcaggattccggtaccggtctcattatgagtggtatgtaccagggcaatgtcagggttctccctcagggtctgctccactttttctaagtcgggcagttcatccaccgggaatttcagatcaatatagggaagtccgtaatactggcatacttccacagctctggtgctgtaggctccgttatccaccaccagtactttgccgccctccggcagcagagaactgatgcaggcatcaatattgatggtgccggatccacagaacaggacactggtatacttttccaaatccccatgcacgattttcaccaggtcttctctgagtcccttcatcagtccgccgaattctttttctctgggacagatgtccggcacgacctgtgcatattttacggtatctgtggtggtagacggtccgggattcaataaaatatttcttttgacgggtttttgtatcaactgctccattatgggattcctcctttttttgttcgcgttctttttccaatcgttcatttatgtatgatattttttaattctttgaacggttttcataggttttcggctaaaataagtacacaaaatgtctgcgttccattcgcagacactttgtgttaaatatgaacatataataataccattcgcacaaaatagcaatacttatttttctttaaacatcatacgtcttgtcgatggctttcagctcccggaaagtatcgatctcgataatgtcattttcccggcattcacgtacttctaccttataatgcttctggcagaataccaggggtacctgttcccagtaacgctccttgccgccgggctgttcgtaggtcatcttgatatcatctgacagcttatgtccgtcttcttcgttccagtaagagattcccaccatctgccagcaatccaggccgccgactttctcttctacaatgactccgtcttttaccgtgaagcaccagtcatcggttctgtccttttttattgccagaaaatcggaggtataatgatattttttaatgatctgcggattggagatcagcagatccgcctcaaatacataggcattggaaagcatatatcttgccaccatggcggaggaaatattgttagcttcattgtaaaccggattttccaggaatctgatcatgggatatttgtacagcagctgatcaaactgctctgccagatacccccggacaatatagatttcattaatcccggcatccagacaggcatcgatcagtccgtcaataatacgctgtccatgcacacgtaccagtggtttcggggtgttaaaggtaatgggcaccaagcggcttccgaatccggctgcaataaagatggcgcgctttgcacggtaaggctccagtgcggagattccggcacctgtgatctctccctctgtcacatactgtaattcggtcagttcctgcatgacacggttgaccgttcccagagagtgtccgctcttttctcccagctgtctctgggataaagtacctttttcctctgccagtatcgataaaatatcaaattgttttcttgtcagtgtctgattcatcttctgcttcctttcttttttccattctccatgaccatcgtcctgtttctatcgaaattatcgaatttccgttaagtcatatggtgttgtctggtatacataataattgagccagttgctgtaaaggttgttacaatgagatctccactgtaacagaggtctctgctccgggtcatcgtccgggtaataattataggggatctgaatgggcagtcccttgtccagatctctatgatattcgttgttcagtgtataacggtcatattccggatggcccgctacaaaaatctttttgccctcttccgccattgccaggaatacgccggccttctccgattccgccaggatcgtcagatccttacaggcatgaatggcctccgacggagtctcggtatgacggctgtgcggagccatgaaaatatcatcaaatccccggaccaacggaactttccggttggataccttatgcgcatagacgccgaacagcttctgggacaattgtctcttgttgattccgtaataatgataaaatccggcctgtgccgcccagcagatatgtaaggtggaggtcacatgggtctccgcccagtccaggatctgacaggtctcctcccagtaatccacttcctcgaaggtaatatcctccaccggtgctccggtaacgatcagtccatcgaatttacgatccctgatctcatcaaaggtagtgtaaaatttgttcagatggctggccggggtattcagtgacacatgggtcttggtgttcatgaaagtgacatccacctgcagcggtgtattggacaacgcccgcagcagctgcagctccgtatcctgctttaccggcatattgttcaggatcagtacctgcaggggacgcatgtcctgatgtaccgcacgaaattcgtccatgacgaatatattttcattttccagtatctctttggcaggcagatcattttgtgttttgataggcattttattttcctccgggtctttcttgcttattcctcgtaaggaatattataggttctcagaaattcctcttctgtcagaatgggaacctgtaattcttttgcttttttatttttcgatgatgtagatgtaatatcattgttgatcaggcaggtggtcttgccggtgacacttccggtcaccttgccgcctttttcctcaatgacctctttcagatcattccggctggcataatggttcaggcttcccgtcaccacgaaggacattcctgccagtgtctgtgcactctcatcgatctgtggtgtctctatcgtcaggatttccttcagatgagctattttctccagattttccgcatcccgcatataatccgtaaatgtagatgccagcacctctcccacaccgggaatggcactcaatgtttcttcgtccgctgcctgcattcgttccagatcgtaatcaaaataccggcacagcaccttggcattggccacgccgattcctgcgatccccagtccgtagatcaaccggggcagtgtggtatgtcttgcagtctcgatactgtccatcatattctgataggatttttctccgaatccttccattccggtaatgacctccttgtaacggtccagccggaacagatccgcatattcatggataaagccctgatcgatcagcttctccaatgttgcctcggagagtccgtcaatattcagcgcatctctgctgacgaacagagtgtaggatttgatctccttggccgggcatttctcattggtgcagtacagagactgtacctcattcatctgtcggatctccgtgggctgtccgcacaccggacacacctttggaatctccacattatcactgcctgtcagattctcagcgatctggggaatgatcatgttggccttatagaccgtgatatggtctccgattcccagtctgagggatctcatgatactgatattatgcacggaagcgcggctcaccgttgtgccttccagttccaccggctcaaaaatagctaccggattgatcagaccggtacggctggcgctccactcgacctcttttaatgtagtctcccgcagttcatccgcccatttgaaagcaatggaatctctggggaacttcgcggttctgcccagggactgtccgtagctgatactttcataagtaagtaccagaccgtcggaaggaatatcgtagtgctcgatcttgtgttcaaaatcttcaatggcagataaaatgttctcttccgttactgccacatgttccaccactgcaaagccctgctcctgcaaaaaagcaaactgggattccttggaatcatgaaaatccacgccatccgcctttaccagcgtaaaagcaaaaaagcggacattccgtctggccgtgatctcattgttgagctgcctcacagagccgctgcacagatttcggggattcttgtattttgcctctgcatctgcgatctccccgttgatcttctcaaaatcactgtaggtgatcaccgcttctccccgcaggatcagttctccggtataggaaatattcagcggaagattcttaaaagtacgggcgttatttgtaatgacctcaccgatctcgccgttgccacgggtaaccgcttttgcaagttttccttcacgatacgtcaatacaatggtcagcccgtccagtttccagctgagaattgcaggattgccttgcagccagtcccgcagttcttcccggcttttcgtcttgcccagagacagcataggactctcatggcgctccttgggaagctcatccaccgcttcgtagcctacgtttaccgtaggactgttggccagggtaacgcctgtctctttttccagttccaccagttcatcatagagcttgtcgtattcgtagttgctcatgatctcctgatccttggcgtaatagctttcggaagctgcattcagttgttctaccagatctttgatccggtctattttggaagactgcatcttgtattcctgcctttatatatttaattgcgatttaacattccggtgtctctttgaagctgttccagctcttctccggtgacctcgcgccactttcccggcttcagatcccccagcagaacgttcatgatccggattcttttcagcgcttttacccggtatccacaggcttcacacatccgccggatctgtctgttgactccctgagtcaaaacgatacggaaggtaaattttccgatctgttcaatctcacattctctggtagtgatgtccagatctttcagataaatacctttcgccattttctccaaaaaatcgggtgttatttccctatctgtctttacgatatattctttttcatgacggttggcgccccgcatcatggcattgatcagatctccatcattggtgagcaggatcaggccttcggaatctttgtccagacgtcccgcataggtcagccgttccggatagcggatcatatccatgatctttttctctgcatgaggatctctctccgtgcaggtcactcccaccggcttgtaaaatgccagtaccttctgtgtctgttttccctgcagaatcttcttacccacctgcacggtgtccgtttcttccacctgctgtcccattccggccacctgaccgttgaccagtacttttccctgttcaatcagcttatccgcatctcttctggaacatacaccgcactgtgccagatatttattcagacgcattctattcctcattcctttccgaagcccttaacttccgggctacagacacacggccgcaagtatatgttttcacgcttccacaccatctgccgcttcgaagtcactgagacttttgactttgggaataccgtttccgtttgccacacccagctttgcggtctcatctgccagctcgttgtattttaccttcgaatgagccggtactttggtaaagcggatctgaatcttctgtccccagcccagcatggtctgtgcatattttttcgtcagatcattcttacttttccaggcaccggtgacccatttctcgattccttcatagtcgtagcggatctcgatgactgtaaagccgctgtttaaggcaaaccgtaccgcatacatggctcccagcatctctccggagacattccgctgtttcagagagtccggattgtcaccattaccgtattctgtatagatgcgtccatcgggaagaataaaaatacagccgaaaccgtattttttcagtgcatcctgatagcttccgtccacataggccagcaaggtaccctcttccggacgatcattcacatccgcatcctccggatatcttcccaatccattccactctgccataattcatctgtctccttatcgaataaagttggtcttctgcgccggttctctctccgggaaatccacgcccgcagcttttcctgcggcaatgcatttgagcagccatgccatattgttacccagggtacgcatggtctgcatgccttccagatcctgttttacctcttcgggagtattgccgtgtacctgattccaatactggctggataccaccggcatacagttgatggtaaaatatttgttcaactggtcaaaggctgcggaagccccaccgcgtctgcagctgacgatgcaggcaccgggcttgccctggaacagggcgctcttgccgtaaaatgccctgtccaggaaggaagtgatcataccggaagcagatgcataatgcaccggagatccgaagacaaatccgtctgcagtcttcgctttttccacaaattcattcacgccatcctcccggaaacactttccgttcttcagacaggcattgcagccgatacatccggcgatgggctgtgtacccacctggatgatctccgtctcaataccgtttttctccagtgctcccgctacttcctccagagctgtgtaggtacagcccttcgcatgtccgcttccgtttaccagtaatactttcattgcttttacctctttttctcttattgtttctcttctctgttattaccacccgaaatgtggtatgctatctgatagattttgatatttttatcagcattttaacaaaccggaaaggatcccttatgaatcatcgcacccgttcttatctgctttttgtattgcttatcggctgtatctgttatctggtgtcccatttcgtggtacagctgtattttgtaaacggttcttccatggaaccgacctacacctccgggcagccggtcttccttcagaaattcggtctgccagactgtctggactataacgatgtcgttgtcatccgccacgagacgctgggacgcgatatcgtcaaacggattgtggccctgccgggagatacggtacagatcacagagggaatcctctatgtcaatgatgttcctcaaccgacccccgatggcttctctcttatggaagacgccggcaatgccgcagttcccataactcttcagcccggagaatatttcgttctgggcgacaaccgcaaccacagcattgacagccgctttgcggaagtcgggatcatccccgccgcttctatcgcaggaaaagttattaccggtcgaacacccttccggtaggcaccatagttgtcagatcctgtgcatggcctttctggagatattctaccatgtgtttctcgttgccgagagcgtattccagaaaacgtctctctctggtatctccctctttccagtcaaacactgcgtcgctctgcgcgccatccagcagtcggacatacgcctcctgcaggtcttcgtagctgatgggtgcttctgaaatctgcatggtatcgtgctgttcatttcttcctttgatcagaagcagcgctgcctgccgcagaaagtcctcttccttttctcccatgccgttgtatccgtgatccgccattacgatcagagcggtgttgtcataggcaccactgtctttcaatgcctgaatataatttgctgccaatgtaatggaagcttccatgctctgacggtaagatccctgttccacaccgataacattggcgtccttgtcatagataaaaggtgcgtgggctccgttcagatggatgaacttgaaacggtttcccgtctcatccatcaccacaccctgggctgccagcccctccttgaaagccgtattatccgcagtaaatgccttggaatccgaaccttccggatgagattcccgtaattcattaaaatagacttctttgatcacgcagtatcttttcagatcatacggtgcataccggaatccaacgagcttcagctcctgctttgccagttccagataagaaacgggggtgaccttagtaaaatagacattgtcaaaattgtccacgatggaagcatcctgtgcacggatatcatcctcatagaggtcgatctgataatttctgctcttcagttccttccacaacggtgcctctctgtagactctgtccagatagtcctgaaaagatccctcattctcataccattcaccggataaaataaaaggaatagcattcaatgtgctagtgtaagttcccatggtattctcaaaataagtaaaatctccaaagatctcccggtactccggatgttcctctaacagtgaggtaaactccctggaatctgccgtatccaacacaaggatcacaaaattgttgtccgcagacatctcgaattcttcttccacgctgacatgcagatgcagtttggaatgcagtgccccgctagtaatcacggtgctgcatgcggtaaccagaagcatcagggtcatgcatccgctgatgaacattaccacatggacaaatttctgctttcgcagcgcgatcattgccgcaattacaacgatcagcactactacccaaagaagcaatgtatctttccggagaatatcgtatttgccccaccagattgaagttccgtccaatggcggcagtctgtcgatcataaaattcccctggatataggtgcagataaaaagtgcaattcctccggccagtgtgatccggtacacatatggatgaatcagcatagcaatcagatacaacaccgccagtacggcgaaacaggctgcaaacatccccagtgcagtgatcaataacgtggaaaaatcaaaccagaattccgctgtattcgcacagtacagatcgatcggagcatacagaaacagcaggaaactgatggccagggatatgaaaatccccggcatcagctgtctgcctgttatcttttttctcacagtatttttactcacacttattctccctgtcacattgttgcatttctttctaacgattatactctcttccggtagccttcatggtattcctgtcaaacgcatatcccgtctgcacatattcctgcatgtgatcctcatccagaaaagaatattttaagaaccggcgctcccttacatcgccttccttccagtcgaaggcggccgtgctctgctttccgtccaacagacgtgtatatgcttcctgcagatcttcaaagcttatgggtgcctgtgagatctgcatggtatcatgggtttcccccatgccttttatcaacagcagcggacactgacgcatccaggcttcctctccgctctcatctaggcttccgttgtatccgtgatccgccataatgatcagcaccgtattgtcataagctccacttccgcgcagcttctccacatagttcccagccccggagagcaccgccagcatcgtctgttcataagttccttcctcttcatcaataatattcatattttcatcatagatgaaggggacatgggctccattcaaatgaataaactggaattttgcctgtgtatcctgttcactgatccctctttggtccagttgactcttaaatatatgatcttgctggctgaaactgtatttttcttgtgcattttccactttgaccagttcatcgatagccgccatcttgaaaatacatttcttcttcagttcaaaaggggcatatcggaatcccaccagtttcaacaaaggttttgcaaatctgacataggaactcagttcaaaatccacccggtatacattgctgaacatctgggctatctcgtcatccagataaagttcttcatcataaaactccatccggtatccccgttcctgtaatgtccggaacagtggagattctcggtacatccggcgcatataatcttcaaacggttcatcattctcgtaccattcccctgacaaaatatagggtacggctctctcggtacaggaatacgcccctacggtattttcaaaataagtaaaatcctgaaactcagctgcatattccggatgtgtctccagcaattctgcaaaagttctggagtccacggtatccaataccagaattataaaattctgttcatcagacattacgaattcgttatctccgccaagctgataacgcgctctctcctgcaatgccccgctggtaaatactacgctgactgccgtgatcaacagcatcagggtaagtccaccgctcagatacattacggttctggaaaacagatcttttttcagaaaaacgtacataagaacgacgatcagcaaagcaacactccagaggatcagatcttctgtccgcagtatcgtataattctcccatttgatggtcgttccatccagcggaggcagcttgtcgatcataaaattgccctggatataggtacagataaaaagtgtcagccctccagccagtgcgatccggtacacatactgatgaatcagcatggcaatcagatataacaccatcagtacagcaaaacaggcagcgaacatccccagtgcagtgatcaataacgtggaaaaatcaaaccagaattccgaaacattcgcgcagtacagatcgacaggtgcatataaaaacaacaaaaagctgatagccagggatatgaaaatccccggcatcagctgtctgcctgttatcttttttctcacagtatttttactcacacttattctccctgtcacattgttgcatttctttctaacgattatactctcttccggtaggaatcatggtatccatatcagaagcataccccgtctgtatatactcctgcatatgatcgtcatccaggaaagaataccgtaagaaccggcgttctcttgcatcgccttccttccagtcaaagacctcatcactccgcctgccgtccagcagacgcacatatgcctcctggagatcctcaaagcttatgggtgcctgtgagatctgcatggtatcatgatgctcatttcttcccttgatcagaagtaatgcacactgacgcatccaggtagcctctccgctttgtcccaggcttccgttatagccatgatccgacatcacaatgaggactgtattgtcgtaggcttcactgttgcgcagatgttcgacataatccattgcaccgaccatcgtggcctgtgcgctctgttcataggtgccgtccagttcattgatgatattcatatccttatcatagatataaggaacatgtgctccgttcagatgaataaatttgaattttttggaggaatcttccacggtaattccctgcagatccagctgactcttaaatacatgatccgattcactgcagctggtttcctcaggtgtattctctacctggagcagttctgcgaatgcagcctttttaaatgtacacattttcttcagttcaaaaggcgcataccggaaaccgatcagcttcaacagtggtttcgcaaatttcgtataagaactcagttcgaaatccactacgtgaatgttgctgaacatatgcatcagttcggtatccatatacaattcagaatcacagagttccatattgtagccacgttcctgcaatgtctgaaacagtggggactcctggtacaccctcttgccgtaatcatcaaagggttcatcattttcataccagtctcctgacagaatatagggaacggatctctctgtgcaggagtatgctcctaccgtattttcaaaataggtgaaatcacgaaatacctcactgtattccggatgctcgtccaacagttccgtgatcgttctggaatccaccgtatccagcagaaggatcacgaagttctggtcttcagacatcacaaactgttcgtccgcaccatattgataatgtactttttcctgcagtgcaccactggtaaatacaaaactgactgctgtgatcagcagcatcaatgtcagtccaccgcttaaatacattaccgttttggacaaaagatcttttttcaggaaaatatacatgagcactacaacaacaaagccgatgccccagagaataaaatcctctgtcctcagagatgcatattcttcccatcgaatcgtcgttccatccaggggcggcagattcctgatcagaaaatttccctgaatataggtacagatcagccctaagaatccacctgccagtccgatacggtacagcaccggatggatcagccacaagacaatatagatcagaagcagcacaacggtgctgatcaaaaacaggcccagtgatgccctgatcagaattccgaaatcaaaccagaactcggatatattactacaatacaaatctaccggtgcatataaaaacaccaggaaactgatggcagccgccaccacgattcccggcagcagttgctttttatcccgctttttcatgtcagattacttctcctgcttgtcctctgcctgatccagcataatgtcatcggattctacttctttgtttctgttctcatcgattcccagactcttgtcgatcttcttcttggcctttctccagtagataccggctgcagcgcctacggcgatgactacaccggctactgcctgaatagcatagttcataacagaagggtcaatatatgcatctgcagttccggaaaacagtactgcgaatgctgctgcaaaaaatgttacctgtgcgatcttgcttaattttttcatgtttttacctctttcttttactctttttgtatttcagatttttattgttcttttgcttttttgatctgttcctggactgcctgtacaatgtactttgcacctacttcggcactgttgcccagattgtatacatattcttccacgaacttttcgattctgtcatggtaagcatccttctgctccagcagatttctgaccttgctttcggtctcctctgtctttgcaggatccagacggtctccgatgacatccctcatccagatattgataggtatggtgtcgatcttctggtattccggattcatgaccttcatgggagtatccacgaacagaaccggcttcttggtcgtaaaggcatattcatacgcgataccggaccagtcagtcaccagcagatccgcctcgaataccgtgctgttggatgagaagtctgtctgaatgtcaatatccgggttcttggcataacgctctttcaggcgatccatcttatcctgctgcagacgcacctgttgaggatgaggacgtactaccacttcataacccttacctgccagatcatccagcatgccttccagacagctgtccacgatattgtccttctgccaggaaggcgcgatcagaatatgctttttctcatgaggcgtcttatccgctttcctgtaatcttcgatcatacgatccagcaggcagtagccccagtcgatcagtttcttgggcggcagaccgtaagcttcctctgtcttgcggatttcctcagtatgatgcttaccgacgcagtatacggtatcgtagtgatccatggaaccggtacgcatggtcatattcagactgtccatacagtgaggaatatagatatattcaatatccttccttatatagcttcgcttaatatggaagttctcaatatccggcatagtcatgaccactacgtctgcatccatcttcatcatcagtgtgatcagacgtttttctccgatataatacgcccggatcttgtcttctttttccgccagtgcaaagatctgatcttccggatcactggtgatatagtggatagtcagattggtatgtgccaggagccattcgataatgccctgataatatttatagaagccactgctctcggaataaaataccagatgcttgttcactacagagaagaaacgtttgaaatctttcttctctctcttggcatagggatttttctcgaagagtttcttcttgccaccaatggactgcaattcctccagttcctgtttgctggcctccagttcctcataatccacataatccttgggattgatggcccagttcagcagatactgctgtaaaattgcgaacaggttgctggcgatccagtacaaagccacacctgccggaacaaaccagcccagatacagggacaggcctaccgaaaatgccatcataccgtatttgttcagcttggactgctctgcctgaatgacattggctgcattctgtgccacacacaacagccatgcggaaataccggctgca

SEQ ID NO: 5472 - DNA, 13906 bp, Unknown
  gut microbiota DNA sequence
ctgcattctccgccaccgcatcttcctgttccagatcctgcaaatattcctccagaatggacgccaggtccttcttgcggttgttgccgatcgccagatcgatgcagggatcctgctccacatcttcccttccggtctgcacgtagcatcccacagccaccaccagtgccgccggatttttctgcttcgcacgatgaagcatctgtctgcttttccggtctgcaatattggtaactgtgcaggtatttacaatataaatatctgcggtttcatcaaatggtacaatagtataacctttttcttgtaacatttgttgcattacttctatttcataggaattaaccttacatccgaggttgtgtaatgctacacttttcataggattcctcactttttttgtattgttttcgtcttgacttttgagcgttcccccattaatataaagtcagaaggtatgacacacattaaggaggtagtcaacatgaagacagttcagatttctttaaattctattgataaggtaaaatctttcgtaaacgatattactaagttcgattatgatttcgatcttgtatccggcagatacgtaattgatgcaaagtccatcatgggtatcttcagcctggatctttccaagcctatcgacctgaacatccatgcagaggatggcgctgatgaggttctggaagtattaaagccttatctggtataagttaccgattcggaattccgaatacatagtaaaacagagaacaccttgagagacgcaatcctcttgaggtgttttttatatgccatttcaaaaaagtaactattcagtacctctgtttccccggttctgaatagttactctgcattcgcacttatgcttccgcaatgatcagttctttggtctccagtgcggtcttcaccagttcgtcgatcttctcatccagattgtgttcatgtctgcggatcaccttcacgttcggtttcgtcacgggatgttttgccacgaagatggtacaacaatcttcatagggcagaatggaagtctcataagtcccgatcttctcggatacttctacgatctcctgcttgtcaaatccgatcagtggacggtagaccggcagctcacatacttcattggtagcgatcagggaattcatggtctgggatgccacctgtccgatgctctcaccggtgatcaggcccaagcactcggtctccttcgcgatctgctctgcgatccgcatcatatagcggcgcatgatgatggtcagttcctcatgcggacatttctcatagatatataactgaatatcggtaaagttgatcacatgcagatagatcggtccggtgtaacgggcaacgatcttcgccagatccactactttctgcttcgcacgctcactggtgtaaggcggtgcatggaaatataccgcatcgatcttgacgcctctcttggcgatcatataacctgccacgggagaatcaataccaccggagagaagcagcattcccttgccaccggtacctacgggcattcctccgggaccgggcaggatcacggagtagatatagatttcttcacggatctcaatgttcagcataatatcgggatgatgtacatccaccttcatattgggataagccttcaggatagcttctcccatatccatgttgatggtcatggaatccttggggtaatttttccgggcacgtctcgctgccaccttgaacgtctgattgcaatcgggatatacttttgcaatgtagtcaatcacggtctcacacagcttctcaaagccctcatcctgtacgtgcactaccgggcagattccggagattccgaagactctttgtaagtgtgccacaacttcatcgtagtcaaattctgactctgcatctacgaagatacggccctgtgtcttgtgcaccaggaattctccctcacactttttcagtgcatacttaatctggcgtaccagagcatcttcgaacaggtaacggttctttcccttaatgccaatctcggcatattttatcaaaaatgatgtaaacacgttcgtttcctttctgagtgtttctcaaatcgcttatctgcgactgtatctgcgtaacataggtactatattgtacaatgcctggagacatacgtcaatctcttcttccgtggtaaatacagaaaaactgaaacgtatggtggaatccagcagggatttatcgatgccgatggctttcagtgtagcagaaggctgcggcttgtgtgcagagcaggcgcttcctgcagaaacatagattcccttgtcctccagtgcatgcaggagcacttcacttctgacgccggcaaaagatacgctgacaatgtgtgccgccgttccctcaccgtacggtgcatccggcaaaagtccgttgaccttcacctgatccagtctttccacaccttcaatgaatcgtctcttgcaggcgcagagtctggcatgatcctcatcaaaatgactatagagcatttccgctgcttttgcaagtcccgcaataccgggcacattctcggtaccggagcggaggttctgctgctgtccgccaccgaatacgatgggctggatcttcacccgttcccctacatacagcagtccgacgcccttcggtccgtggatcttgtgtccactgacggacagcagatcaatgtgaatcttcttgggatagatccgggattttccgaatccctgtaccgcatccacatggaacagcgtatccgggttcatctgtttgatcagagctccggcttcctcaatgggctgcagggctccgatctcgttattcgtgtgcatgatagataccagaatggtctccggtgtcatggctctgcgtaagtcttccagccggatacgtccgcagggatccaccggcagataagtgacacgatacccctgggtctccagataacgcatggtctgcaggatagcgggatgttcgatctgcgtcgtgatcagatgattgcctctgcggcaattcgccagggcgcagccgatcagtgccatattatcggattccgttcccccggaagtaaataaaagctctctctcctccaccttcagaatccttgccagagtctccttggcatagcggaggtatttctctgcctccactcccttcatatgcaggctggagggattaccgtaatcttcacacatgatcttcgtcatcaactctgccacttccgggaatgtccttgtggtagcggaattgtccatatagacttccattctcttcttctccttgctatctatctcttcagtaactattcagcgccctattcgccaaatcgactcttccgggctttccttttgctctgaataattactatattcttcttatgaataaaatatgccgcaggcaggcgatccgtgccgtccgctgtctaattttccaactgatacatcagccatgcgatagtcgtaaatccggccgtctccgtccgcaggatccgtttccccaaagtgatcggttgaattcccgcctccgtggcaagtcttatctcctccggatcaaatccgccctccgggccgatgaaaatagcgatctgctgtccgggtcttgcgctttcgatgagctgtttcgtctgtggcattccttccgccagctcgtaaggtaccagtttcagatccatttcagaagccgttttcaccgcctgcacataactcataaccggtgccaccgtcgggatcacgcctcgtttgctctgcttggcggctgcttccgcaattccctgccagcgctttattttgctgtccgcttttttctcatccaatttcaccacgcagcgtttcatagccaccggaatgatctgaaaggctcccagttccacagccttctggataatgagttccatcttgtccgccttgggcagtccctggaacaggtagatcttcgcaggaagctccacaccatcttccttgataaaacgtagttccagacggacacagtcctcttccagtgcaaggatcccacagcgatattctttcccgtcgattccattgctgacagccacttcttcgccggggcgcatccgcagtacatttttgatatgattcacatcggttccccggatgataacgctcttcgctgccacgtcgatctgttccggttctacaaaaaactgatacatagaaactcctattttaagcgcttaattctttcttgcggtaacgctgacccattctccctggtaggtcacttccagtacttccaatccagcggccttcacagcctccaccacggtctgctccttgtcatcaatgatgccagaggtgatgtagataccgcccttcttcagctgatgtacgatgacaggagtcaacggtaccagtacatctgccagaatattggccaccacgatatcataacactcatagcctaccttgtcctgcacttctttgtctgtaatgatattgccgatcatcatgtcaaactgtgccggatcgattccattcacttcgcagttctgtgccacagcttccacagcacagatatccagatcggttcccacggcatgttttgccccgaacatgagggataaaattgccagaataccgctgccggtgccgacatccaaaagctctgtctcaggagtgatgaacttacgcagctgacggatacacagctgtgtggtctcatgcatgccggtgccaaatgccgtaccgggatcgatatgaagcaccatcttgtcagtatcttccggtttgatattttcccaggaagggatcaccaggatatcatcgatatagaactggtggaaatactgtttccagttgttgatccagtcaatgtcctccgtctcatctaccacaacagatgcctcgccgatatccataaactggcgtaagtcttccagttcccgctttacatccgcaagtacagcttcggtcgtggtcttctccccggccacttccagactgccgtcctctttttcctctacaaaaaaacttaaataggcaatgccgtcatcctccggtccgtccggcaggatatctacaaacatctgctccttctccatggcggtcaggggcaccttgtcttcgatctgtgccccttccagtccgagatcgtacagggtgctgataataatatcttccgcttccgttaccgtctttattctgaatttaacccacttcattgttctttttttcctttcttttccattgttccaacacagcatatatcattgcagccactattgcaataaaactgttgatttccaatacgctgaccgcatccagcttctctctccaggtgtaccggttcaatgcctgtccgtccacagttgcttcatgtaccaccagttgctgattttccggtacatgcgccttttccgtagtagtatatactacctgcggcagattctcggaaatactttgattcacgatccggtattcatatacagcgccccttttcagccgggtctcgatgacggcagggaaaaatgttgtcgattccatggcatcataaggaatcacaccttcatatatcttctgatcctctttccatatctccagacccagaagtccgttccgttcttcctcctgattatagttcaccgcgatttccagtgttttcagaaaatctgtctccgcaacaaaatactgcgaagcatattctcccacctgcaggggctctgtatatccataatcctcacttaaggaactgtcctttttatcttcacggattcctccatacggccatacaaacaacatggaaagtatcgctgccagcaggactcctctttccacccatttaatcatttcccgtttcctccgttatgttcacctttaaaatatcaaaatccgtattcccgtccatatactgaaatccataatgtcccatattttcataggttacggtatatttatccgattcctccagcaaatgtccgaaacactggaaataccagactcttttccccaccagttcttccagatccggcacctcttccatggtataaaagatctggtccggcatatagcatccgaatagctgtccgaagcgggaatccgtatcgtagacgaccacatctcccggctccatattctccgctataaatgccttcgtctcttccagatatgagattgtaccatattcttcatgataagagattccgtaggccgacactcccatccacacagtgaaggacagacaggcgatccattcctgtaaattgatcctggataaaatgatcgccattcccagccagaacaatcccatgctatgcataacatggcggtaggtaaaaaagtgggacgcgtgtaatgccagcagcgccgccatcaaatagcttactgggaaaatacaggtacacagaaccgcaaaaacaccgtttcttctccccagccgcttccaaaagagaatcgcacagaccagtgtcagtacaaaaagaagttctcccattttggtcgcatacttcactctggttccgaaaatgaaattaaaaaattcgtaaataccgaatttggactggttcgtcgggtttccatcagaaaccagcagatgaaagaaatcggattttatcagccatgccacaaaaagcaatacaacggaaccaccacagacaaacggcttccagatctgttttctgtcctgctgccaaatcaccgccaccagatacaggtagataaacaggtaactgaacgcggtaaagtaatgactgaaaataccgcagaaggtcgtcagaaacaatatcgtccacagggccttactgttcagacgctcccgcaggaaataagcggtcagtccgcagacggtaactccaaacaccgtccaggaatacattctgttgttcacactgatcttcatcattgcaggtgtcaggcttaccatgatcatataaagggctgctgtcttcgctccccactgcctgcggatcacgacaggccccagcagcatggacaataccgttcccagcaatgcaaacattttgtaggcaataatgccgtctcctaccagaaacgaccacagccgcaatcccatataccataccggcacatccgtatcatgagccgccagtaccacgcgaatgattcccatcatcgtattgtcatgggcggtgcgataactgtatgcttcatcatagtcgatcccctcactgagacacagggagaacaataccgccgtgcacagaatgaggatcagccataagccaatggttgcaattttatgtttcttttccgaagtcatttttttcatctgcatcaaatcattaatcctgtcttctctttactcttctctatcatatgattcagcttgcggaacggcggctccaacgccagaccaagcagcaatgctacgatcaggaacagtgtcatttttcctacattgatccaataatccacgccgtacattcctgcaatacattctttaaacgctttcatgccaaactggaacggcaggaaaggatagatccactggaatacctgcggaagaacctcgatagggaacgttccgccgcttcccgccacctggatgaccatgactacaatagccagtgcctcacccacgtttccaaaagcgaaagtcacagaatacataaagcagctgaatgccgcactggccacggctgccgccagccagtataaaaacctgtgctgacactgtatctcaatataataaaggttaccaagaacaataagcagtgtctgtgcctgtccgatcaggaaaaacagcagatatctgccaaaatatctctcatgcgccttataatgatcccccggttcaatgggtttcacacccacgtgaataatagccaccaggaacagcgctcccacccagattgccaggatcgtatagaacggcgatgccgcagagccgtaatgatccaccggataaacaggtaccgtctccagtctgaccggagaagatacgaagtctgccaccgccgtcggatcggcagccatagcgcttaaaatatcctcataggtctccgcaccggtgatccgttttatattatctgctattttgctgaccttgtccagcagttcctgtgcgatcaccagggaatcctgcaggctgacattaccttcctgcaaagtcttctgatactctttcagaatatcggaaatttcatccatattcacatccgtaccgttcatcatcgctgcggcattcaggaaagcctgctgcatggatttgccggtagcccggaaagaaggtctgacattgttattgtaatcactcatcagattattcagctgtttgttgcagatctggatctgttcccggatctgtgcccgcagagtattgatatcatgatccacatctcccttgctgtcttgcagctgtttcagatccgcttcgatcgttttcagagactggttgatctcctgaatctgagcatcctgtccggtgatcaggcttcccagcacatccatattggcctgcatgccctgtaccagtccgatggccgtgcccaatccggtgtccgtggtgcttcccacattgttgctgcccatctgctccagcaatccatcagaaaagaccgacagatactgcaacgcttccgtgaccatatccatactgctgctcaccatatctcccataacgtcaaccgcatcgacgctggaattgatcatggtctgcataccgatcatggtatttcgtccattctccagcatattatccatatccggaagcatattctgactggtctccatgatcatctccgcggaggtcataatactctggaaggactgcaacataaccacataatcctgcaactgtgcctgcatggtatccagagattcttccacactggtctgcccgccggcattcaccaccgaaagggcatttcccgctttcatcaccgcttctgccacagtactgataaaggtggcatttacctgttcctgcacggcatttttcgctttgcccgtgattttgggggcaataccattctttttctcattttcatagtagtaaatggcgggatgatccacttcaccgtcgataaatcccagcatttcctgagtaaaagtctccggaataatcaatgccgcatagtaatcactgttcttcacgccttccagtgcttcctccgtggtctccggaaacacccagccgatagtggtattggctcccagagcctccagcacactgtctcccacgttcagagacagccccatgatctccgccccggcatcatcggaagccacggctactttcagctgactggtagctgcgggctcataaggatcccagttggagaaaatgttgaaccaggcatacagtgccgggaggatgctgagtcccatgataataacgaccgccaccacattattgctgatccgacggatgtcggtggtaaatattttccagatattatacatactattcaccatcctcccagtcttcggtctcgtcttcgttttcctcttcgctttcgtcttccggattctcttcggtttcgtcttccggatcctcttcggtcccggtctcggccggggaattcaggccttcaccaatcagtttccgggtctcccggatgatctgcgccgcccggtcaaagtctgtcggagtcaccgctttgagatcgccttcttctcctttaagctccatgatcttctcctgcagattataatccatatattccacaacgatcagatagattgacagggcaaacagcgacacgatccacaggatcaggaagatgaccttgttgctgccagtcaggaacaacagtgccagaaaaaacaaggggacgatccagatacatttcagaccgatctttattctttttctattcttctcatgaagggcctgctcgtaatccagaaccttctgaaaaatttcttcgtaatttctctccatgattttacctttctgcctgttcggaacttcattcacaaacccactcctgcggagttttcgttttcatggttctgaacaggtgtcacattaactcagtgtcttccatacgctcttccacaaaatggttcagttttacgaacgggatccggatcaccaggccgatcaacagtccctcgatcataaacaggctcaattttgccagtgcttccatataggcagtaccgtacatacccgccagtgcctcacgcatagcccggatggcataggggaagggaaagaaaatataaatcttctggtaggtgtccggtagcagttcgatcgggaaggtaccgctggaaccagcgatctgcaataccataacaataacgcagacggccttgcccacatctccgaatgccagtgtcagagaatagatcaacagggaaaatgccgtagccgtaaagcttgccgccaggaaaaacagccccggttccacaatgtttacttttaacagccacagatctccggccacaatgatggctgcctgaatctgtgccaataagaagaacagcaaatatctgccgaaatacaattgatagctctgtacattttcaagccctttcggagaggcttttactttcaccagtgccaccaggatcgtagaacctacccagatcgccagtgtggaatagaacggtgtcatggcagaaccatacgtagccaccggatacatggctatggtctccatggttacgggagatgcaaaatatgcccccagactatccggatctcctccaaggaaacgcaccagaatatccatcatttcctcttcggatgcaccgtccagcttctctgtcagatctgtgagtttggcactgatattatctaccacatctttgatctgtcccagactctcactggttccggacacagtgtcaccgacacctttcatgacaactccgacatttttcaccgtattgctcagggtatttaccagattggtcacctgattcagagaatctgacatatttgtcagaaccttctgcatctggggcaccagattgttcttatagattccctgcatattgcttacagaagtctcgcagctgtcaatggcactccttaaattattcatggcattgttgacattgacctttgcattctccgcagccttgtcgtccgtggattccagaacgctgcccactacggtattcatcagatccagttccttctgcatggctttcaatgcttccatagcagcatcagttgccgctgcgttgatattgctgccggtgccgccgttcgcagcattaccgtcagagacgctttccagcttttgttggatcagtgccgccagcagtgtatttacttgtccgttcagcgtattggtatctcttgccacccggttcagatctctcgtcatctgggcggtatcctccgccagtttgctttcatccagagcctttttgatactttccagagagttattgatattgctcatggaagtatcgatgttgttgctgaaattgcccagggtgtctctggtagaagacagatcctgactgctttggttcagactggctgtggtgctgtccagtttcttctgcatcgcgggaatctcatagttgacatgggtgatggcagactccagccgcgcattgcctgcctgaaaggagtcgatcatggcactgtattccttcagattgtcattcagttcctccaatttggaacagaattcctctacataactgtccccctgtacctgatccgacaccgtattgccctcttcaaataccgtggtagccgccaccttgataaaggtctcattgatggtattctgcagagttcctgccaccgtatccgtgattttggtggcaatggcattgctcttctgattctgataatagatcagcgccggattctcaaaatcatccgaaaatacattgtacatactataagtaaatttatcggtaatgacgatggctgcataatattttccggcttccacgccctcttttgcctcttcctcggtatccagaaagatccattttacactggtgttggaatgcaggctttccagtacggattctcccatatttaccaccgatccgtctttcagcgtatagtcctgatccagggatactaccgccacaggaattcctccggtattggcatagggatcccagttggcaaatatattaaaccacgcatacagcgacggtatcacgcataacccgataataataaccagcgcaaaaggatgcttcaccagtttttttagatctccggtaaaaatcttccaaatatttttcatatagcttctaacaactcctcatccgtatccatttgattggttttggtcttttctccccgggccgccgcttcacacaatccaagtatcaggaagaaaagcggcgcattcagcacctgctgaaagctgatcagggaatgtatcccgtaggtaagcagtaacaatactgcgagaaaattcttcctgtatgtctgcagcgccgtgataaaaacagctgcataggcagccacacccagcagtcccatattgaccagtgtggtgagccactcattatgtgcattggtaaaaacagaaccttcaaaatatcctttatcaaaaagcaccgtgcctcccggcaacagttctcccagatacgatgcaaaacaatccgggcctgctcccaacagcttctgatgcagatttcctttccggaaacccatccatgccatctgccacaatcttccccggcgattgccccattccgcaaaatcgattaccaacaaccgatgcagataccatgccagcactaccgctattcctgccagtgcacaacacaatactccctcttgcaatatttttttcttattctccggaatcctgcgacaggctccccaaagcagcagacaccctgctgcaaccggaatccatccctgccaggctgccagttttttggcgatgccatcctgcaggagaatgtcaaacgttcccagatataacatccatttaccccaacagcacattcccagcgccaccgctgcaagaaaaaggaaatatacttcccaatgtccggtttgcttccggtcgagccaaaagcacaaccccatgactgtgcatgccacgatcacaccgctgtcacttccctgtaaaagcagaagcatcatggccaacatattgcacgttcctgccagcagtgtgggaccttttttccccgcttccactgcccggtgaaacagcgtcatggaaaagggaaacatcacactgtaatacccgctgagccagttgctgttccccagcgtggtcaacatatgggtaaactcccagtcccccacaacgtaacccttgagaagtcccagaggatcatagcccagcttctgcaacagaccgatcagggtgaccgccacaaaagccgcctctcctaaccatatcgccgttttacaactacctccgtacttcgccgtcagtaaaaaacctccgatcatcaaacagatcgtgacagctcccatgtaccattcccgctctccgttccacgcgatactgccataggggctgcagattgcagagagtaacgcacagattccgtacaggcagaccgccgtcgttaccgcatgtgttctgcatttatcgaccgattttttcactacttcagccagagatctggcaaaaatccgatgttcccctgtccaccggctgcttacagcaaagacacacattgccagcaatgcgatcccctggcaaagcagtgaaacattgcgatacaggtaatatttggtatcacccagtttataatatccattcccgggaatataataaagaggcagcactgccagaataacgatcagataactctgacatacaattttcagaaattcctctttccggttctccatcctgcaggctccttcgtgtcacagacagcataactacttgaattgtaagcgtttctgcccattctgtcaaaccgttcaccctgccttttgacaaaaaaaacaaactgtattctatatcattggccttcaaagatacctttaactttttcccaacaaaccagtagccccggctgggtgtaagaataagcagtgc

SEQ ID NO: 5473 - DNA, 64969 bp, Unknown
  gut microbiota DNA sequence
gcttccgcactgggcaggttgtcatatccgtaagcaatataataatataccagcggataaatatcctcttgccgtgatacgttctgttgttccacccatttttcggcaagggtgattccctgtgcgtaatctcccgcctcatagagatcgatcatcagctccagcagggtgttatggttgatcttctccggctgtctgtcatagagcggatcgatcttaaggctctccttatgtaattcttccgcttcctgcactcttcccagtttttttaaaatattttccttcaatgcccgggctttcatgcactggtactgtctgagaatagattcgtttacatgttccagagcctctgcaaatcttcccgcttttgcatccagacaggccagttcatagaatccgggtgcctggaagttgccaccccagatggccttataaaaggcatcataggcttctttttcttttccctgatatttcaaagaaagtcccagattatagtacggctcataatcataagggttcggattggaacggacagacttctccaccgccttccggaaatatttttccgcctcggcaaaatcacactttttaagcagacatcttccataggcattgttcaggcggatatcggtaggatccctgcgcagtccctccacataataatcctccggatggtaagtggcatgccggtattgctccacatgcagaccataaagaaacagatcctccgtggtttcacactcttcgggaagcggtgctgccttcgccggttccggcacttccgcttcgatcttttccgggattcggtaagagaccagttctctgccatctgaagcaaggacgcttacccgcagaccgcagattgcctctgtgtcgttttgcttccctgttttttgtgatataaattgctgcaatgtctcccgatcgaccttcaccttgcaggtctgctcaggcgacagatctgagacttcctcatacagtacctttccctgtccgccgttttctccaggcagtgtcagttgaatttttgcctctttttgcacggatgtggtataggccgataccgtaagctgtcccttagtctcatcatattccacattcactgcggcatctatggtggcatttttcacataaccgatatttttatagggcataaaatactgtttgaagttcttggtctcctgaggctggatccaggtgaaatccggctgattatccgtaaaacagcctgtcatcagttcgatatacggaccgtcctcgtcggtcagtgctctgtcccatgctttgccgaattctccgcatccccaggtccactgctttttcccgggagcaatatgatgatctgccacatgcagaagtcctgcctgttttccgtaatcgtactcccctataaaattgtaatcggaacgatatgccatataggaggtgggcaccggaatatttttatactgtgcgatattcacatgatcgtatttgtgcttatagtaggttccctccgcataggggaagctgataacatcccgcttgccgtggtcatagaccgccgtcacatcctctggaaagacggagatggtgtcatcatttaccgccacggcagggttcgcccaccatagaaaagtctggggcattttcgtacggttgtaaagttgtgcagataattcgatatatgccttatcaggatacaaagttatgcccagcacgccctctgtccggaacatattctcgatctctcccatccatactgtagcgctcccgtcctcattttccgcataggtatattccaccggatcaaaggtactgggtctgtgatgctgcggccagttgaactcaataccgccggagatccatggtcccgccagtcccactaacgccggtttgatgacatgattgtaatagataaaatcgtagccatttgtcttgtcataagctctctggatcctgcctcccagctccggcagcatcattactttcagataatcgttctccaaaaaaagcgctgtatactccttatccactttctcatcgctgatcttctcgatcaccgtgtggggatagatccttcccgagcttccctgatagacacgtttctccaaaaacatcggattcttatccggctttcctgcttcgtatgtgggaatgattactttttcttcccagacctgaaccttattcatggtttcctccttttatctccgtgcagctttctttccgccgcccgatattattttaacctcgcaccagcatgcttaactcttcttccgttatttcctccgccggctcaaaattctctcccgacagatatgtataaattgccgcctgcagtgccctcgcctccagatactgctgactcttatgcaattccatggtggatagcaatacttttcccttcaggcatcgaaactctatcatctgtgccatgggacgtaagaatgcatagctgtccatctccgtaatgatcgtcttcatgggatgcggtagaatcaccgcccgcttcgttgtcatgatccaccattgccagtccgtgtgaaaatccgtcggaaattccttaaaaattggatgctccgtatcgatcagctgccccataccgccttcctgatccgcaaaagttcccaccgaccagaaatccgtcgtaaactgtgttttaatggaattgggcagactctctttgtctgcatccggagacagatagactctcccgccgttttgcagaactgctctcgtctgctcatcaaatactctcgtttcatatacatttttcggacattctgggcttgtttttttatagacccacacaggataggtactggtgcagtcacccatgctcaccgtcagcatgaatgccgccgatactcccttaacctccagaggaatgtccagtcttcccagtgaagtataagtccccggaggacagtttttttgcccgtctgcccggccgcatagaaactccccgcttccggtattcacggcacagtcccgataccccaacgtccagacaagctcaccgctgatgctctcttttccaaaatttgccacttctacttccgctgtcagatattctccctcttcataggtatagcggggcattttcacaaaaatacggctctctgtgaaaaactccctgaaccgctccggtctggcaaaatcatagggcttcggttctaaatgggagttcatcatacccaccaaagccgttccctgtcccgggaaatcctgcaatcccaatagtgaaatgcccgacagctcccttgtgcgcatggctgcttcaatctcttcccggtatgccagcctcgacagttctccggtggccttcacgtattttttccatacgggcaatagtccccgttcctctacgcgcttccgaatcagtttcagattcaccggatccgaaattccctgaaagctttccagttccccaaaatccggcagcacttcgaactgccccacttcaaaactgaataccggcttctgatactcttttcgtatctctgccatcgcctcatcataggttcgatctgtggagggatagttttcattgagatacccccgcatgccggagaatgttccgcggatcaccacatccttgcaactctgcgatgtatagaaatcgctctctgggtcacatccttcttcaccataaaaggcattggatccgttcgcatacagtctggtcggatccatccttttcgccgttctgaccagttcccgcatccgttctctgccctcatcttgtgcctgcaattcattgcccagtgtcagcattacaaaagagggatgattggcataggttttcaataggtccacaagttctgcccggtaataccgatagctttcctccgttccaaaggcatccttcggatcccagtgagacagctccggctgcagaagcattcccagttcatccgctgccgcaaacgcagcttccggctcacagtgggaatggaatcttacaaagttgattccataactgcgatattttaataacatttctttccattccggaattgtcatgggtggatgcccggtctccgggtattctgcgcaatttgcctcaccccgcagaaaaattgccctgccgttcagtgccagtctgccgctgccgttatcaccaaaagagcggatgccgaaacggatcctgcactcagcagtgctaccgcctttatcttctgctgagataccgttgtccagggttacagccatctcatagagattgccctcatcttcgtcccacagtttcacattctcccgcagaggcagatcacggaaccagatttccattgttttcggattctcctctttatctgttccggcttccgttaatccctccccggaacagctgataatttccgtcaatgtctgtgtgtcttctaactctcctaccgccagagcctctgactgtaatatgattttcgcatctttatagactttctttgcgccaggtgccagttccacacatacatccagcacatatccgcctgctttatttttctcttcctttttcaccgctctcggatatacccggaggctgtctataaaattctgcggtctggtatacatgctgcattcgccaagtatcccgttccagtttgtctgtgtctcatccgtcgctgcggaagaataacagatggcagctttgggcattcccggatagctgttatccgaaagaaacgtaaattcatgttctcccggtgccgccccggtgagttcaaaaatataaggtgtacttagtgtcccctgccggaacaccgcacacgcttctccatccactagcagccggagtgcccgtgcccgctccgccagtacgaacagcctgtcggttccgtaatccggtaccgttatcttacgactgatcctggcttctccctcataggtatgccgcctggtaaatctcgtagcgatcggtgcatctttgtctatctctcccgccgcattccccagtaccgcatccggatgccactgattcgcccccacatctctatgtccgatcccgttctcatccaacgtccccggcagatccatctgtcccgtggttccgtcctccagtactacatgccattttccattcaacaatattctcatataagctccatcccacagacccttttccatacagaaaatcccctagcggatccatagtaaattttctgatgttttctccttgatcacggaatcattatatagcttaactttagtgttttaaattcactatcatgaactattttttatattcattgcattattctgaacctttttgatataatatgatgccaggggcgaaaggtctaagccaataagcacggaacaatccgtaggcatcaaagttaagggcttttgaccccgacatcataatacctgagaggagtgaatcagaaatgacagatagaagaacttttttatgcgaagattttgaaatttcctatgaagatacaaaaaaaggatggtccatgccctattcgcatcaccacaccaactatgaaatctatattctgctctccggggagcgtctggttaccatcggcgatatcacctaccgggtaaaagccggcatggcaagcctgtttgagagcaatatctctcaccgaagcgtcggtgacacggattataccgggatctgcatccatttttcaaaagtctatcttgaaaaatactttttacctgccgtagtatcttcctacctgacctgtttcaaggcaccgattattttcattcccgaggattacagacaaaagctcgtcgactggaacgcagcttcctgctgcaaatctcccactgcctacctgttgcttgcacagattcttacagatctggcagcttttcgctatcagtatcctcttgaaaatgaaatttctgtcagtgagaataaagcttccggttttcagcggatcattaattatattaacgcaaactatacaacgcttcagaccgtccgggatatcgccgaatcctgcggtgtgtccgaaagctatgtccaccgggctgtccggcggacagaatccctcaccgtaaaagaatatattaataagcttcgcctccgtcatgccatacaccaggtggaacagggcggcaattctctctctgtcatcagcaagtcctgtggtttccaaagcgtttcttatttttaccgggtttttaaaaaacactacggcatgacccctacacaatatttttccaaaaaagaaccccattactttctgcagatcacttagtatcctgatggatgccttaatggcaagccttcaggaaatcctaaagctcagcaatgagcagttggctgtatttactgctgattttgaatcaagactaccgagatatctgcggaatgcacttcatccggaagcagtagcggcttaaaccactattttgttagctgaaattttctttttgttaacattatctctttttataaatcagaagctccggattttcaccattcttctcatatgtacataccagaataaaatccatacctgccagaatgccaaagcatctgtctcctccgaattcagactccagttggttccccagataggttttctgatcatcaaggaatttcattttctgtccatttggcagactatattccagattcacatgtttccccacaagtgcatttagtttatctaccctgggaagtccgtctatatgcagatcatttatttcatttatcaactgcattttaaactcttcaaactgcccattgtcactaagttcatcataccttttccagtaatctaactttggaagcatttctttcagataagaacgtacctgttcttcggtaaagttttcatttactatattctttacacacacatcaatcaattcatccatatcattatatgtgtacgttccatctgcatagcaccatttacaatactcctcatttaatgtgccatccttatcacgtcccaatatggaatcatcatcaattggcattccgcagcactgacagatcagctttctgggttctcccaaaagcgtattgatggagacatcaaattcttttgataagagcttaagtgtatcagtattgggaacggtatcaccgttttcccaacgcgataccgcctgccttgtaaccatgattttatctgccagctcgtcctgtgacattcctctttctgtgcgaagtttcaaaattatattttttgtttccatagtcattacctccataaccatatcatatagataaattcatgttatgaaaagcaacctgctgttgccatactctatgcctgtcatccaccaaaatattttcggcacttttcgcttttagtgccaaaagtgtattgacaaaattatgattatttattacataatttcaaatctttgttacacgttttcatctccgcaatcttggaactgcccagcaacgttccacacaccacttacagtaccccggcgtctcggcggtgccaaccccgacacgacgaaaccggattctcccgagatccttgccttataggaccgcaaaaaagagggcgagatcgccgaaaactctctggtgatctcaccctctctggattatcaaccgctacttcatcaagcctcctcacagattcttcccgcattccatcaggtatgcatccattcccagacacattgcaccgatgattccggggttctcgcccagtgcaggagccaccacatactgtgacatatccttcggcaggctggtctccggcagatagccattcagaaactccaccgcattctgtctcaccatgtcgaaaaccttctcctggtgcatcacaccgccccagagaatgatcttctccggcgagtaagtcagcatgtaatctgccacagcctgtccgatgtagtaactttccagttcccagacatcctctcttccggccagttcagctccctttctgccatacctgccctgaatcgcaggaccggaagccagtccttccagacaggcaccgtgataaggacagcagccttcataggtatcctccgggtgcttgcgcaggaagatatgtccgccctcgggatgcatcaggccatgcagcagtctaccgttaatatatgcccctacacctactcctgtaccaatggtgatatagagcgcattctcacaccccttggctgcgccgaagcgtacctcgccaagcactgctccattgacatctgtatcaaaacctacagggactttcagtgcttcccggaacgctcccgcaaaatcataaaatctccatgccagcttcggagtgctggtaatatagccgtaggttgccgattttttattcagatccaccgggccgaaacagccgatccccagtgcctcgattcctttatcctgaaaatatgctatcattttcggcaccgtactctccggtatctccgtagggaatactgccctgtcgaaaatatttccctgctcatctcctatggcacataccatctttgtgccgccggcttcaattccgcctaatttcattctaacatcctcccattacaactttttactatgcctgttccctgttctggatccgcttatggaacaccagcacaaacaacagagtaaagagtatcattgctgccggcatgatcagaaagctcctgccatatcctgttttttcagcaatgtctccgtaaatatagttaaatccaatatcaaacagggatgctacactgatgatcaatccggacatcgtggacacctgcgacggatcataaagtctcccgatggccataaccagtgtcggataaatgatcgagcagaacagtccggccagactcagcatccagagtgccccactgaagatccctgccgcataaagcaccgcagaaatcacagaaaacaaggcaatgctcgggaataccttcagccggtcaaccaacggagaaaagaccagtcttcccaccgtcattccgccaaaaaacaacgccatataattggcagcctttccctgctccagtcccaacgcattggttccgtagatcacaaaccagttcagcattccatgttctgcaataaagtatacaccaaagatcaccaccatgacaatccaaaggtagtttcccttcattttccttccctgctgatccttttctgccttcttcacttctccgctgtccgggatctgcagttttaaaatgatcagaaacgccagaacgccgatggcaaaaagaacccctgtcacagctttccagccgccaaaatcgtcagccagatttccgatcagactctgtcctccactggtaccgaacccttgcatgaagaacaatacattgacgatcatggccggtgatgtggcaaaaatgaacggtgtgatcagtgtaatggacgtattcaacagcgtagaagctcccattgccaggaacattcccaccagcaatgcataatagttatctgtaagcaggaataccagcattgcacacatccatactgcgagaaatcccaaaaaagcctttttacggtcgatcttatccatgattctgcctccggccagcaggaaacacagatttcccgcatagcttacggctatgatcgtggacagcccctttgccgtcaatgcaaaatgcgtctgaaaaatgccggagaaaatacctctcaggctgtcactgattcccaggccgaccatcaggattgcaaatccgatgagagcgatccttctattactcttctccattctggctcccatcttccggctcttctacatcgatccgtacattttctacatttctcagtgtcacgtcctcctcgtaaaaaggcaggattccttctttcttcgtgatctgaatatcatggaaggagacattcttcacataatccgcatagattccggaaatctttgtgtggatctctccctctccctggcagggtctcttatcgtagccgttgatctcccacttggatttcttatcaagtgtcagccgaatgccctcaaaggtcacatcttcaatataattgtcttcactgcccagcaggaaaatgccgttttctccctcgcaggtaatattctggaagcggatattgcggatcttaccggccttaactccgggtttgcgatccagcgcagtcaggcagacagcctccgctcttccccaccattcataagagaaccttctggtctccataatgatgttggaaaagattacattttccacgttgccattatctctgatctgaatggaaattccacggttacttctggaaatacagcaattttccaccagaatattccggaagtcagactctccctccgtgccgaatttgatggcagcactggtggataccagggtacaattggtgaccacgatattttcacagggaccgtatttcttataatccccggaatttttcaatacgatggcgtcatctccacattcaatgtgacagttactgatccggacattctgacagtgatccggatcgatgccatcggaattcgccatcttcagattattcagcaggcggataccgtcgatcagcacatccttacagcctaccagatgcactgtccagaaggcacagttcgtcaggcggacttccttgatggtcagatgctttacatcctccaatagcaggagcggaactctgggataataggaaccctcgatatgataacccgagtcatctccgtaaaagacagattcattgccatcaatggtaccctgtccggagatcgtcacattttcctgtcccagcgcatagataaaggcatggaacgggcgtcctgcatattcactgttcaggaaagaaggcaggccggattcatgggctgtgattttaccattgttgcgcagcgggtaataatcttctaaattgctgctggctttccagacagcgcccggctccagatgtacctccacattggatttcaacagcacatatccggaagaatatgtcctgccgccggggaagaggactacgcctcctccctgttctgcacacgtatcgattgctttctgaatgacaggggcatcattggtctgtccatcgcccactgcaccgtattctaatatattgatcataattttctccttcgtaaccctcttactttttttcattcacaatacgcagggtcttgatttcataaggcttcatagtaaagctccatccgtcctgtacacgggtcatatccgcattctccaccccggaaaaattctccatgcagtcacagactgttacctgtgcatccggagcaagtgggaagttcacatgcactttggtacgcattccccaagtctcatagatacgtacgatgatgccattgccgtcctctgctgctttcacagtatctgccatcacattttcctctgctatctgcagcattgagaagctgtcttcatagataccctgtaccttctcccatgccatcgggcagttcagatcgtaagcttctcttactacactgcccttgcggaaatctccccgatgagggaacaatgcgtaggtaaattcatgctgtccctgatctgcatcgggattggggaaaatacctgacttgatcaatgtcagtcccatcacaccctcatggacatcataaccgtatttgcagtcattcatcagtgccacaccataaccgggctcggaaagatctgcccatttgtgtgcgcatacctcgaatcttgcacgatcccaggatgtgttcttgtgtgtcggccgctttacattgccgaactggatctcataatccgcttcatgtgccagaatatccaccgggaaggatactctgagcagctgttgatgttcctgccagtccactctggtctgaaaatcgatccttgcggtgtgccggtagaaacgaatggtctgttcgatcgtggagtcctggaaccgtctgcgcacatgtaatgccgccgtctccggtccgttctccaatactttgaattcttccacatcaatgacatcccaggatttctccagatatccctcgtcaatattccaggcatcgaattctgccggccgatcctcatatacggtgagacggttacccatcctgcccttttggatcagttcccggtcctccctgatatccaccaggcttgtgatctcagcattggcatcaaatcttacggtaaaatagggcgttttgaagcttaccggtcgtccgttttcctccattacaagctcagtgaaacagttgtcctctccggagttcaccgctctgcacacagtaacaccgctgggtcctgctgttattttctgccaactgccctctgcattccggatcagtgccgtacgtgcaaagctcaaaggattccatactgcgcagacctcctcattcttctccgcacgataccggaacagcttttcccggatgctcttcttcgctgttttcatcatttcttcatccgcagcaaaaatctcttcatactgtgcggcggaatcctcatacacttccttaatagaggaaccgggcagaatatcgtggaactggttcagcaaaagcagtttccagctgtgttccagttgttcctgtggatagagatacttttgatccagaagtgatgccattgctgcatacagctcggtttcgccgtttttgaactcagccttacgattatattttttattctgtgccatggaagtataagtaccacggtggaattccagatatagttcaccatcccataccgccagacgctttttgtccattttgtcttccagaatatgaaagaattccttcacccctgtctgtcttgctgcaggacattccacgatgctgtgctccagccttctgctctgctccagcatctcttctgtggggcctccaccgccatcaccatagccgtaacaggtcagcacctcagtgctcacatccttgtcctgataccgctgccaggtacccatgagctgggaggcattctgcagaccattataagtggtggaatggtttcccaccatcttcaggtcacccggcttctgatagtttctggtagaaatcagatgtgtcaacacttccgttccgtcaatgcccttccagagaaaggtgtcgtgaggaaaccggttgaactcattccatccgattttcgtggtcataaaataaggaatcccggatttctgcaggatctgcggcagcgccgcactgtaaccaaagacatccggcagccacaatacttcatttttctccgcaccgagctcttgttcaaaaaatctgcggccatagatgatatgccggatcagggattctccggaggaaatgttgcagtccggctccagccacatggctccttccgcttcccatctgccctctttgatccgttccctgattctggcaaataccccgggagcatcttccttcacgaactcatagagctgtggctgactggacataaaacggtattccggatatctgtccatcaggttcagtaccgtctcaaagctgcgaactgccttttgtctggtctgacgcaggggccatttccatgccacatcaatatgggtatggccgatactgtgcaccgtcaccggattcggtcttctgtcggcataataagtaccttccagctcctgcgccgccattttcatgctctcaaagcattctgcggatccgggtctgcgcagatccaacagatttacgcatctttccagtgctttaaagccctcgatcctggatagattgtcctccggcagaagatccgcagcttcgtagacagcctgcatgtcataatagagtccagccgcctcttcccggtagactgccagctccaggcggaagaaattcgtaccggtaaacgtgcctgcatacgcactggaatacgcataaaaagccagttcgtaagtctctcctgctttggcatgctccgacagaatgataaactgatggttcatatccagcgtggctgcaaatctgccgttcacataagccatgatctggggattgtccgtattccagatatctgtggctccggtattcagcacggcacggactgtatgcccctccatctgctccgggatcgtcacatctgccaggaagaaataatgctgatccagctctccccaggtctcattgcggccgaaatcccggaaatcttttccttctctgtggaattcctcctcaaaatggtaatccgctttggcgatcttcacggaaattaccggttgtctgtcactatatatcatctgctctacggcttcgagaacagctttgattcgatttctaacagtgtccatatcacactctcctctgatttttatctgaaaacaagaaaagcggggagaaccggaacagtctccccgccgaacagctttagcccttgataccggtggatgcaattccttctaccagatatttctgcatagtcaggaaaataacaaatataggaatcagggacaaggttgccattgcaaacatagcaccccagtcagaacctgcggtaggatccgagaacatcttcagagcgtaactcaccggatatttcagaggatcgcttaagtataacagtgctgccaggaaatcatcccatctccacataaaggagaagatcgcactggttaccagtgacggtttgatcagaggaaggatgatacggaagaagatcgtataggtagaacatccgtccattctggccgcctcatccagatccatgggaatccccttgatgaactggatattcaggaaaatgaagaatccctgaccgaaccactggggaacaatgataggaaggtaagaaccgacccagcctaatttattaaaaattatgtactgcgggatcattactacctggaacggaagcatcatggacaacagcatgcaggcgaaccagaatcccttgaatttgaagttaattcttgcgaagccgtatccgatcacagcagaggaagccactgctccgatggtggataaacctgcgatcacaaaagagtttttgaagaaggttccgaaattgtatccggcaaatccctgccagcctaccttgtagttctccagagagaagtgtcttgggatcaattccgatgctgttcttataatctcattggtatccttaaaagaactaagtaccatccatactaacggatatatcatcacgcaggcaaaacagaaggtgaagatatgataaatcactccgatagcaaatcttttttctttatatccttttttcatacgctcaccatcaaccttctgattcataatatacccacttgttctgggtcttgaacaagatcagtgtcaaaattcctactaccagaatcataaaccatgcaagtgcacatccatagccaagtttgttataggtaaatgcgttctggtacatatatacagtatagaaaagggtggtatcccttggttttccctgtgtaataatgtagctctgtgtaaatgccataaagccgttgatcaactggttgatcagattgaagaaaatcgtgggggtcagcatggggagtgtgatcttgaagaacttatggacaccgccagctccatccatggtggctgcctcatataagcttacgggaatctgctttaatcctgacaggaagatcagcatggaggatccgaactgccatactgccagaatgatcagggtccagatcgcagtatcggaacgtcccagccatgcgatatccagtccgaacagaccgttgatcacaccgtcactggcgaacattcttttccacagaatggcaaccgccacactggaaccgataatggaaggaaggtaatacactgctctgtaaaagccggacagcttggtgctcttcaccagaagcattgctacgatcaatgccatgatcagacgaagaggtacggaaaataccacgtaatacatggtgacaccgaataccttccagaatttcggatcatccgtgaacatggtaatgtagttttccagcccaatgaatgtcggggactgtaaaatattgtatcttgtaaatgaaaatgcaaaagataaaagcatgggaaccatcatgaatgccagaaatccgataatgaacggtccgacaaacacatatccggatacgttaggactatccagccactggcccaatgttctttttctctttggggaagtcttttctttgctcatttttcctctccttctgccgtttctataacaagcgcccggctcccgcccgatgccggatgggatccaggcgccctttgattacaatttgttataacggtcttacttcagaagtcttacttctcgtcttactttgccgcctcgctcagaatcttctgagatgtggctacgaattcttctgctgctcccgctgcatctgtatctccataacgcaggttctcaacaatggtcttggcctgtgcttctacttcacccttaccggagggatcgggatcatcaataggagttgcgatcttggatacttctgcgatatagtcaaataccttctgggaattctcatccacattaggtttgattgcttctgctacatcactgttcacagggatacctctctctgccagcaggatattgttgcactcaacactgttggtgaaccagtccaggaattttgcagcttcctctttattctgggaagtctcagcaatagaaaagaactggctgggctttaagaacatcggttgggtggttgcatcgctggtagtcggatacatggtgattcccagatctctaccggctgtattggcaatactgatgtactggttggaataagaaaagtcattccatgtggttccatcaatgatgggcttggtctctactacatccgggttcttctctgccagaagatcaggagaaatagcggattcagccttgttgaacttatctacattagcgaagtgggtttcgcttgcagtcttggttcctgctgccagttcatcgaacaaatgagatccctgggttcttgcgatgacctgcatcatattgatgccgccatcgtagtaggtcttcacaccggtcttctcgtaaatggtctgtccgatatcatacagttcttcgatggtcagctgctcgggaagctctacaccggcctgttctacgatttctttgtcatataccatcataggagcattactgccaaggcttaatgcataacaggttccatcaatagatccactatcgataacgctgtctgcaatcttgctggtgtcaatgacaccgctgtcaatgaactggctcagatcagcaagctggccgctctgctgatactgttgcagataggagtaatccatctggataatatcgggaaggttgccgcctgctgccattgcagaaagcttatcccagtagccggaccagtcggtaaactctaccttgatctctacattggggttctgttccatgtaaaggtcaactgccttcttggttacatcatttcttgtctggttgccccaccagcaaaggctcagggttactttgtcaccactggcagcctgtgcagcgctgttatcacctgtggcagcggagcctgtgccagatgcatcagaactgcctgcgctgcttccacatgcagccagagacatggtcatcattacagccataagacctgcaatcattcttttcttcatttgttatacctcccatacaatctttcgggtatgtgtcctgcacatccctcgttgttgtttcgatgaatttattttatgtccattttgcataatggtaaagttaaataacggttctgtcgatgcaaaaaaatggcttttttaaccataatcttacatttttttcgtcatattttcatactttttttcagtttccccatattccatatggcattttgcataatttcgtgttcaaaaaaaggtttctgaatgttcaaaaaacggctttttgttttcttcccacggatgaaaattgaacttcccatatttttactatataataaccatgatacggaggtttttccatgagcaatttatcacagcgttttaataatctgtctttatataagaaaatactactgatcctgtcaacgacattgctttttgtgttctttgcttttgttgtgggcattcagcttctttcccagtattatgcccgtgagctgtatacttccaatgcacagtctctaaattatgtatcttccttcgtctctgcaagaatggagaccgtggaatccggttctgcccggatcctgtccgataccatcattcagacgaatctcgccgatatcatggatgctcccaccagtatccgtaatgcccagagaaagcagacgatatatcaggctctctatccttatatttttgatgacgactatatcaaatccatcagtctgatacttcctgacgacacactgatctgcatgggaaatacttccgatctggatgcttttcctctggaggaattggcagaaaatgcagcagcctgccaggggcgtgccagctggagtgcaccggcttcccccgggaataccatcgtactttaccgggatatccggcagcttcgtcatctgaccctggatcatctggcttacctgtacatagtgatcgacctggaccagctgatcagtgatgccctggagaatgccggatattctctctccacgcattcccgttttatcctgtttgcagaaaatgcgcaattttatccacaagagacttaccatccggaactgtattccagcctgctgcagtcactgaatcatggcagcagccattattctattctttccatagaccatcggaaaacctttgtcatccagggagattttccacacaccggatggaattatctgtattttcaggattacgatccgctcttttctgcgatccattctgttctgatccgggtgatcctgttctctgctgcggtcgtgatgatcgctctgttcctggcactgttgcttctgcgcaggatactgcaccatctggatcttctggtagagaagatccgccgcttcggacagggactccctgatccgaaggacaccgatcactacgattacagtctccgtaccgatgagatcgggcagctgcatgtcagctttgacgaaatgaaatccaatgtaaagactttgcgggataaaaactatgaaaagcagctgttgctccgggataccaatatcaagatgctgcagcagcagatcaacccgcattttctctacaataccctggataccatcaactggatggctcagaaatacggtgccgatgacatctccaccatggtccggtccctggggaatctgttccgcgctgctgtcaacagcaaagaagacctgatccccttaaaaaaggaactggacgttttaaaggattatatccggatccagcagatccgtttcggagaccggctggacttccagctgcacgtaccggatgacatttcccatatttatgtcccgacactttgtatccagcctctggtagagaacgcattaaaatatgctctggaattcagtgacgatgtctgtcatatcaccgtcaccatttccgaaaaagacaccgtctaccagattaccgtagcaaataccggttcccatttcgaggatgatctcatctggaagctggaacacaggcaggtcactccccagggttccggtgtgggactggtgaatatcaactcccgcctgaagctgctcttcggcgaccggtacggcttatctatatacaatgaagacggaatggccattgtactgctgtccattcccaaagaaagagaggattcttatgctcagattgatgattgtagatgatgaacagatcatacgtgaagcactttcttccatgatcgattatacctccctcggctacaaggtgattgccaccgccaaaaacggaatggaagcctatgaccggatccgtgatgactatcccgatgttgtgatcacagatatcaagatgcctattttgaacggtctggaactgatcgaacgtgcctcccgcatcgactcccggatcacttttatcctgttatccggttacggtgaattcgaatatgccaagcaggccatgaaatacggggtccgctactatctcttaaaacccacggacaagcaggagctgatcaactgtctggatacgatccgtgaagaaaaaaagcaaaaagaggtacagcagaaggcggagcaggcacttctgctgaaggatatgcagtcgccattagaacaggggctgcttatggaagcattggatcagcctgataattttccccaggtattcaaaaagtatcaggggcttctgtcctttcccgaaaagggactatatgcctgtatctgttcctttgtagaagaaacctatctgaaaagctttctaaaggatatcgtgcggattctgctttcctgcggagcagaaagtgtcttttctgttatttatgtaaaaaacagtgcgcttctggtcctgtcctctcccaccctggtccatcaggaaacgatccgccagtctttggaggagctgcattatccgcaacagtgtgtaacctttgaagcctcttttctccacggtgacacttcggaagatttgtttgcgcagatcatatccaagatagcccgctatgaccggatcctgctgatccgccccgaaaccggagacaccagggaattccataacaacatggccgctccctggcggatttccaggctgcgtgaagcacttaccgcttccccggccgaaacagatattccatctctactggattccgtcttcactccttccatgactccggatgttgcgaagaatatcgccctgggacttttcctgaatcccgataactcaggagaagagccgccgttggatattgcctgtgactttttccgccgcctgtattcctgtacccagacctccgaaatccggaagctggcggagatcgtactgctgcaggagcaggaagagactgtctccactaagggaggtgccaacatcagcctcttaaaagcttacgtggaagcccatctggactgtgagaccctgtctttaaaatggctggcagagaactatctctttgtcagtgtcggctacctgagcaagcaatttgtaaaggaagaaggcatccgcttttccgattacctgaacaaaaagcggatggaacaagccatccgccttatggtgtactatcataatgacaatatcaaaactattgccaggtccgtgggattcggcaataatccacagtatttcagccaggtatttaaaaaatataccggctatactcccacagagtatattgagagggagggtgcctctgcgtcctcctgatgccgtctccctcatcgtaagggaattacatgcagttgtccagaagcttcatcaaagcatcatgcgctatggtaaatgtctcaagaccgctgagtaccttcttttctttgacagcaatgctcctgccgtccttttccagtgcatggaaaccctcaaactcaaacaggtgcggttccagtgacaggaatccatcaaatccggaggctgacagacgcttcaggatcaccgccacatttccgtcaccatagcctgccggaactacactctggtctgacttcagtgcatcctttacatggatataggcaatataggactttaacatctcataggcttccagcgtatcctgtccgcactgtacaaagttggcaaagtcaaaaatagctttaaaatgatccccgtaaaaggtatccatgagttttttgcattccggagccattgctccatagatatctttttcattttcatgcaggagcagtgtatcattcgcagaggcatagtccacgaatttaccgatcctgtcgaagacttcgccctcataggctgccggatcactctcctgcggaagatagaagctgaacatccggatcgtcgggcattccatcttatggctgatctccactgccctcttgaactcttcaaaatggggagtgaaatcatccgtgatcagaatcttacccaagggagatcccagggcagaaagccggattccattatcatccagtgtcttcttgatctgctccactttttcatccgtgtgatagatcagattttctccatccactccgcgcatctccacataagacattcccagtcctttcagtcctgcgatctgagctgtcagttccgctgcgatttcatctgcaaaacctgtgatttttactgtcattcttttgtcctccttaataagtgcctgtcgtatcaaatacaatatcagtgtcttccttttttctggaagtggcacgttttttgttcaattctcgtaaaaacaattcttcatccaacggcagttccacggtgcggtccagccagctggacaggtgcatggcattggacagggtcagcccccggattccctccgttccctctgccaccaatggagttcctcttaaaatatgacctgcgaacgctttcaatacaccaatatgctgctcgttttgtccatccgtctcaatctcaattctggaatattccggctttttaaatccttccttctccgttttgcagaaatcactcacattggtggacagtttatcaaaaaatagtctgccttcctcgcacacgatttttcccatctcgaaggtcagctccagccggttggttcctggagcatctgccgtggtagtcacgaagacaccggtggctccgttttcaaactccatataagccgtcacatcatcctcgacctcgatatcatgccattttccttcgtggcagaaggctctcaccttcacaggcatgccgcacagccattgcagcagatccagctggtgcggacactggttcaacagcacgccgccaccttctccgtcccaggttgccttccagcccgccgcatcataatagctctgattacgataccagtcggtgatgatccagttgacacgtcgcagctgcccaagttcgccgctctggatcatttcgtgaagttttctgtatacacagttggttctctgatttaacatgatggcaaaggatctgtcagacctttccgctgcctcattcatctcccgtacctgtttcgtgtagactcctgccggtttttcgctgatcgcatgcagtccatgctccaatgcatagatgacgaattccggatgcagataatgtggtgttgccaccagaacggcatcacagcttcccgaatcaatcattttcctgccatcatcaaataccttgaccgtctccggaagattgttccttgcccagtccaggcggctctgccggatatccgctacggcggtcagttccatatccggcaccatccctttcaacacattgcctgcatgaccggttcccatactcccaataccaataatgcccagtcttaccttttccatttagacacctttcctttcattctctgatgtatttctttgatgttcttattgtaacttctctacggttgtaataatatgtgtataaaatactaattttatgcaaaataacgacctttggagtgcctatgaaaacccaaatgactattccctattttacaattgatgcaccctatgaactggcttaccgcaacaacggaacctcttctcctgccagaccgcatacgcacaacgctctggaaatatatcttacaatgtccgatctcccggatgtcctcttagacgacactgtctccagtgtttcgaaaggatctctgatcatcattccgcctcaccatgtgcatcagctgttcaatcagaagctgaccatctatgagcgctacgtcctgaatattaacagcgactggctgtatactgtccttggagccggttccggactcatgccttatgcagatccggctttctctcctgcgatcctccggctttctcccaccgggcttaccgggctctgcagtcagttggatcactatttgcagctgcatcctcagccctccctttctgcctatgcggattttttctctctgctaagtatactggatagccggatccagcacggcctacaggcatcttctaccggacagcgttctatttcccagtcccagaaaaacatcaatgaggtcatggcctttatcaaccggcatctgacagagccactgaccctggaaagcattgctgcagaattctacctgaacaaggactatctcgggcgcctgttcaaggaacatacccatgccaccatcgggcattatatctccgtgcagcgggctaacctcgcccagacgatgctggcagagggccggaccgtcaccgaggtacaggaacttctcggcttctccagctatgcctatttctttaaatttttcaaaaaaatgaccgggatctctcccagtcaatatcgtaaagataacactatgcctctgtcgcattctccgtctccacattccaaaaaaggaactgcagcctgtgtataaacacacattgcagttccttttgcttttacctgtctacttgacaagctatcttattatttagtcagcagcatcataatgtcattgcttcttgccacgaacttggtcatggcatcggcagacagaggtgcgtgctggagctttgccagatcgtacagctgctcgcagatcatttctgcattctcaccatcctgatgctcagtaatgtactgtaccagaggatggctggcattcaggatcagggtctctccctcaccgccgaaggcactcatgtccataccgggcatggaatacagcttgctgatgctctccgcctgctcttccatctctttctcggccttcttggaagtcttggacttcagggcatcggtcacatccgcatcaatacgctggaacttgattccctcgttctttttcttccgcagaaagagtgctcacacaagttccgttggcaatggcggtctgtctggactgttcctctctgtctttccagagtactctttcatattccgcagactctctggcacattcccgcaggatttctccgtccaataccctccacatatgctccgaatctctgtacagatacggcaattgcagtacattcatctccggtgcctgttctgcgatctgcgacagggaaactcttacaaaagcaataccgccgtatttgatctgttccagtacttcgctttccgaacccagttttgcttcactctccacgatgatgtggatccgtcctccggtacgctcctgcaccagttctgcaaaacctcagcgttacccagcgccgcatccgggtgccattgattcgctccgacgtctctgtgaccgatgccgctctcgtccaaagttcccggcagatgcatctgcgctgccgttccatccgtcaatattaccttccacgttccctccagtgaaatccccatcgcaatccctctgttcttatataattttttatatttttcagtcatcacgaaatatagttagcttcattatagacttcacctcaaattcaatgcaacggattctccttcatgttctatgcaaaaaagaaccacattaccgatatttctatcagtaatgcggttcttgaattcttatcagtatgcccacggttcaaatacaaaatgccgcataaagcggaaccacctttttgttgtcctcaaacgcaaagtttttcgcggaaagtttgatcgcgtaagccggcttataggtatccatatagacttttaagcttttggctctggtattatcggcggatttcacctcaatcgggatcagctgaccatcccgctggataacgaaatctatttcagccccacgctcggattcccagtagtaagtgttataaccattgatggcaagctgtacattgacataattttctgtcatgccacctttaaaatcattcagttcctccaccatatagagaatatcgtttgcagccaaatccttcttggcgcaaagcagccccagatccgaaacataaatcttaaacgcatcaatatcccgataattttccaaaggcttcttgatctgctctaccctatagacctgtgacacaattcccgacagacagagccattcaatcgcattttcaaattcagaagctcgtccaccctttttgatcagcttatattgaaagcgggtatttttcttggaaagctgaaccgtaatattatcataggcaagtctggttttcttaattgcattcagattattgtatttgcccatatcattcagataacttgtcagaatggtatcctgcgtatggcggatcaggatataatcccctgtctggacaaactgcatcacacactccggcataccgcctaccacaagatactgacggtaaagctgcatggctgcatcatggagtgcggatggcatcggccgattcgtttcaaaacattttttaatctgctctacaagttcatcctctcccatagcaatcataaattcttccatatccatcggatacagcgttttcatatcaaccttaccaacgggaaatgaaaattttgctctgttgacggcaacgcccaacagactgcctgccacaataatatgataatccggggcatcctcacaaaaatatttcaatgacgttaaagccctttcgcaaagctgtacctcgtcaaatacaatcaatgttttttcttttacaatcgtctgacctgcaatatgagataaaatcggtatcaaataatcaggactgatcttttcctcaaaggtttcattcagttttggattcgtttcaaaattgaaataggctacattttcataatgaattcgcccgaactctaaaatagaataagtcttccccacctgtcttgccccctgcaaaataagaggtttgcggtgttcattttctttccatgcttccagaaaacccatgatttttctatacatgatccatcctccttaaaggtcctgaatatagtataattattattcatgtaaaattcaatatgtttttgtgctgtttttgcattaaaatacatgaatatttttatgaagtcatcattttttgacatgtttgctatggtttttacattttttttacatttttagtttttacatttttacatttctttacaaggaatcgcgtttgcagtaaaagcaccccccgccacaggtttttattcctgtagcggggggtgctgtaaaatatgggattcaactatcgcagatcagtattccaatacataggttgctgtctcggtaatcgggaagcatacctgtccgcctgcattcgaaactgtcttgacaatgcgggttctgccgttggcatctaccttgtaaaccgtcacttctccgtttttcacaggtactgtggtatggaatacaacgcctgtacccaatgcctgtttgttggtaaagtcgatggttctggaatgctctgtaacagtatccttatgttcaaagctggtttccttgtaaccggacaacttgctctttgcaaggaaggttactgcatcggagttgccgatgaatacatgcaggccacgcagagctgaggtggacactgctttcactgttgctgcaggaattgtcttgtcaaagccgctggcatctacatgaagcagatcctggttggcaccggatacattctgctgcttgtcttttgtctgggtagagatcacttttgtaatggcatcccatccggtgatctgctctcctgcgatatttgtggtggtcagtaccggttcaggagctgatgagccggagtcagaggaatcactgctggtgtctccggcggacggtgcagttgtcggggttacaggagcaggggccggagtcggggttaccgatggattttcagaatcatccgatgttgtgcccggagttctcaaaacgtaataggtatacttactcatccagtcttgttccagactttccggaaccgggttatagcctacacctccgtattcggtgttagtgtcataatcaatataacatacggtactataattatagattcttcctataataacagaatgtgcatcattgggatacggatgttgtgcaagatattcatccacaaacctttttgcttctgtcaaggtaaagaaaggcaggtcagcactttccagttcttttatggttgttgctttcacccaatctttacttccttcaggccatttttcgcaccagtgcgcattaatttccgttcttccattatatacgcttcttaatgatatgtcctccttattactttgggggtcttcactctgaggatcttcataccacccagtaaatatatagccctctttcgtaggtatcggaagatctgtaaatactcctgctaccgttgttatagtatctgtcttccacttaccgccgtcaagatttaatttaacttgctgtgaagggaaaaagtaataatcatatgcagaattatctatagtatcaagagtcttagaacaaacttcaatgcccgtaccataaaggcatatatattttccatccttttttcctaatatgtaatacccttttttacttgacttaatatctctatgagccaattcagcattaaaaacaaatttatcatatgtagtctggctcaaattgtccaaaacggctacctttgtgtccaagtcgtttttattgtcctccgtcacctgtatccagcccgagttttcaccctctgctgctttcgcgcgcatctccggcaccatgcctgctatcaacgtaacaacaagcgccaggctaagcacctttcctaaaaattttgtttttctcattctctttcccctttcttctgtacttccgatttctataaatctgagttgtgtttattataacagcatttccagaaaataagcggcagattgcaccaatcgacccaaaaacggcatcaatcgaccgggacggaaatatcgtgctttaattcagacgaaatagtaacaaaaaaagagcctcattactgatatttctatcagtaatgaggttctcatcttattctcatataccccaatttattgcttacgcaataccctctcagatttgcgtgtttaccgtcaaattacttatcggcaatagcagcctgtgcggcagccagtcttgcgataggtacgcggaaaggtgagcaggacacatagtccagaccaatcttgtggcagaactctacggaagaaggatctccaccgtgctcaccacagataccaacgtgcagcttaggatttacaggcttaccaagcttgatagccatctccatcagcttgccgacacctgtctgatccagcttagcgaacggatcgttctcgaagatcttggtgtcatagtaagcgttcaggaacttacctgcatcatcacgggagaaaccgaaggtcatctgagtcaggtcgttggtaccgaagcagaagaaatcagcttccttagcgatctcatcagcagtcagagctgctctggggatctcgatcatggtacctacttcgtacttcatatctacaccggcagctgcaatctcagcatcagctgtctcgacaactaccttcttaacgaacttaagctccttcacttcacataccagagggatcatgatctcaggctctacattccagtcgggatgtgccttcttaacctcgattgccgcacggataacagccttggtctgcatcttggcaatttcaggataagtaacagccagacggcatcctctgtgacccatcatagggttgaactcatgcagagaagcgatgatggtcttgatggtctctacgctcttgccctgtgccttagccagcttctcaatgtcagcttcctcggtaggaacgaactcatgcagaggcggatccaggaaacggatggtaacagggttgccctccagagcctcatacagctgcttgaagtcgttctgctgataaggcagaatcttctccagtgctgcttctctctcctctacagtgtcggaacagatcatctcacggaatgctgcgattctgtcctcttcgaagaacatatgctcagtacggcacagaccgattccttcagcgcccagctcacgagccttcttagcgtctgcaggagtatctgcattggtacgaacttttaacttacgatatttgtcagcccaagccattacacggccgaactcaccggcgatggtagcatcaacagtcttgatctcgccatcatagatgttaccggtagtaccatcgatggacagccagtcaccttcatggaaggtcttgccagccagagtgaactgcttgttctcctcatccatagcgatatcgccacaaccggatacacagcaggtacccataccacgagcaactactgctgcgtgagaggtcataccaccacgaacggtcaggataccctgggaagccttcataccggtgatatcttcaggagaggtctccagacgaaccagaacaactctctctcctcttgcatgccattcttctgcatcttctgcggtgaatacgatcttaccacatgcagctccgggagaagcaccaagacccttgccgataggagttgcagccttcagagcagcggtatcgaactgaggatgtaacagagtatccaggttacgaggatcgatcattgcaactgcctcttcctcggttctcatgccctcatctaccagatcacaagcgatcttcagagctgcctgagcggttctcttaccatttctggtctgtaacatgtacagcttaccatgctcaacagtgaactccatatcctgcatatctctgtaatgatcttccagagtcttacatacttcctggaactgagcaaatgcctcagggaatttgtcagccatctcagcgatcttcataggtgtacgaacacctgctactacgtcctcaccctgtgcgttggtcaggaactcaccgaacaggcccttagcaccggtagccggatctctggtaaatgcaacaccggtaccacagtcatcacccatgttaccgaatgccatagactgaacgttaacagcagtaccccaggaataagggatatcgttatcacgacgataaacgtttgcacgcgggttgtcccaggaacggaatacagctttgatagcgcccatcagctgttccttgggatcatcagggaagtctacaccgatcttagccttgtactcagccttgaactggccagccagttccttcagatcatcagcggtaagctcaacgtcctgcttaacacccttcttctctttcattgcatcgatcagctgctcgaagtacttcttacctacttccataacaacgtcggaatacatctggataaatcttctatagcagtcccaagcccaacgagggttgccggacttctcagcgattacgttaacaacggtctcattcagaccaaggttcagaatggtatccatcataccgggcatggatgctctcgcgccggaacgaacggatactaacaaaggattctcgtggtcgccgaactttttgccggtgatctcttccatcttagtaatgtactcgttgatctgaccctggatctcttcattgatctcgcgtccatcttcataatactgtgtacatgcctctgttgtaatggtgaagccctgaggaaccggcagaccaatgttggtcatctcagccagattcgcgcccttaccaccaagcagttcgcgcatgtttgcattaccttcggtaaacaaatatacccatttcttcatacttctttgtctccctttttataatatttttgacaaaactttgtaacccaaaccattaccggagcatttcggcctcggtttttagtactttgatattgtaacaatctaccaatagaatatcaagccgaaattgataattttttgacagactaccgattttcgtgcatattgtaaaattttgtagttgcgtttttgtatgttttatctagtactttagtattatgtaaccgcttacaattgttcaactttctttacatggtttttacagaagctttttgcataaaaaactcccaccggttttttccgatgggagtctttgcacttttattccatatacaattctaatccagcatgccgtctttgatcacattgtggtcacgcagcagtttttccactacagtgcccttcactacgcgaagcagcggcttcttcagtgcatttaaaggtccgggcagttcaatctccagaggagacatgccatccatcagcttcacgctgctgtccaataactctctgacatcatatacacttccccatacctcaggcacacctctgtctacacctaacagtccgtagacagcctccatagcggttctcacggaatactctgtggtgaacacggtgtctctcggggtctctgcaaactggcctaagaaagcgaagttcacacagccgtcgggaatgacatcgggacggtcacccttggttctgggcatgaagaatgcggtaatataaggcatcatggtaggtacgcagactgcgctgtgctctgccagatcctcgatatcttctacgggcacacctaagtgatacagccactcttcggtgatctctttaccggtacaatccttcatgggcttcttaatataatcgccgggtacgtcggtaaacagaccgtatacccatacacatacctgatttttgtcctgttccttgaactgtccctgacggttgattgtccagctcatgagccacttggaatcctggcagcttacgataccgccggttacgaccttaccgcttctggggtcacgcttgcagatattggtgatataaggaatgatcttgtcatccagtgtggtcacggtagcggattcccagttagtcttggagacatcagaacagaacttctcgggatgtccgaaggaaggatcctgttttgcgatatttttccacaggctccatacgccactggtgcgaacctccgcgtcaccgttgggtgcatggttctggtcaccgtagatagtaccctcggtacagcttccgttggtaacgaataccaggtcgttctcggtgaggacaatgcccttctctacaccttttaccttgcactcgatagcctttgccacctttttgccgtcattgatatcgaaaataacatttgtcacttcggtgttgaactggaagtccacacctgctgcctccagatacttcttcataggaaggatcagagactcgtactggttgtacttggtgaacttcagggcactgaagtcaggcaatccggaaatatgatggataaatctttggaagtaaagcttcatttccagtgcgctgtgccagttctcgaaagcgaacatggttctccaatataaccagaaggtggagttaaatacttcatcatcgaaaacatcttcgatggtcttgtcatacagatcctcgtccttggtcatgaacagcttcatgatctccatgcagcccttctggcttagattgaatttgccatcggtatgggcatcctgtccacaatccttcgttgcacggcacagggaatagttgggatcttccttgttcagccagtaatactcatccagcacgctggctccgggtacttccagagagggaatgctgcggaacagatcccacagacattcaaaatgattctccatctcacgtccgccacgcatgacgtagcctctggcaggatcaaaaataccgtcacaggcaccgcctgcgatatccattgcctctaagatgtgaatatgggaaccgggcatctgtccgtcacgtaccaggaagcacgctgctgctaaagatgccagaccgctgcctacgatgtaagcgttcttctcatccactcctgcgggcttcttaggtcgtgcgaaggcttcgtagttaccgttggaataatagatgcctttgctgtttttgtcatatctgccaagttcagtgtttcggtagtcctgctttgctgccttgacggctgcctttctctcttctttcttcacctctgccttatgtcccttggttactgctgccactgcgcctgcacctactgccagcgctgccagtcccagtccgatattattcttttttgccataatgattaccacctttctttgatgactctcaaatgtttttctgtttacaagtagtatcctacttcttttttataagaaaaccaatttacaaaagaggataaatgataaagtttttatcatcctgccctttttgtaaagtacttatactatttcagaatttcttttccgtgtgctcaaaattctcgatggagcggctgatgtttccgtaaagagtgattgccagttcttcaacgatcttatgataatcgtccttcattccccgatcaatccagtctaacatcacacccacaaaaccgtatttgtaaaatccggcaatgaattccttgtgttcctccgctacctgcatgccggtgcacttttcctccaccacgtccgcaatgagctggtaggtcaacttgtttaagtagctttcgatcttctggcgatccacgcagcggtagacattcataatgaaaggtttattctcctgcactgcctcgaaaatctggcagaagccttcttgccagttctcgtaggtcttcttcccctgcagtgccttcgtgccgtcttccacgcagacccactctaccagatcatagatgtccttgaaatgatagtaaaaagccatccggctgatgccgcaatcctctgcaagttcgttaatggtgatcttatccagagacttcgtgagaagttcttttttcaaagctgcttccaacgccagtttcgttgtattggccatagcctgtcctccactgttttatgtattattttctgttcttcctcgatatagcttatgtaattctattataagctcacgcattcgtaccatcgtactctacatcttacttcacaggatattcattcgctaaggttgtcgttcgtcaatcatgtaaacatgtagacttccttatactcattatattgtacgacaatagactcaaaatgggcaaattaactttttataaaaaaactcttgctttttgtaaaattccatggtattatcttacttgcgtttcggggtgtggctcagcttggttagagcgccgtcttagggaggcggaggtcgcgagttcgaatcccgccactccgattcattgtaaagtccttgattttcaaggacttttttgtgttacatttcatgttgtatcatggtacttttctgatttcctctatgtttccttttggtgtttccctatagccacatatgcgtattgaatctttctgcttggaagtcatcggggtatactgtagaattttggtagattacgccccactatcgaaacactaacggggcttatctgaaacattttaaagatttacgccccgctttcagaacgccaacggggcttatctgaaacattttaagatttacgccccgctttcagaacgccaacggggcttatctgaaacattttaaaaatttacgccccactttctaagtttcaacggggcttagcacaaagaaattataaattaagccctagtactcaagatttagcggggcttaacaaacacaatttcagcatgcttatgagctccacttaatcatccagacactcctttcccatctacctcgctgaaaaatttttctatcagtctgtttacttcatccggttggtcagtattggaattatgaccggcattttttatccatttaagcggtaaaccttctctctgatgccatttcttattatagctttttgctgaacctgctttatccttttctccacagataagaagtgccggacaactgatacgatatggcagatctgctttgattgcctcagcaagcatcctgtaaccaaaaccggcgagccttgcatattcttcaggatctgaatcataggacatcatcatcttccgcataagattctgaccataatccgtctctgcgcaccctcttgaccctgccctaagaagcactttccatggatatatcttatataatggctctgctctttcaagaagccatatttccactgcggtcatataagacttttgaagaggtgcggaatcaatggagataaagccttttatcttatccggatataattccatatacatttgagccagatatccccccatagactgaccgataattatgggattataaatttcttcttttactaagatttcataaagccattctgccatgtcagacagactgtaattattcgtaaatggtctggataatgcatgtgatggtgcatcccatacaaacacattctgtctcttctcaaaatattctgtctgcttttcaaaaagcctatggtctgccgtaagtcccggtaaaaacactaacgtaattttctgcttgtctattatatttacaaaataatgaatgcagccacagggtgtattataactgttttctgtcatttcccgtcccctttccataaaccatttcccaatgatttatccttcatatgccaccttcattgaccgattaacagaagacctcattggatatcgcattgacctgccttagcttgtttataaagcagaccgcttttaataaacaataataagaacattacggttatcgcatacggctctcttgccatagccaaaaacaaaacagcaattatactaagtcctacagacaaagcggtaattatctttttaccttgttcaaatttgaaatagaccatcagtatttttacaattcctataatcgttaaactaacaaacaatgcccaataaccactgaaatgatgcttaactgaatggcattggtcatttctttatccatgtgttttctcctctgttctatacctcattgattactgatttttaaaattccgcaaacctttcccggcttgcggaatcttccaaacatattataatttttccacgcaccggatcagtgcatccacattttcttccttcgtggcccaaccggtacagaatcgcacgcagctgtgtgtggcatcgatccgctggtcatagctgtactcaaactgttctgaaatctttgccaggtgtgcatccggaacaatgacgaagatctggttcgtccggttgggtgccagatatgtgtaaccctttgccgtaaatgcttcccgcagcttctccgccatggcaatggcatgggcggagatctcctgatagagaccatctgtaaaaagcgcatcaaactgcagccccagcagtcttcccttggccagcatgccgccgttctgcttgatgagatatcggaaatcctgtgcaagctccgggtttttgatcactactgcttctccgaacaatgcgccgaccttggttccaccaatataaaacacatcacaaagcgcagcgatatccggcaatgtcagatcgttgtccggtgctgccagtccgtaacccagtctggcaccgtctaagaacagatacagtccgtatttgtgacaggtctcggacagagcggtcagctctgctttactgtaaatggttcccacctcggtaggattggaaatatataccattttcggctgtaccatatgctcaaagctaccgttgtgaatatgggcttcataagcctctgctacctgcgctgccgtgatcttaccgtcagggctttctaatcccagtaccttatgtccgcaggcttccaccgcaccggtctcatggacattgatatgtcctgtaacagcgcagagtacgccctggtgcctgcgaagtgccgcattgatcacagtgacattggtctgggttccacctaccagaaaatgtactgccaggctgtcatccccacaggccttacggatcttcttgcgcgcctcttcacagtatttgtcctcactgtagcccggtgtctgctccatattggtctgcaccagacgttccaacactttcggatgtgctccctcattatagtcacactgaaataaaatcttatcgctcattttttattgacaccgccgtgacagtgtatttcctccaacgttatttatattttagctttttctatttgctaactctttacattttcgattgtttctatcttatttgattctccagactttctgttactcaaattcagtcagtcctttgtctccagaacccttaccagatattcccacactctcttcgtggaagatatgcttaaggtctcctcggtcgtatgaatatccttcatatccggtcccatggatacacagtcaaggtctgagattttgctgcctaacagtccgcactccagtcctgcatggatagcctccaccctgggctcagtgccgtacatttccgcatacagcttcaccattttttcccgcaacggagaatgcacacggtatttccagccgggataatctccggtcaccacgtaatcgccgcctgtcagttccaccagtgcagaaagctttgcgatcaggttatccttctcactttccacgctgcttctgacagaatactctgcccgcaaaacttccacatctgctttcagtatacccagattcagagaagtctgtaccagccccggcatatctgcgctcatcgcctgtacgccgttgggagtcgcctgcaaaaaggctgccacacgttttgtagcttccggcgcagcacaggtgattgtctctgcagtgtctgctaatctttttgcggttacctttacgtccggatccttggtggcaagttcgtcacccagttctgcttccaaagctgctacctgctgctctaagctttctgtatctttttcctctactacgactactgctttcgtctgtctggggatggcattgtctgccagtcctccgtccgcagataccagtcctacaggcattttctcagacagcttccacagaagtcttcccaggatacaattggaattgcctctttccttatgtatctctccgccggaatgtcctcctaagaggccggagacttccacctcatagcgcacgcccgtaagctcctgttttttcatcgggaaacggcagttcactctggcaccaccggcacagctggtcaggaaaatgccttcgtcctcggaatccagattgatcatacgatgaccctgtaacatagacaggtcaatctctctggctccgtccataccgacttcctcatccaccgtaatgatgacttccaaacggggatgcctgatgtcctcggaatccaataatgccagtgcataagccacagcaataccatcatcgccgccgaggctggtattctccgcatagacgctgtctccgtcgatccctaccttcagtccttccgtcttcatatccatggtgcaatccggtgtctgcaccgctaccatgtccatatgtccctgcaggatcaccaccggttccttctcgtatccgggagttgcctccttgaccataatgacatttttcatagcatcctgtatatagaaaagcttatgtgctttcgcaaagtccaccaggaaatcgctgatctgatccacattgccggagccgtgagggatcttcgtgatctcttcaaaatagtaaaatactttcttcggttctaagttcgataaaacacccattttcatttcctcgtttctgcgcttttatagagaacaaagtgcactttcagtataaatatttgtcatttttctgtcaaggaaacaatccgaagcattcgcagaacgcagtttgcatggctttgaatagttatgcataatgatatttttttctcttggcgatcaggaatcctattgtcacaaacagtgccaggaactctgccagtacgatggacagccatacaccggtaatgccgatcagtttcggcaggatcagcacgatgacgatctggaacacgaaggtacgcaggaaagagattgctgcggatacggctccgttgttcagggctgtgaagaaggaggaaccccacacgttcatgccgcggaccatgaaagcaatggcatagatccgaaatccccaggtggtcatctccaataactcctgatcgtagtttgcgaagatttttactaacggtccggccagaatctgagaagcggtcagcagaatcacaccgccggccgagataatgaccagacttttccggcaaagatttttcagttccgcatgattgcccgcaccgtaatggaagctgacgataggagcagatcccagggaatatcccagatacaaggtcatgaaaataatgtccacgtacatgatgatgccgtaagccgccacaccattctcgcctgctgcttccatcagctggaagttatacaggatgctaacgatagaggtagagatatttgtcaccagctcagaagatccgttggtcacagtctgccagatgacttttccatgccacttcgccttccccagctgcagtaagctgccgttctctctggaaaaatagattacagggatgattccgccgacgagctgtcccgctgcggtagccagtgctgctcccaccagtcccaaaggaaatgccacgatcaacacatagtctaacaccgcattggtcagtcctgcgatcacatttacctttaaactcaaagtcggcttctccgctgcgataaaaaagctctggaacaaatactgcataacaaatgccggggaggacaaaaacaagattctggaataacgcacgcagtccgcttccagttctccgtttgctcccagtgccagtgcgatctgcggtgccaaaacaaaacagatgaatcccaccacgattgacaccgccagtgtcacatatacgatcagcgaaaaaaattcgttagccagttcctttttcccttctcccagcgtcatggagaccacggcgcttcctccggtacctgccatgaatccaagagttcccacacccatcagcaccggcatcaccagattcagggcggcgaaaggcgtctttcccacatagttggatacaaaaaagccatcgacgatactgtacaccgaagtacataacaacattaaaatggaaggtgccacgaaacgcagcagccgtttataactaaaatgatcagataactgtattttcataataacctcatgccttactattacccgcatgccttccggcactttctcaacagatacttctgcgcattatgcaggcatcgttttcgtgtcatcatcggaggttcctgcgatcacgcgggatccccttgtcttgtcagttcctctatttcttctcggaaaaattccgtatgttttttcatagttttcagtaatatttctgcctcctgctctcctatcgccgccaatgcccggcgctccgcatccatcagcggaaccacgatcctctccacagtctctttccccttctctgtgagatatatcctcttattcttgcggttgtcttcctccgcccgcagaataagcagaccttcctccgtcatatttttcagtgcggaattcactgtctggggcgtgtagaaccaatagtcgcagatctccctctgggtaaacgcctctttttcccgttcccggatacaatacagaatccagaaagccgtctccgacagattacagttttttgcatagacccggtacaggtcatccatctctttgatcagctgattgtacaatgtgatctgcgcaaaagattttctgctttcctcttccatatcgctttcctcctgtaactacatcgttgcatctgtttgtttttatccgaaatcggactaagcggcattataatccgaaatcggattattgtcaacccataaaaaaatacgcaaaactgacacttctcattgtgtccttgagcgtatcgttatataataactttggcatcagttccgggaggagtgcggttcgcccgtatcgccagtgtctaggttcaccttattgaatatcccgtagaacactcggcggctgatgctattctgaaatattctgtttttcaaaattactgttttatattaccccaacacactactattacttctttctttttatatgtaatattacgtattatttattgacatacgtaatattacatattacaatggttttgaggttgaaaaggagataccaaagatgccaatgacctcacaggagatgatcaaactcctactaagaaacggttttacggttaccagccaaaatggctcccatgtaaaactgaagaacacagacactcataaaaccgttatcgttccttatcattgcagaggcataaaaaaaggcctggaacaggcaatactaaaacaggccggcttaaaataacagccacagtaaggagaataagaatgaaaaaacttttttatccagcacttttccataaagcggaagaaggaggattttggatcaccttcccagattttcccgaatgcatgacgcagggggaaaatatgcagaacgcctacgaaatggcatgggatgcgcttggtcttgccgtagtctcccgtatagagaatagggaatctcttccccccgccacagagccctacgccatcaccgcagtttccgataccttctgtataattgtgccctttgacctcatagcataccagaaaaagcataactccaaagccatcaaaaaaactctttccattcctgaatggctgaatgaagctgctacagacatgaatgtaaatttttcacaggtattgcaggatgctcttcttcaaaaattgaaccaataaaacatgttgcattccatgttgcattttgcaaactattacgtcaaaatacaaaaaatcaaaatgcgcaaagacccatttctacaggtttttgcgcattttctataaatataaaagcagataacgggaatcgaacccgcctttccagcttgggaagctagcgttctaccgatgaaccatatctgcaaaggaacataagatattatactccatgttcctttattttgccagtcctaatttttactatttttacatttttaccattttacttatttgcttatcctttttacttatccaagactcccaaccacttcagagcgttccaaatgccgtctttatccacgtccgtggtgatataatctgctgtttccaacacctgtttactggaattacccatagcaatgctggtgtgggcatactttaacatcggcaggtcgttattgctgtctccgatggccacagtgtcttccatggggattttcaaatagtccgtaatgtaacggattgctgttgccttggaatatcctttggggacaatctcgtaaaacccttgttctctatcaataaaatccagtatttccgacaggtcacgcttcattccatccattcccgccggagtctctgcataggcatataatttatcatagttgcccggtgcattggcatagcgatcgtattttcgattctcaatctcacgtgccatatggcggaaagtttcggtaaatacttcttctcctctgggagcatagtcttccctgctgccttccagaaccgcatccacatgatattttttcattgctgtcagaattgccttagactcctccatggaaaatgtcttgtgcatcagctgttttccatgaaattcaatctccgttccgcagcccaataacaatccgtcgaattccacctgtccggtaagattttcccctaccagccgtttcgtacgcccggtgttgatcatgcagatatgaccgttggctctggcgatgcggatggcttccttcgtgctctctgacatcagttcacttcctccgcatattaaggttccgtcaatatcaaaaaatattatcttcatctcagattcttaagctcctctaccagatccagatcggatttctgtaccttcagattcgtggacacaggctcttcaccgggtcttgtgatcgtgatctcgataatggttccttccgtgatcgctccacccataaaaaatctgcttacaaacgctacaaatttgggatgattactctcgaaggtattcttcgcattcatcagtttcatcatcattccgggatttatcataatggtctccttccaaatagttgcaaaaagaaaggctgtccgcaccatccgaaaacagtgtgtccagccttaacagttgctattatttacgcgatcttggacttagccagctctgcaagggtcttgaaaccttctgcatcgttaactgccaggtctgccagcatctttctgttcatatcaacgcctgcaagcttcagaccatacatgaatttgctgtaggataaaccgttcattctggctgctgcgttgatacgagcgatccacagctgtctgaactgacgctttctctcttttctacctgcataagagctggtcagagctctcataacagactgctttgctactctgtactgcttgcttcttgcgcctctgtagccctttgcaagctttaatactctattgtgtttcttcttggcatttaagccacctttaattcttgccatgtcttatttcctcctcgcctgaattataaataaggtaaaatcttcttcatattcttaacattagttgcatccgtaattgcaggctttctcagattacgttttctcttggtagatttcttggttaagatatggctcttgtaagctttagatctctttaacttaccggttcctgttgctttaaagcgcttagctgctgctctgcttgtcttcattttgggcataacgagttcctcctaaactttacttaatctatcgtgccggatcccggcactttttaactgtacgaattaacgcttctcagttaaaaacatggtcatgcttctgccttctaccttgggagctttttccactaccgcaatatcggacaggctctgtgcgatatcatctaagatatgcttgctgttgttcatgtgtgccatctctctgccgcggaatctcagggtgatcttcactctgtctcccttggtcaggaacttcctggctgcaccgatcttggtgttcagatcgttagtatcgatattgggggaaagtctgatctccttgatatcgatgactttctgcttcttctttgcttccttctcttttctcacctgctcgtatttgtacttaccgtaatccacgatcttacaaacaggaggctttgccgtaggagcaatctttaccaggtccagtcccgcttcctctgccatcttcagagcatctctggaagaaacgattccgagctgttctccgtcttctccaatcagtcgtacttctttgtctctgatctgttcattaatcattaaatcgctaatggttgtgtacctccataagaaaatgtgttaaacaataaaaaaagcagatagcataactatccacctgttcccttcacggactgccctcattcaaacaaattccaaacgagttctctgtctatgaaaaatctgaacgcttaccagcctgcgccgtaaggtgagagtggatactctgcttgttgtgtcgtgttcttcacacgcttaaatagaataccacgaagttttcctgatgtcaaccccgtttccgatattttctattttttattttaccctagaatctatgtaccggcggtctcccgccgaatccgatcacttgctctattatccgcagtttcggaacatttgtcaagccggaatactgatttacttttccgtgatttacttttccgaaaaagtagcacaggcggtctctctgcagtcgctggctccgcagcccttgatatccacatgatccgccacacacttgtaattgctgttataaatacattttaccgcctcacagtcgatactgatggtatggcttggatgagacagggaattactgaaagactctcttccctctctcttctgcgcaaagctctcgcagcaggtgccgtcacaatcacaggcatgcttacctcccaccatgatgtctcccttgctgcacagacaatccttattataggaacaattttccacaacacattttaaatctgccatgtctccctcgccttctgccgccgtcccgcggctcttcgtcttcttttttctgatttttaaaaattttaaaagaggacacgcggcaaaagagccgatgcagtcccgccacgcgtcatggatagtctgtgcagatttaaaaaaattattcatttgtggaaactgccggttttgaagtggtttctttcgaggcacaggcaaaaatgcgtgcccatctcgttgctcgtaaaaactaatatcgaaatactgtttcttgtcataccattcaaaaaatcgccgtctccctttttatttttataaggaaacggcgattttcatattttcctacttgattttatccggcaatcagcttacttgctcagcttcttggttgcgatctcatcctttaacatagccaggaattcgtctctggataccgtagtggtgttctgctgtccgtgcagacgatagcttacggtgccgtcctgtgcttcctgttttcctaagatgatcaggtaagggatttttttcacctgtgcttctcttacacgataacccagcttctctgctctctcatcgatgtccgctctgatgttattgtccagcagataaccgtacagatcatgggcataagcattcagctcttcgtcatcgttcttgaccggcaggatcatagcctgtacgggagccagccacagaggcaggttgcccttggtctcctccaggatataagccatgaatctgtccagagatcccaggattgctctgtgcagaaccacgggagtcttcttctgaccgtccttgtccacataggtcagattgaattttgcaggcaggcagaaatccagctgacaggtagacagggtgtactcattacctacagcgggctttacgtttacatccagcttcggtccgtagaatgcagcttcaccgatctcctcggtgtactcgatgcccagatcattcagaaccttacgcagagcattctccgcattgttccacatctcatcatcatcgtgatattttaccttgtcctccggatctctcagagacaggacacatctgtaatcggtaataccgaaatccttgtaggtattgaagatcaggtctactaccttggagaactcggactcgatctgctccggtgttacgaacagatgggcatcattctggcagaaatgtctgcctctttcgatacccttcagggttccgctggcttcaaaacggaagtcatgggcgatctcaccgatacggataggcagatccttgtaggagtgctgtgtgttagcgtagatcatcatgtggtgagggcagttcatgggacgcagtacgaaggactctccttccatttccatgggagggaacatgttctccttgtagtgatcccagtgaccggaagtcttgtacagattcacagtaccgacacagggggtcataacatgcagatagcccagtcttctctctttatccttgatataattctccagctcctgccatacggtgtaacccttgggaaggaacatgggaagtccgcggcctaccagatcatcagtcatgaacagttccatttccttgccgatctttctgtggtcacgctctttggcctcttccagctctttcagatgtgcttccagttcctctgcggtagggaagcagacaccgtagatacgctgcattacgtggttgttggcatcgcccttccaatatactccggagtgttttaccagtttgaagttcttgcacagcttggtgttgtctacgtgaggtccacggcacagatcggtgaaatcaccctgatcgtatacagtgatgttgccgtcttccagattgctgatcagatccagcttgtacatatcatccttgaacatttccatggcttctgccttggaaacttctcttctgtagattttcttgccttccttacagatcttcttcatctctttttcgatggcagcgatcacttcatcattgactacatcgttgccgagatcgatatcataatagaatccttcctttaccacaggtcctacccagaattttgcatgagggtacagatgcttgacagcctgtgccataacatgggcacaggaatgattcagagttgtcagtctttcgtcttccttaaaattaaccatttttgttctcctttttgttgttttctaaactattcagcaccttcattcgcaaaatcgcatctgcgatgctactctgaatagtcgcaaaataaaagtcccttgcaacgatctgcaagggacgtatcacacgcggttccaccctgattgcaattatctaaagataactgccactcatttgctcgtaacgggagctgccgggctgtattaaagccactccgagacggtcttcgtccgcatccggcaaaaccgctcacagcgcctgtctccgacagggcggttctctctggtgccttcactgcttcctactcttctcttcaacgttttctgatcttaaataatcataaatttctgttgctttaggacttatgttgatataatagaccttttcacacggattgtaaagaggtatttatatagctttccacattttctctggacatatccagtgccaccgccagctctccgtacaactggtcctctgcgatccgaaaatatctggcatccaccgccgtctccttgcgtcccgcctcttctctggcccgcttgcgcaggtagatggtcttgataatccggatcagatcctggcagttacaggccttcagacaattcttatattcctgctccagcagtttgtcattggcaatggtgatcagcgggatctccggaatctgtcggatcagactctccgcctcctcatgtgcaagcactttccgcatggaaccttctgccgtatccaccggaatatataccgtactggaagacagatacagaggttttaaaatataatactctctcttcttgtccactcctgcaatatccaatgtcgtgatctcttccaccacgcaaacgcccttactgccacatactacacgttcgcccttctgaaacaccttgaccttcctttcctctgcccattgcagaaaattgaaaacacaatttccgtttactaccaatagtatacccatattttaacagaaaaaacgccgaaatgtcagtatctttcggcgtttctgattattttcgtgaatattgctcataagaaattggtcaggtgttgtgcattatttctgataggcgatgcgtggatctccgtttttcaggtaaataatgcctctgcgttcgaagctgttcttctctaataagtgctgcatggtgtgattgtcaaaatgggtatccgcacgcaggtaaggtactttcttctcacagaaggcaacacattttgcaaacagtcccttcacttccccgtctcctgccaggcgatggatcgtgccgtaaggtgtctcctccctccagctgccgtcctcgatataagcataggtcggttcctcctccagcagaagcatgaataccccgtggatgcgtccgtcctttttatacacatacagccgctgtttctctatatctgaccgcagcgtctccggatccggataagcgccgttccactggttcggattcccgtttgcccgcatgtaagccttggcgatgtcatagatctccaggattctgggcagatctgcctcttttgccgttacgatctcctccatcccgtcgccatctttcctctcttccactgcctccggtaccgttttccccagaatgtccctcacggcggtctccatccgctctgccagctgtctgtggcccttcgctgtcaggtgcacatgatccgccttcgtcagttcacagcctcctgcatctaagaaatccgcccgttcagccactgccaggaaagcatattctcttgccagtgctctcgttgtctccacgcttttttcattaaaatcaggataaatcacaccctcttcgatgggaaccggtgccacgatcaggatcttcggtccattctttccccaacagggaaccgatttcgcctcttccaagaggatatgcatgccctttgcaatcttccgcgcatccgtattgaatttcaccttggaatcattggtacctaacatcaggatcagcaggtctaacggctcgtggctgttcaacaggacatgcaataccggcagcagattcacggaatccatgtccggatcatcatacacacaggttctgccgcttaagccttcctcaatgaccagatactccgctcccaatgccttctgtaacaggcaggtccaacgttcctcttcattatatctgctgccgtggtcggcactctccgacggatcggtgcaaagcccgtgggtattggaatctccgatgcacaaaatatgttttttcactgtttaactctccgttttctatttcagtctgtaaccatccaggatcaatacgtcaggcttcaatattagggaaaaatacaataacatcatccccctggcattccacatacatgccctccagttccaggttcacatcatccacattgtgatcgtcgaaatatttggtcaggttcatgatcgtctccatataggaattatctccctttaccaggatccccagacctttttccggctcctgctcatagaactccagaccttcggtttcattgacatattcacgtattgcttctgctatggtcatttgattttttctccttctactgttcctttgttcatatttgctgcttctctttattgtatcataagctcacgaattcgtgctatcgcactctacatcctgcttcgcaggatattcgttcgctaatgagcccagaaaaacaaatgtctgcttgcagccacttgtttttccttgaggctcattatatcatgattcgcaccttcggtacttgacgttgcttcgcaactatcatgatcaaattcgccgttcgccaatcatgcaagcatgttggctctcttgcgctcattatatcataaaaggcgaaccctggcaccgccaaagtccgcccttcatcattttcttctcttattcttcattcatcttagccagcttggctgcctggtcggctgcgatgcaggcatcgatgatctcttcgatatctccgttcatgatcttgtctaacttgtacagggtcagaccaatacgatggtcggtgacacgaccctgcgggaagttgtaggtacggatcttctcagaacggtctccggtaccgatctggctacggcgcatctctgcttccgcatcgtgtctctgctgctgctcgatgtcatacagcttggactttaacagtgcgaatgccttagccttgttctggatctgagacttctcagtctgactgtataccacgattccggaaggatagtgggtcagacgtactgcggagtcggtggtgttgacacactgaccaccgttaccggatgctctcatgacatcaatacggatatccttgtcctcgatgacgatatcaatatcatcgtccacctccggcataactgccacactgatggtggaggtatggatacgtccgccgctctcggtctccggcacacgctgtacacgatgtacgccgctctcatacttcatcttggagtaagcaccctgtccgctgatggtaaactgtacttccttcataccgccgataccaatctcatccacgttgatcagctctaccttccaacgctgcttctcggcataatgcacatacatacgatagatctccgctgcaaacagtgcagcctcatcgccgccggcaccggcacggatctccacgattacattcttgtcatcattaggatccttgggcagtaacaggatcttcagttcctgcaccagctcttccacgcgcttcttgctgtcgtttaacgtctccttgatcatctcgcgcatttcttcgtctttttcctcttccagcatggaaagagaatcttcaatatcctgcttgcactttttgtactctgtatacgcatccacgataggtgtcagatcactctgctccttcatcagcttgcggaaacgttcctggttattcgtgaccgtgggttcatgcagttcgcccatgatctcttcaaaacgaatcaataaatcttctaacttgtcaaacataactaattcctctcaatataagttgtaacagttcagccatgaacatattggagagcaaaaatcatgcttgcatgattttgtgaacgaatatgttcatgaactaagcgccaggtttatgagcaaagatagtcacgaagtgacggaaagcgtgtcagcgcgactttgcgaatggtgcgggctgaactgttacatacgttccaaaaactacccggtccagaccggcataatcctgcaccacttgtacctcgcggtacccttcggtgcgcatcagttccgatacagcctgtccctggtcatatccgatctcaaaaaagagcattccactgctcaccagatgttttcctgcttcttcgatgatacggcggtaaaaatgtaaaccatcctccgtaccgtccagtgccatcctgggttcatgatcccgtacctccggcatcagcttctccacttccgcactggcgatataaggcggattcgacacgatgatctcgaattttccctccaccttgtcaaacaggtcactctgtaaaaaatgaacccgatctgcgttcaccgcatccaaaagcgtctccgcattttgctctgccacttccagcgcatctgcagacaaatccacacccagtccttcacaggcattgctgtaatgcagaaggcttaacagaatacatccggatcccgtacacatgtcaagcacccgcattccgtcatggagttccttcaatacttcctccaccagaatctccgtatcctgtctcgggatcagtacgtgctcattgacagcaaaggtcagtcccataaagtcctgctccccggtcagctgctgcagcggaatgtgctccgcccgctgtccgatccagccaagatatttctcttccgcttccggtgtcaccgactgttccccgtgcaccagcagatcattacgattcgtaccgcataccgcttccagcagaagtctcgcatccagtgtggcttcttcgattcccgctgtctgtaaagccagacagcccttttcatagcattcccgataggtcatcttaatcctctggttctgcggatgcatcgtccttcatccagccctcatccacttcgtaaccgaaggtatcctgtaaatatttcttccagtcgaacacagcttctacggaagcgatggctacctctgccatgctctcatcgggttccctggtggtcatacgttggatccacataccgggagcagacaggatcttaataaacacattatccgtgcgtccggccagacggatgatctcgtaggaaattccggccacaaccggcatcagcagaatacgaaggatcactttctccgccacattatccacctggataaagaagaacagcacaatacttaccagcataacaaagaaaatgaagctggtaccgcaacgtttgtgcagtctggagctgcgcatcacattgtgcaccgtaaggggtctgcccttctcgatacagttgatgcatttgtgctccgccccatgatactggtacagcctgcggatatccttcatggcgctgatgccccatacatacagcaaaaacagagcaatacggatcacaccctcaataatcgccatcagggagcggttgcggataaagctctcaaacagagaggaaatgaaatacggcaatacgataaagatgcctactgccaacataatagagatcaccgtcacaataccggacagcagcttttctccgttgccaccgctcatcttgtccattgccttatcgaatttcgtttctttgccttcctcttcttcatagaaggaagcggaataattcaatgctctggttcccaggatcagggaatccaggaaattaaagataccacggataaagggaagctccttgaacttacttccgtgagccagaccctgataggtctccacttccacttcaatctcgccgtccggcttgcggaccgctaccgcatacttctctttatttttcatcataacgccttccagcacggcctgtccgccgataccggaataacgactctttcttctagccataaaacctcatccttataaatgcagtattaaataggaacatagtttcctatacgacaagaaaaggttgagataagaatacctcaacctttcgcttgcaatcttatttaacaccgtatttcttattgaacttatcaatacggccatcggttcttgcagacttctgctggccagtgtagaatgaatgacacttggagcaaacttctacgtgaagctcgggcttggtggagccggttacaaatgtgttaccacagttgcaggttacagttgcctggtagtaagcgggatggattccttctttcatttctttcacctctctataaaaatgtcgtgtataagttcttgttctcatcctcactgcttatggaaccacaaacagcggtattattgtaccataagagtttacacgacgcaagacctatttttacatatttctcctctgatattgcactgtaatgacataaactgttttttcagtctcatcaatcttataaattgccatataattatcgaccagaagctgtttatacccctttccggcatactttccctctaatctatcctgatgtgaaccgggaaaagtctccagtttttttatcgctctccaaattctgtctgtttgtgcttttgcattttccggaacctgtttttctatggcgatatacctgtagatttcttccatatcacgatatgctctcggatacaactttatatggtatttaaccataatattttttgtctagccgttccattgcgacatccatatccatcgtatccgcacccgcagcaacttcctcttccgcctcacagatggcctggtcgattttatgaattcgtgcaaaatgctcataaagttctgcgctcatcactaccagatcgctgtagccattcttagtaataaaaatcggttcctgctttgtatgtgctaattcggatatttcacttgtttttctcaaatctctgattggcatgatcaatggcataatagcacctcctttatgccataattgtagcacaattatggcacatcgtaaaggtatatattctgccatcatttccaatttttgtcaattttctatctcttgcctagataaaccggttcttcttcaccatattcacaaattccacattattgcgggtatgggagaacatatcaaggatgcggtcggtagcttcgtcgggctttaagccattcagggccttacgcatgatattgatggcttccagttcttccggtgtcagcaacagatcctctcttctggtgccggattttgccagatcgatagccgggaaaatacgtttctcggacagctttctgtccagaaccatttccatattaccggttcccttgaattcctcgtataccacatcatccatcttgcttccggtctctaccagtgcggtggccagaatggtcaggcttcctccctcacgcatattacgggctgcaccgaagaatctcttgggcatgtggagtgcggcgggatcgagaccaccggacagagtacgtccgctggggggaaccaccaggttgtacgctctggtcagacgggtgatactgtcaagcaggatcacgacatccttcttatgttctacgagacgctttgcacgctcgatcaccatctctgatactctcttgtggtgctcgggaagctcatcgaaggtggaatagatcacttccacattgtctccgtggattgcttccttaatatcggtaacttcctcgggacgctcatcgatcagcaggatcagcatgtgcatcttggggttaccgttcaaaatagactttgccacttccttcaacagtgtggtcttaccagccttgggcggggatacgatcataccacgctgtcccttaccgacagggcttaccagatccatgactctcatagccacgctgcagccgggagtctccatcttgatgcgctcatccgggaagatcggcgtcatatcctcgaatgccattctcttggctgactcttccactgtataaccgttgatgctcttgacgaacagcagtgcactgaacttctcctgctgggtcttgattctcttgttgcccttcaggatatcaccggtcttcagtccgaaacggcggatctggctgggagccacatacacatcgttctcaccgggcatataattctcgcaacggataaatccgtaaccatccggcataacctctaagataccgctggcttcgataccgctgtccagttccttgggatactggctctcatcgtatgccacgttattcggattgaaggtacgctctctggtgtaagcttcacttcttacgccgaccatctctgtaccggtttcggaacggtcagtgcgttctgcacgatccgtacgctcggtacggtctgtccgatagtttctgtcatttctatcctgtctatcatatctgtcctgtctgtaattcctctcctgtctgacagggcgttctgttctctccggcttctctgcctcttcgctcttagcagcctcctgtttctcttccgctgccttagcttcttcctcttttttcaggcgctcatcttctgcaagcatagcttctaccagatctgcctttttcattgtggaagttcccttcaggccacgtacttttgccagctcctttaactgaactaatgcaagtgattcatatttttctctcatataccctcctatggaaataagatttactatatagctgttaactaaggggaattacatccgatttacattcgacatgtcagttgaataaaaagatattaaaactgcatctgaagccattataatacatttctttccaaataggaagtcccaaaataaaaattttattttttgtaaaagtggtgctaaatccttgcgaagatatcgattctattatatcattatgaatagcgtccggatttcgtatccggcaaatcatccatgattatatgaagtaatgaccaaacaaaaaataagagaggtattgtcatgacaaccaatgaaaaagcgttactgatgcatgaaaaatggaacggtaaactggagaccgtgtccaagactcccgtcaagacccgtgaggatctggctattgcttatactcccggtgttgcggagccctgcaaagtaatcgcccaggacaaggaagctgcttacaaatacaccatgaaggccaacaccgtagccgttgtctccgacggaagcgcggttcttggtcttggcaacatcggtccctacgcagccatgcccgttatggaaggcaaggcagtcctcttcaaagaattcggtaatgtaaatgctgtccccatctgtctggacacccaggataccgaagagatcatcaaggctgtgacctatctggctcccggcttcggcggcatcaatctggaagacatcagtgctccccgttgtttcgaaattgaggaacgtctgaaggagattctggacatccccgtattccatgatgaccagcacggtactgccatcgtcgttctggccggtgtcatcaacgccctgaaggtagtcggtaagaaaaaggaagactgccgcgtagtggtaaacggtgccggaagcgccggggtggctatcaccaaactgcttctgacctacggtttccccaatatcatcatgtgtgacaaggtaggtattgtctccaaagataccgaaggcctgaactggatgcagaaaaagatgaccgaagtgactaacttaaacaacgagaccggctctctggccgatgctctgaaaggtgccgatatcttcatcggtgtttccgctccgaacatcgtcactcccaagatggtagcttccatgaaccgcgattccatcctgtttgccatggcgaatcccattcccgagatcatgccggatgtagccaaggctgccggtgcccgtgtcgtaggaaccggacgcagtgattttcccaatcaggtgaacaatgtggtcgctttccccggtatcttcaagggtgctctggaaggtcgtgctacccagatcaccgaagagatgaaactggccgctgccgaagccattgccggtctggtacccgcagacaagctctccgatgacaatatcatgccggaagcatttgatccccaggtagccgaagttgtggcaaacgctgtaaagagccacatccgctaatgtgttcggacagcattgtgagagactggcacggcaagccctactactctctggattcctattgcaaaaatatgtttcaccataaatgctataaaatagccctgaatgcccggatgtcctgtcccaatcgggacggaactctggacactcggggctgtatcttctgtagctccggcggcagcggtgactttgctgtggacattgccgggaagactatggaggaacagattgcggaaggcatggcaaaattcggtgataaagtgaccggtcatgacctgatcgcctattttcaggcatacaccaacacttatgcacctctcccctatctggaagaggtgtatcgttctgccctgagccatcccaaagtctgcggcatctccattgccaccaggccggattgtctggggccggaagtactggctctgcttgcaaaattaaaaggtgaatatccggacaaattcctctggatcgaactgggattacagacaatccacgaagagactgcccactatatccgcagaggctatcccctgtcctgctttgagaaagcctgtaccaatctgaagacactcaaaatcccttttatcgtccatacgattctgggactccccggagagaccgaccgacaggtactggaaaccatgaaatacttaaaccatattgctccctttggcatcaagctccagttactgcatattttaaaaaataccgatctggcagaggattatgaaaagggaatatttgaggcactgactccggaacattatctggatctgttggtctcctgcctcgcccacctgtctccggatatcgtgatccaccgggtcaccggtgatgggccaaaagatctgctgatcgctccgaaatggagtctggacaaacgaaaggtactgaactcactgcaccaccgtatgaaagaacagggcatccgtcagggtgacctttatgaagcaataaataaagataaacattagaaaggctgttatcccattatgttacaagatccgcttactttatataaacttatcgttctctacatgctgaaccgtgtgactttccctctcacggccgcacaggtcagcgattttatccttggaaaggaatacacgaacttcctgaccctgcagcaggtcatcaatgaactgacggatgccggaatgatcgccacccagtcgatccgcaaccggacccacctgtccatcactgccgagggcaaggaaactctgaatttcttcgagaaccgcatcggtgataccatcaagcaggaaattgacagctattttcaggaaaacgagttcaccctgcgcaacgaagtctctgtgttgggggattattataaatccacctccggtgaatacgaggctcacctggtagcaaaagaccgtggtatcaatctggtggacatcacattatccgttcccgtggaagaaactgcggctgctatctgcgacaactggcagaaaaaaaatcaggaaatatacaaatacctgattacggagttgttctaatcccgcaatcaggtacctgattttatgattctttgttttcagaagaagcctctgcggcttcttttttgattctcgccatatgctctctgatcttcacctcataaccgttacccgagggctgatagaactccctgccgcttaattcatagggcagatactgctgttccacatagtcattcgggtaatcatgtgcatatttatatcctgttccgtgtcccaattttgctgctcctttataatgtgcatcctgcaagtgtgcggggatcggcagatctcctgtggcctgtacttcctgcatcgcctgaaataccgcttcgcagctacgattgctcttgggtgctgtagcaatataagtcactgcctgcgccagaatgatctgcgcctccggcatgcctacccgctccaccgccagagaagcattcactgccatcaccagtgcctggggatccgcattgcccacatcctccgatgcacagatcataatacgtcttgcaataaaagtaacgctttcgccagcatttaacatccttgccagataatatactgccgcatccggatctgacccccgcatactcttgataaatgcagaaatcgtatcgtagtggttgtcaccgtttttatcgtatctcgccgctctcttctggatacactgctgtgccacgtcgagcgtaatatggatcttgccatccggtcccggttctgtggtcatgatgcccagttcaatagcattcagtgcatgtctggcatcgccgccggagatatctgccagaaaatccagtgcatcctcgtctatggtgccgttgtaggctcccattccccggtctgtatcgtagactgcttttttcaaaagttctttgatggcttccctcggaatcggcttcaattcaaagatcaccgagcgggagatcagagcgccgttgacttcaaaatagggattctctgtggtagctcctatgagaatgatcgtaccgtcctccacatacgggagcagataatcctgttgtcccttattgaaacggtggatctcgtcaatgaacagaattgtacgcttcctgtacattccctgcagttccttcgcctttgccaccacttcttccatatcctttttgcccgccactgtggcattaatctgttgaaattcagcactggtagtattggcaatgactttcgccagcgtcgttttgccggtaccgggcggtccatagaaaatgatggagctgatcttgtccgccttgatggcacgatacagaagcttgtccttgccgataatatgctcctgtcccacgacctcatccaaggttctgggacgcattctggccgccagtggagcttccttttccatattggtgcttctcatgtattcaaacaaatccataatattacatcctctgtttctattgcaaagataccaaaagactgaagcacattctaagatatgctccagtcaattataacaaagtttatcgcagcttgcaattttgcatccagatcttcacacgccgcttcaatgcatttgcttccagcggagccagcaaaagatcctggattacttccgtctccaacgcacatttcatctgtacaagattcccctccttgcagatggcgatcatgggaagcgcatgttctctctgtaattctccaagttcctgccagcgtgcctgtcctccgtcctcttcttctgatacatccacgaacagtcccagaatgtcttcgccggtcttctctcccatgttctctctgatctcttccaccgagattactttcttcagatgaacaaactccggcagtgcaaactccagcatgctggtaacattacgggaggatgaccacacaaaagcctgtaatttctgatcaggggtctgattttcctcaccgaacacgctgtagcgtccttttcccgacttcttggatacatacaatgcctgatctgcttttgccgcaagatcatagtagcaatgatcctctggatcggaaaatgctattcccacactgatggatatattttccggtatgaataagctctctttatattttacgaggttgaccagattctctgccttgatcagtgcgatctctttggacggaatgtctcccatcaatactgcgaactcatctccacccatacgtcccacataatctgtgctgcggaactgtgaagaaatgactcctgcaatgacgctgatcacatggtctcccatagtatgaccgtatacatcatttacggatttgaaattatcgatatctatcaccataagagcatgcaggccattctcatgctctgtcagagtcttcgtgatcagcttctctactgtcatcttgttgaacagactggtcatctcgtcgatctgcgactttgtcttccaggccttctgctcatctctgctattctgtaacctgcgttttacccccagtgtattgttgatgcgggtaagcgctatccgggtatctaccggtttgataatgaattcatccgcccccagtgcaaatgcttccgactgggaagacaccgattccgtattcgtcagaacgataaccggcgtgtccttgaagccctccatattctgtctgcggcgcagtacttcaaagccgtcgatccccggcatgaccagatccagcagcaccagatcaatggcatcgctttccttctccatgatcgtaagacattcttcaccggaaacagcctctgcgaagttaaaatgctccccgagagactgtctgatcactactctttgaaattttgaatcatcaacgattaataatgtttctttcttttgtaaactgctcatggctgtcggatcctgctttccgtatcacgtcgtttaaaacgcgatacagttatagtatatccaacagccatgtgctcgtcaatttaaaaatatatctactttttacacaatctttatgtggtttttccctttaaagttgaattttactacgtctgcagagaagtccgccgaatgtcaccagacctgcagctgcaaacagcagtacctcgggcatccatcccatcacaccttctccggtcttgggcacgctgtccagctccggctgtgcagctgcggtgtttgcagctactgtaaatgtggtgctggcggaatcatcgatccacatggtgtccacagtatgttcaccctctgacagggatgccaggtaggaaggcttcagggtcacgatagtggaacctgattttgcttcgtagtgggcactggggatccagttgccgtctacacggacaccggcgaatttagcaaaatcaccatcgccgcggatggtcaggccttccgtggtgctgccgttccaggtacccttggtgccttcgatgatcttatagggatcttcctggctgtcatcggtaccactgtcagaagctgatgtatctgtattatctgtagtatttgtaatctctcccgttgtaaaggtatatttcaatgtcagataccgtccctcagctaagtcaattgacgtatactccacttgtggatttgtgacaatccagatgctgtcatgattgaatttatagccacgttctgcaaccaaggtcagaattgcataatacgttgtgttcggttcagcattgccgattgccgcctcattctcatttccctctttcaaccacaaaatactgttcttcgtaacatcagtaattccttccgtattaatctgccattttttaggtaagggctgtccggctaccggtggggtgactaccatgtccagactggagattgtccgatcaactgtgccaacattaaacgacattatatctgttttcctatgttcatccccttgtggatcatcatatactgcttttgcatacaccttatatcccgccactttggcacagttttctgttttatagctaatcttcactgttgcagttctgttatcttcactataatttatgatttttgcatcaaaaatgtcatctgcacggtaacccgctccatcatagaaattaaatgaaacatttactttagaaaaatcataatatgaatttatttttaaatcatacaaaaaataagatttctcatcatttgaaaccaactgtgccggttccgacaagctagaatgaaattccagattgactgcttcacctgtcataactattttacctgttccatgatttggaagccgataataataacattgttgaacgctgtcataggttgcacttgcttctatttcattaacatcatccgtagaatatacaactttcggtgctgtcaaaaaccaatattcttttccattataactgtcatctcccgggtatatagaaaaacaatcatacattttactatctatcatagtacttagcattatatgacagttttttaatccggttctatcaactgtccagtttcccgtataatcgtccgccttagcattcatcccctgccaaccccacagcagcagcaccgccgctgccagcagtccgattctctgtaatatctttttcatctgtttcctcagagggatattgtcaagtgtgtaagtaagattttatgaaattgcttctattttcataagagagccttccattacttttataccatctgttaattcaatatagctgattacctttgtttctcaaaaagaatagtttatacgctttagattttagtatcaagtgttgcctgtgcaggggattttcctgtctctgcagtctctcttgtaacatcatcaagtgctccagctttgattggcttaccaatttcccagttaggatcagccttttttgcggcatcataaaaagcctgtctgtaaattctctcatatttttcaagggtgtacccggcagccagcctgtcctttttggacattttgcgatacaaattgttatacacatctgttcgttttgttgtatcaccattgcatacaccattttcacgcagaaattctttttttgtcagttcatacatttcttctttgctgctatccggaattgatatgatccttcttctcgaattctcgttgtcatctgtcaccaaaagtcctgccaatccatttacaggattaatataatctccatccttatcataatgactcatcagattttttattccctgaatattgccatacatcgcaccatttccggcagacatcatcttcttaatagctgctttatactgtttactgttcgtattaattccagcagcttttagctgtgattgaacagaactgctattaagctgtgacaactgaaaactacctattgcatttactcctgatgttccaaatgatttctgaaataaaaaagcataatccgttatccttgacataaaacagcctccctgtctgtttccacattgcaaatttatttttgtctattttatgttctagcataagtcattattttaattgcacaccttacggtttcatatcaaagttcctatgccagcacatcaaatgtcgaaactccattttccatcactcctatagaagttgaagtacctagcaattccaccatttttcctgtcaggtcagttacatcttttccatcaattttcagattatattgccgttcttcctgctcctgtttttcggcacgctgtttttccagtctttcctctgtctctttcttttctgctttccttttcacgagtctttcttcaagttctttccttgctttttctgttccaggatcaacttcatcttgagtacacattacagaactcatactatcatatccatctatagtaatactataactcagtatctttgctcctcttgctgccacataagctcttgactgttctattgtttttggtattagcgataaattgtactccaaccattgttttgtcttttcatctcccatagcctttgacaaaagagaactgtttatatttacagaataatccctgctt

SEQ ID NO: 5474 - DNA, 15979 bp, Unknown
  gut microbiota DNA sequence
atgagcaggtggctttcggagttcctgatccgggaatgcgggctcccccgggaaaaggtccatgcggtgggaggcggcatcaatgtggatgctgcagggatccgtccgggatcaaaggaggggcggcgtatcctgtttgtgggaaggaattttgtgagaaaaggtggtccgttggtggtacaggctttcacaatcctgcggaaaaaatatctgtggtcagcggagctgtatctggcgggggcaaaggagtcggacatccgggacgctctgcgggagaggcagatcagggtagaagaggtggactggcagaagatccacctgctgggagatctggggtctgaaaaactgacagactattataacctgtgtgatgtcttctgtatgccgtcttattttgaagcctatggactggtatttgcagaggcacttacttatggtctgccatgtatcggcagagataaattcgctatgtcggagttcattgaggacggatgcaccggcaggcttatttccggggaggatgcggaggaactggcactggatctgtgggaagtacttcaggatccgaaataccgggaggaagtggaacggcggagggaatggtatctgagagagtattcctgggacaaggtggcgcagagaatatgcagtgtgatggagaaaaatgagagagacaaagatcagtatcgtagtgccggtgtataacgcggaaaaagaattacagcgctgtgtagacagtattttccggcagagcttttccaactgggaactgctgcttatcgatgacggcagcagggatagctcttcggccttgtgtgacaggctgggggcgcaggacacaagggtccgggtctggcacaaggaaaacggcggtgtcagcagtgccagaaatctggggatctgtaaggctgaaggagagtatcttttttttacggacagtgatgataccctgttcccggataccttggcaactttatatcaaaaggcaaaagtatccggcgcggatctttcggtgtgcggttttacatatctggtggaacagacgaaagaatgtgtggataaccttccggaaaaagctttctgcggtggaggaaaagaatatctggaggagcggtttttatcggacttccggcgggaatttttcaatccgccatggaataagctgatccgcagggaattgcttctggaaaatgatatccgcttcggagaggaatttgccatctgtgaggatatggctttttccatgcaggtgctggaaaagagcaaagggatctgtgtggttccggagtcgttgtattgttatcactataaggaagcggagaatctggtgaaccgttttcatgagaactattatgaggctttattgtatttccgggaccgcacctggcagtgcttccgaacgcttcaggcaaagcaggaactgtatgcggaggtcaatgcctgtttcgtggggaagagtctgatgtatctgcataagatctatagagattccggctatgaggaaaccaggaaatatgcggaactgaaacggatcggtggttccctgccgctgcagaatgccctgcgggaataccgggccacgggaaagaggcgcttgctgcgggagttgctcctgcataagaaattccggctattggacagtctgtaccggtggcggtaggacaggggaaggagagaggattggaactgacaaaacagatcggcgtattgcgcaatcgaaaaaccttggacggaagaaaagcagacaggaacaaagtaaatctggagtactggaattttaatgagaatctgggggatctgctggcaccggtggtgacgcagtggatgttgcaccgtctgggactggatctgtccagagaggcggcaaagccctgccatctgatgaccattggttccgtgttgggactgggagttttcgatgcggtgatctggggcagcggggtcaattccttcgctcatgtgggacgggtgactacacaaaagggataccggaagctggatatccgggcagtcagaggtccgatcaccgcacaggtgctccgggagaacggatatacctgtccgcagatctacggagacccggcgatcctgctgcctctgatttatcccggcagacgaccggagaaaaagaaaaaatatgtggtgatcgaccattacatgaagcggaaaacgacaggagatgacagactttccatacgaaccggagattaccggaccttcctcgacaaaattctggaggcggaggtggtatactcgtcttcgttacatgggatcattctggcggagagctatggggtcccgtcggtattccttcggcaggggatggaggaagagatgctgaaatattatgactggtactttgccaccggcagatatgaggtgcgctcggcaacatcccttgcggaagcaaaggaaacagaacccatgaaattgcccgaactggaagaactgagggagggactgctacagagctttccctatgatctgtggatcggccagaaagccggaaggagaaagtgtgaatgaaaaggacccgaaatgccgtcagaaatgtgatcttcggaggactcctgaaggggtatcagattctggttccttttatcatgcgcacgctgctgatccggtatctgggaatggaatatctggggctgaacagtctgtttacttccatactgcagatcctgaatctggcggagctgggagtagggagtgcactgggctacagtatgtatgctcccatcgcggaaggaaagaaggacgagatctgtgctctgttgtcattgtatcgcagatattaccgcctgatcggtctggggatctttctggccggaatagtgctgctgccgtttctgccatcgttggtgaaaacggacagtattccgccggatgtggatttgtatgtattgtatctgctgcatctgggagcctgtgtcatcagttactggctgtttgcgtataaaaacagtctgctggcagctcatcagcgaagtgacctggcaaataaggcggatctggcggtacggacgctgcagtatcttatacaggccgggctgctggtgggctttcggaattattactggtatctgctggcggcactgggagcacagatcctgacgaatctgtgtaccgcactggtggcacagaaaaattatccggattatgtcccaaagggacaggtggaagagcagaccaggcaaaaaatccggggcaggatcaaggacctgtttacctcccgggtgggggcggtcattgtgaattccgcggatactctggtcatttcggcatttttgggactgacggtgctggcagtctatcagaattattattacatcgttacttccgtcattggtctggtaggggtacttttcacctccactctagccgggatcggcaatagtcttctgaccgagagcggggggaaaaattatgcggatttctgtaaatttacactgttgatcgcctggattgcaggactttgcacctgctgcctgctgtgtctgttgcagccctttatgaaactgtggatcggagaggcaggcattttgcccggacagatcgtgatctgtctgtgtgtatattattttatctacgagttcaaccagctgttcaatgcctacaaggatgccgccgggatctggcacagagaccggttccggacactgacaacggcaggagtgaatctgatcctgaatcttctgctggtaaaacctatggggctgtacggagtgatcctgtctacggtagttgctacggtcatcgtaggaatgccgtggctgatacataatctgtttacgacgttgtttgacggagaggaccggcaaagctatttggggacactggtcttctatggaagcgtaacttttttaaactgtatgctgaccgaccgggtatgcagtcagataccggtagaaggaatccgggaattattggagcgggcactggtatgcctgcttgtgtccaacggtatttttctgttgtgttacggaggccggaaggatttccgggccctgttggcaatggggaagagatttctgcctgaaatacctcatgataaagcgacttcggaaaatgaccgatccgcagaggaaacaacaaagtttgcagattacggaaaggcgggagctttctatgaagattgcagtagcgggaaccgggtatgtgggattgtccatggcagttctgctggcccagaatcatgaagtaacggcggtggatgtgataccggagaaggtagagttgttacaaaaagggagatcacctatccgggataaagagatcaaagaatatctggcaggcggcaggctgcatttgcaggctaccctggacggagaggtggcttaccgggatgcggagcttgtgatcgtctccacaccgacgaactatgatcccggaattcacttttttgacaccggttctgtggaaacggtggtggagacagtacggagggtgaatcctgacgcggtgatcgtgatcaagagtacggtgccggtgggatatacagtgtctctgatggaaaaatatcacacggacaggatcctgttttctccggaatttttgcgggaagggcatgcactgtatgacaatctgtatccttcccggatcattgtgggagcagacacaaagtccgttgaaatggcggagtatgcaagacggtttgcagagcttttgcgtgagggtgcaaaaaaacaggagatccccatacggatcatggaccctacggaagcggaggcggtaaaactgtttgccaatacctatctggcgctccgggtcagtttttttaacgaactggacacttatgcggagatgcggaacttaagcagccgcaatattatcgagggtgtctgcctggatccccggatcgggatgcagtacaacaatccctcttttggctacggaggatactgtctgccgaaggatacgaagcagctactggccaattatgagaacattccacagaatctgatccaggccatcgtgtccgccaacagtacccgcaaggatcatatcgcggacagtattctggagaaggcgggattttatcagggaagtcagggtagaggcggtgtaccggggcaaaaggtggtcataggaatctatcggcttattatgaagtccggctccgataatttccgtcagtccagtatccagggcgtcatgaaacggatccgggccaaaggggcacagattttgttgtacgagccggaactttcggaggatgattttttcggaagcccggtcatacgggatctggaagcctttcagcggcagtcggatgtgatcgtggccaatcgttatcacagagatctggagaatgtccgggataaggtatacaccagagatatttactacagggactgagtgagggaagaaatggatacagagaaaaaaacgggggaacgaataggaatcacgctggcactgttagcatgtgtgggattttccgcttttctgatctggctgcagcaaagccaagagaatgacagacagcagctgacacaacaggtacaggacagcgggcagcgggaagaacagacggaaggaagcgggcagatcgagatccggagtcgtgttacccggagcaaaacaggggatcagccggtattttccctgccgggagggttttatccggaggatattacggtagagatcgctgcaccggcgggaagcagtatctattatacactggatggcacggtgccggatccggagaacggaattctctatgaggcaccggtggagataacgaatgtctgcggcagtcccaatgtctactccgccatttccacagtgtcagcctaccaggactatgcgccgtttactgacgtggacaaagcagtggtgttacaggcagtggcagtagatgccggaggcaggacaagtaatgtcacctgcgccagctattttgtggctatggaggccagagcaatgtaccgggatctgccggtgttgtcgctgactgtggatcctgtggagctgtttgattattttggcggcaattatgtcacaggtgtggattatgagaatgcgctggcggcggatgacctgcggtttgattctgccaattattaccggggtggagagatgaatgcccatgtggaatacttcgaagcggacagatatctgacttatgagggggaggtaattttaagtttgcggaaggacggaaatctggattacgggcagaaaagttttcttatgacgggagcggatccggtgccggagagcagttgtgagctgtatgagcttttccgggacggcacgtttcttctgtacgggggcggcacggatcatgtggccaagaacagacaggttttagaggaactgctgttaaaagaaatcacggattttacgctggaagagcggaagggctgtctggtgtttgtggacggggagttctggggattgtatctggtgggcagggtaaatacggcggaaacctttgcccgaagagccggcggttccccggaagaaattcaggtcatagagaaccgctatccctcccagatcgctccggaatacggagaactgtaccggctggtgaccgaggggaatacttccggacacggaacgtatcagaagatcctggagcagatggatctggaaagctatctggattattactgtgccaatctctatttcggtaattcgcagtttgactctttttccaccactttgtggcgacgggcaggagaaggagagacgggaaaatggcactgggaattctcggatgccacggatactctgggacggaataaggtcagtaattacagtgtgaatacctatctgtgtccgggggtggcagaagatccgtttttacagggattgttgaaaaataaggactttcagacagcgttccggaagagaatgcgggaatacgtggaagaactgacgaaggaaaaggcagaagagtatctgacaccgcttctggaaacttaccgggtggcagtgacagccacggcggagcgctacggcctgcgacagacagaggaaggatatctggctgacggggatacgattcaggaatattttgcctcacggggagaatatattctgcgatatacggaagagtttataacgcttgtggatcagacggaggctcctgacggagtacaggaaacggtcacggaaagcgtacctgaagaataaagggaaaggggaccacgtatggaaacaatggcagaatatctggcggaactggtaaaggccggattggaggacagaaaggcggcgtctctgccggagggagtctctgtaagggagatcgtaaagatttcagaggagaaccatatggattatctgcttttgggagccttgttaaaaacagatgggctttcggaggaagaaaaagagcttttgcgggaaaaagtactgggaagcatgctttttaccggtatgcagctgcaggaattgaagaagctggaggaacggatggaacaggcaaagattccctgtcaacccatgaaaggagcccggatgaaattctattatccgtcttcgtttctgcgggaaatgagtgatattgacattctgatccacggagatttcatggagcaggcggcagtggaactggaagccatggggtatgtcctgcaacagaagatcaagcatcatgatatctatcggaaagcaccgggaatcgtggtggaggcgcacagagccatgtatgaccggacagtggacgagaggcagtatgcctatttctcggatctgtcccgggcggtgcgcagaaagggttttctgtatgtgtatgattttgaggcggaagatttctatatttacatgatggctcatatggcaaagcatttttacaagagaggctgtggtatccggaatctggtggacatttatgtgtttctggaaaaattcggtggggaaatgaacgcagactatctgcaaaagcagtttgcgggattgggactgacggcatttacggagcatatggagaagctggcccggatctggctgcagggagagcccggtgaagcgttttatcagcaactgtttgactatatgcaggggtgtggaatctatggcaaggatgaaaacggtatctggaaccggttctgcgatgcgcagccggagaagggagaaaagggccgagatgtcctgaaacgctggtactggttccctccttatgaatatatggtgttgtattacccgtggctttcgagaaatcccgttgcgggaaaatttctgcttccggcagcctggggaatccgggccgtccggggtgtggtctgcggccggggaaaatacaagcgggaaatgctgcggcagatcgatgcatcacagatcggtgtaagacaggatatctaccgcagactgcagttacgttttcattagtctgttccattgaaatatttataaggagtgtaagaaagccatgaaaagtccgtcagggtttctttggaagaacccatggaaaaaagaaaccttacttacctattattattcggcgatcttccgcatgcagctgctgctcctgccgccggggaaactgcggaagggctggggcagagaaaacgaagaatccgcaggaacggcatcccgggaaggataccggcaggcggcgcgtatcgcccggatcgtgggaaaggtctgtgataagactccctgggagagtaaatgtctggtgcgggcgctggcggcccagagactgttgtgccggcggggactttcttccaccctgtatctggggtgtggcatggaagaaggtaaaatggtggcccatgcctggctgcgttttggggaaatgtatgtgaccggaggggacggcggcggatatactaccgtggcccggttctgtaaggaggcttccggaaagaggggataagtatgtcggcaatctggggaattgtggatctgagtgtggcgcagtcagaggcacaaagaaaaaatcgtgcagggaacctgtgggaagaggctctgcggatgcggcaggcctataggacgagctgcctggaccggatacaggaaaaaagggaggcaacctattatctggcctgcggggtacagaatgtcacaagggaagctgtggaagaaagattcccttatgaaagaaagggagagcgcagaagtctgttcgtggcggatgtgatcctggataaccgcggagaactggtgcagcggtttggaggcatccgggatctgtgcagccatccggacggggaaattctgtatgaaagcttttgcagccatccggaggaaacgcttgccgtggccagaggagcctatgcctgtgcgtatctggagccggggaagcggaccctgactttgttcaatgatgcggtgggaaaccgttcggtctattattttcaggaggaaaaaagggtctatttttccacgctgcttgcggggatcacctgcgaacgggagaactggaaggaaaatacgggctggtttgaccggttctataccatccgggatctgcgggcggtgtcggaacccagagagacaccctatgcggggatcctgcgactggctccgggagaaattgtggtatttactgaagaaggggtgcacagaagggattactgggatccatttgcgggaaggaggatcctgcgggggaagacggaagcagggtaccgggagctggtgaccacggtgttccggcactgcgtggaggatgtgatccgggaaggccggggtggaaaagaaacaggaattctgttaagcggcgggctggactccaatgcggtggcggcttatgcagcaccttaccttgccgccagaggaaagaaactgtattcctttactgcggtgccggaggagaaggaaagagcacggatcccgggacaatacgctgtggaggatgagagaagcagtgtggaactggtgcggagatttcacgggaatctggaaccggagtatctggtgaccaaccggggagatctgctggcggagaaccggaggctgcgggaagttctggaagttccctgtaaagcggtactgaatctgccctggatgtatgaaagttatcgtctggcagctcagaaagactgtgggatcctgctgtcgggacagtacggaaatattaccatatcctatggggattttcgaagcctgttcctgacactgttacatcagggaagaatcaaagaactggtgcgggagatcaatgtctacagcagaaaataccgcaggagccgcaagtggatctggcgggatcttctcacggcggaagccggtggggatcatgaagcggtgtcccggtatatgtatgacaaaagtgccttgcggcagatcggagaatatgaagtaaagctgtctctggccaccggagtggtgcccagagatcccaccagagacaagcggctgatcgcactggtgctaagtctcccggcggaacagttcacccatgctgggcaggagagacgcctggttcggcagtatttacaggggaagatcccggaagagatcctggcggatgaattccacaagggaagacagggcgtgggaagtgaggaactgctcgccttgcagtgggaacggatctgtgaggaactgtcggggattccgggtgagacgatgtccggggaaaacgggcactcaaaagcagacatggtgcgtggcttttatgtgggcctggcacaggaatatcggagaaggtttgaggtatgatggaatatttttacagaatctacggactgcgggtgcagtcgcagatccccttttcggaggcagtaccggagacggcgggagaggcagaggtaaaaattgtattcggaaggatgccggatttcctgctggaagcgggacagaagggctacgggacctggacaaacggctttgtatcggcctggttccgcatccgggacggaacacaggtctatgtggaagggggcagcaggatcaccgttgagctttcggaggaaccgcaactgcttgtgatcacttccctgttgctcagtgccgggatggcactggtctgtctgcagaggggggaacccttttttcacggaagtgcattgtataccggggaacaggccattttactctgtggggagagcggggccgggaagtctacggtggccatggaattgttgcaaagaaagcttggatttctggcggatgacacagtgagggtgcatccgggaactatggggatgctggcggagccttcctacccgcagcagaagctttgtcgtgatatggcactgaaatgcgggaagccgctggaagaactgatctatattgacgaagagagggacaaatatgcctggcgcagacaggattgctatcggaaagaggcggcgctcctcgggaagatttttttgctgcgaaaggatgctgtggccgggtggcaggatgcggtgcagaataccggggaagaggcagtgagtatccaaaagctcaccgggcagaaagcactggagactttgagcagccagttgtatctggcggatacctaccggtacagtaccgggattccgtatcctttgatgaaacagttggtccggatcgcagggcaggccggaatctatgaagtgatcaggcagtcggacaaggatacactccacgaggtcgtaacgaaaatcttacagttttgttagaaagagggtatttttacagggaaattattataatcagaaatgtaagaaatcataaaaatgtaataaggaggaatggaaaatgaaagcatggagtcagcccgaaatggaggaactgaacgtaagagcaacggcttacagccctaagggaggtctgatcgaggacggcgtttaccagtccgatgacggtaagtatactatccccacttacggtccttcttccggcaattccggagaacctaccgtagacgtacagtagtttttggactgtatgagaggaaaaagccagaatggatcagggaagctcatggttacatgggcttttttggtgtatatgatgagtccgcctgctcgattaacagacggagacagagcgtgtaaaagaagggagaacagaaaatggacaaaacggcaaaaatccgaatgaaagcgaaaaggaatgtgacggacctggcgggagaaaaggtcatggtggatttcgaacaggggaaatatttctgcatcaaaggtgtgggaaacgacatctgggatatgctggacgggcaggaaggcgaagacggcataacggtggaggctatcttacataaactgatggaagaatatgaagtgatggaagaggtgtgtgaaaaagaggtgctggcatttctggaaaaactggaacaggcagggatcctggaagaggtgtagacacatatgggaaaaataagaggaagagattatatttcctggttgtggcaatataccgctccctatgcgggcaggattggtctgttgttattgtttgggctgttggagacttttgcctcgctggccatggtgcagatcaccaaggagatcattgatcatgccacagtgggaagcggtttcggacggctgcttacgggttatgtgctgctgttattgggaatgcagggaatctcggtgttgtcgacactgcttactgcactggtaacggagcggttttccttcgggatccgacggcagatctatgagaagatcctgcattctggctggcgggaagtgacggcctatcataccggtgatctcatgacaagactgaccagcgatgcgggaaatgtggcggacggtattgtggggacgatccccaatatcttacagctggggatcgagttggtactggtgttttgtatgttgttttattattccccgctccttgcggtgtttgccctgctggtggcaccggtggcagccctgtgctcctggtggctgggaaaacgcctgaaacggttacagcggaaagtgcaggagagtgagtcggaataccgttcctttttgcaggaaagtctggccaaccttctgatcgtaaaggcttttaccggagaggaccgggcggtggagcgcctgacaaagctacgggaggaacggttctactgggtataccgcaagaccggactgggaaccgccagttccacggtgatgtcactggcttttcagggaggatatctgacagcattttcctatggggcatggcagctgtcgagacaacagatcacctacggtactatgtcggtatttctgacactggtgaaccgggtacaggcgccgatcctgggactggcccagcagattccccggatcattgccctgttgacttccgccgggaggatcatggagttacagagaattcccggggagcaaagggcagccggagagatccgtggaggggagatcggagtggagcttcgaaatgtatacttcggatataccagggaaccggtgctgaaacgggtgaatctgaaaatctgtccgggagaatttgtcgccattgtaggagagtccggtatcggcaagacaacactgatccgcattctgatggcctttctggaaacgggagcgggaacggtggatttctacaatggcagcggacagaggcaggagaccggagctttcgtccggaagtttattgcctatgtcccccaggggaatactctgttcagcggaaccgtgagagaaaatctgcagatgggcagagaagatgcttcggaggaagaattgtgggcggccctgaaactggcttccggagaaaattttgtccggtcactgccggaggggctggataccgtcatcggggaaagagggcatggcctgtcggaaggacaggcgcagcggatcgccattgccagagcctttttgcggagagcaccgtttctgatcctggatgaggccacctcggcgctggatgaagctacggaggtcgctgtattgcaggggctccgggcattagaaccgagacccacctgcctgctgatcacccacaggaagggtgttttaaaatattgtgacagagaactttgcatccgggaagggagtgtgacggaagaatgcagtaccactactatctgtacggcatgagggtaacagcggatctggactttgtacagctggatccggtacgtttaccggaggatgacagggacttcggacgggaaaaggtccggatccgggcgatggacgaagaggaggaagcacagtttcggaaagaacacggagactgcgtctgcggaagttttttgggtacagaaaaaggctggttgtgtaatcgtacgctggccatgagtgtggagcggggacaggtgatccggtatcacatccggaagggaggagatcccggagcggtacgaacctatctgctgggctttggaatagcaatgctcagccttcagcagggaaaacttcccatccattgcagtgcgctggcaactccggaaggtggtgcgatcctgatcgccggagagagtggcgcgggcaagtccacactgacggcagaactgctgaaacgggggtatcgttttctggcagacgatatggcagtggtggacatttccggaaaagaaggggtgtgggtgtatccggcttttccttatatgaagctgtgcagggatgtggtgctgaggcagggatatcccccggaagaacttttgtatattgatgaaaaaaaggacaaatttctggtgccctgtaccggggtatttcaaagggaaaaggccagactggaacgatttgtttttctgggaatccgatggaaaaaagaggcggaagataagtccgggaagataaaagcagaaaaaatcacaggccccgacagcatgatcgtgtataaagacaatctgttcttaagacatctgtggaaaaaacaggatccgggaatggaaatctggcagaactgcctgaaaatagcggagcagataccggtcttttggataaggagaccggcagcaggtgattccactgccgaggtggcagcggaagtacacgcactgcgaaacgtcgtgtcagcttaagaactcttccggttcctcagaaggctgcgggggctgacagtcgccgccaccgggatggtgtccgggatgatgtcctcctccgccgggatgtccggggtaccagggaaaccatccacaggcggtctcggataccttcagttccatcagttcaggttgtgtccaatgcttcataagaattctcctttccatctgccttatgcagagatgtacacggggaaagtccctgtgtgactacagcatagggaacacaggggcggaagtaaagaaatgtatcatgattgtaagaattttgcaggaagtgtcacagaaaagatactgcctgcaccgggggcattttcgcaggacacggttccgccgtgacgttctgtgatcgtctttacaatggccagtcccagaccactgccggtggcagaaccgggagttctggcggaggagacggtgtaggtgcggttaaagatccgctcgaggtcctccggcggaatgccgggtccctcatcggtcacggagatccggagagaagtaaggtcagcggaaggcgcggcagacagagtgattttcgttccggctggagcatattttgcggcattgccgagcagattgtccagaatccgtatcagttttccgggatctgcaaaaagggtggcatggagatcctgcgatacagataaacagagaagatgaccggcatagtggctgtccggaagtgcggtatagaaatattcttccagaaaggccggggcatccagttcctgaaaggaaaaggcgtgggaaggatcctccagagtgaacaactcgtacatatcccggatcagatgttccagtgtcccagtccggtgatcgatcagggtgagggcaccttcgatatcctgtgcagacagagactgtccggaagtaagataatccacggcactgcggatggcagtgaggggagcccgcagatcatgggagagattggccagcatttccgtacgttcctgttgcaggtgctgcagggagcgattgctggcatttagctgcgcggtgatttccagcagcctgcgggacagttcttccacggtctcctgttcgagagagggagaacggaaagcggggcgggaattttgtgccatggtcagatacctcctt

SEQ ID NO: 5475 - DNA, 4107 bp, Unknown
  gut microbiota DNA sequence
agaacaaccgtctcaacatgcacagtcattccaaactggtccacgccccggaccttccggatctcatatccaccattgcagaggatcttcagatctctggcaagggtggcggagtcacagctgacgtatacgatgcgttcgggctgcatgcggagcatggtgtttaagcaggcatcatcgcatccttttcggggcggatctacgacaatcacatccggatggagcatttcatcggaagatgcctctgtagtcgccttttcgtagaattccggcaggacttcctctgctttgcccacgaaaaactcagcattttcaatatgatttctctttgcattctctctggcatcgtcgatggcctgggggatgatttccacaccgcatacctttttggctttgcccgccaggaagagagagatggttccgataccacagtagagatcccaaacagtctcttttccagtcagtcccgcatattccaacgccaggctgtaaagcttctcggtctgtacgggatttacctgatagaaggagagaggagagatcttgaaggttaatgcatccccggtataagggtaattttctttctgcatgtctcttacgtggatcgtatcctcaatggtgctctcaccccagaggttatggatctcggtacccatgattacattggttttctcggtattgatactgactgacacacttgtcatacctttgatttctgccagtgcagccagtaattctccctgattgggcaaaaactcgttggtattcttctgtacgcctgtggaaaaatatgacatttttgtcattttcttattaatgaccagacataccattaactgtccactggtaaagccctttcggatcaatacatgacgcaccagtcctttaccggtgacttcgtcgtaagcggtcactttgtttttccgcatataggagaggatggtttcgaggatctgctgattctcagaagcaccaagggcgcagtctgtattggcaatgatggtatgggtgcgtccggcatagaaaccggtgatgacattaccgtctctatcagttcctatggggtactgcgctttattacgatagtggaagggttcctccatgcctacaataggctgcatgcgttcatcaatgtattccgtatcgaatccaccgatccggatcagattgttgcggatcttctgttccttgaaatgcagctgctcggagtaggagagtgcctgcagctgacaaccaccgcactgtctgtgataatcgcatttcggttccacacgaaaaggagaaggctgcaacaccttctctaatctggcataagcatagtgctttttactttttataatttttgcttccacctgatcgccgatgacagcatctttgataaagagcgtaaaaccgtctaccttgccgattccttctccgtcactccccatatcctctatggtcaccgttacacgatcatttttcttatattccataaatatccttatgcctttccgtagcctacaaattttccggtacttcagtaccgtgtacttccagtatcgcttacatcagtccctcgtactttggtacactgtgcaggcacaaatttacgtgtgaaaaactttctcaagaaagtttctctgccagtttcccgatttcttctttgttctgcgcattcatagccgacttgatgcttacttttgtctccgtaaatgtcagatttttactcttttcaaacattcccagaatcaacttgcctgccatgggtgcccaggtgccgttctcaatgattgccaccttacgattctggtaattacgctcggtcagaccttcgataaaactgcgcatgcaggggaaaaggtctccattataagtaatacccgccagcaccagtctgtcataacggaaagcatcggcaacagcttttgccttatcgcatcttgccagatcgtacagtactgttttctgtcctttttcctgtaaaacatccgccagatactccgcagcatttctggtattgccatagacagaagcataagcaattaccactcccgattcttccggctgataagaagaccacttatcatatttttccagatagaatcccagattctccttaagtaccggaccgtgaagagagcagatggtctgaatgtccagtcctaccgcttttttcagaaccgcctgtacctggggaccatattttccgacaataccgatatagtagcggcgggcttcattcgcccattcttcctctacgtccaaagcaccgaatttaccgaaaccatctgccgcaaacagtattttctcggttgcttcataagtcatcataacctccggccaatgcaccatgggagcatagacaaaatgcaggctgtgctgtccaagctccaggactccgtcattcaccgcaacaatgcgttgttccgcaggtaatccctgttcggcgaaaaaagccgggaaaaactgttccatgaactggaatcccttagctgtagatactactgtggctttgggatattttttcagaaaagccggaatactggcggaatgatccggttccatatgctgtataacaagataatcgggcattttcccgtcaagaacctgttctacattgttcagccattcttccgtaaaaaatccatccaccgtatccataaccgcgattttctcatccaggatcacataggaattgtaagacattccattcggaaccttatactgtccctcgaacaaatccacctgatggtcgtttacacccacatattttacacatgtactgatctccatattcttcctctctttcctgtctgttcacagaatttatagtatttatcctgtcatttactccattctggtagcccgcagattagattcaaacaatctgttgtaacccagccagccactgttttcactgctattttccagaatttccttaaaggtctccatcttggcatcggtatcatctgcataattcagagccaccgcctcgatcagcgccggcaccttgggggagccgtattccagcttgccgtgatgtgccaaaatacaatgctgtaattctgccaggagattgtgcgggaatccgtcgatcttagcggcacgttccccaaccatctgagtgcccatcacgatatgtcccaataactgaccatcatcggtataatcgtttaccggaaatgcagaaatctcttttacttttccgatatcatggcacatagccgccgtcagaagcagatctctctgtaaaataggataagcagagcagtagtagtcacacagcttggtaacgcttaaagtatgctccagcagtccgcccacgaaaccgtgatgtacagtcttggctgcagaagagttgcagaatttcttcgcgaaatcagcatcgtcgataaacagatcctgcaacagctgatgtagataggtattcttaatacttccgatcagagtctttaattcattgtacatagtgtcgatgcctttggagctcaccggcagataatcggaaggattgtattctccctcacgacagacacggatacgcttcacgctgatctgtagctgcccctggaaattcgtcacatcaccgtatacctctatgtaatccagatcatcataatcaccgatgcccggattgttcggctcccatacctttgcatcgatagttccggtcttatcctgtaaaatcacactttcatagggtttaccgttcttggtaacagcctcctgtttatgtttgcacagataaatatcaaatactctgtcgccttcttttaactctttaatgaatttcatattgttgtccaaacctttctgtcaatctatttcaacaccgttaatgtgatgtcgaatttcatctctttatattcctgctgtgactgccgcataatcgtcagttctacactatctcccggtttcatactgagcagagagttcgtatactcgtcaaagctgatgatcacgcgttcaccgaatcctgtgatgacatctccctgctggattcccgccagcattgcaggagagtccatttctacctctgtaatataagctccgtaaggaaccccaagttctctgttagcttcctctgtgacatccacacccttaagacccagataggcgaatttt

SEQ ID NO: 5476 - DNA, 9917 bp, Unknown
  gut microbiota DNA sequence
atcagttacgggtacccgtagatatcaggtgggggtatcacaccatatccgggaggcaaatatgatagaagtaagcaatcttacaaaaaaatatggtgaccatattgccgtagatcatctctctttccgtgtggaaaagggacagatttacggctttcttggtccaaacggcgcaggtaaatccacgaccatgaacatcatcacgggttatctggcagccacggagggtactgtgacgatcgatggcaaagatgtccaaaaagatccggaggaggcaaagcgtgccatcggttatctgccggagcttccgccgctgtatgttgacatgactgtcagagaatacctggatttcgtggcagaactgaaaaaagtgccgaaaaaagagcggaagcagcagattgatgaggtcatggaaatgacacagatcaccgatatgcagcagcgtctgatcaggaatctgtcaaaaggttacaggcagagagtcggactggcgcaggcaatccttggctaccctgaggttatcattctggatgagcccacggtaggtctggatccgaaacagatcatcgagatccgtgatctgatccgcaagctgggggagaatcataccgtgatcctcagctcccatattctgtcggaggtcagtgcggtctgcgaccatattatgatcatagcccacggtaagctggtagccagtgattctccggagaatctgcagaagcttatgagtggttccatggaactggatctggaagtaaagggaagcatcgctgcggtgaagagtgcattgcaggagatctcacagatcgaccggatcgaagagaacacggaggcatccaaaaatattgcaaagctgaaagtgatctccaaagagaatgcagatatcagagagcaggtattttatgcactggcagatgcaaagctgcctattttagagatgacccatgcggagaagtctctggaagacatcttcctggaactgaccgaggatgtagcacccacacagccggagaagcacaaactattctcaaaaagaaaaaggccggaaatgtcagatgctgccgcacagcagacagaagcttcggaagaggaagcacagcccggagaagagaaaaaagaaactgtaactacaaaggaggcggaataatatgctagccatttataagagagaattgaaatcctatttccgttcctttatcggatttttatttattgcagtcactctgtttttcctgggactgtatttcagcgtttataacctgatgaacggatatccttattttgcgtatgtggtatccagcgttacctttctattcatgctgaccgtgccgatcctgactatgcgtattctggcggaggaaaagcggagcaagacggatcagctgatcctgacggcaccggtgtccgtaggcggcatcgttatgggaaaattcctggctttgttaactatatttgctattcccgtagcgatcatctgcttttacccgctgatcatggcgcagtacggcagtgttcccatgggagaggcctatctgtcgatcctggcatatttcctcttcgggatgaccgccattgccatcggcctgttcctgtcctccctgacggagagccaggtcattgcagcagtacttacttttttagtattgttcctgggatatatgatggattccatctgctccattatttccagcaccggcaatctgttgacaaagctgctacgttgctttgacctttatacaccattttccaacctgttaaatggcacactggatgtatcatctatcgtatattatgtatccgttacggcattggttctgttcctgacggtacagtccattcagaagcgccgttacagcatgtccgtgaaaaacttaagcttcagtgcttacagtaccggtatgatcgctgtagctgtagcgctggtagtagtcgttaatattatcatgggcgagatgccttccggttggacagctatcgacatgaccagccagaagctctattccctgacagatcagaccgtcgactatgtgaaaaatatgcaggatgatgtgacaatctatgtgttggtaaatcaggacaatcaggataccacattggggcagactttgcagagatacgatgatctgtcggatcatatcaccgtggaatatgtggatcccaccgttaacccgatgttctatacccagtacaccaccggcaacatcagcacgaacagcctgatcgtggtcagcgacaagcgcagcaaggtcattgattacaacgatgtgtatgagtcttcttatgattttgactattcgacgtacagttataacaccacgaccaccggttatgatggcgaaggacagctcaccagtgcgctggattatgtgttaaatgatgatatgcccaaggtatatatgacaacaggacataatgaactgagtttaagcaacacttttacatccgcactgaacaaggaaaatgtggattatgagaccgtgaatctgatggatctggatgctatccctgacgatgcggcctgtctgttcattaacggtgccaccagcgatttctcttccgatgataaggataaggtgatcgactatctgaacaacggtggaaaagtcatcctggtaaccggttataccgatgaggagacacccaatatagatgctatcttaagctacatgaatctgagcattgccaaaggactggtagtggagaatgattccaacggctactacagaagtccgtattatatactgccgacacagagctctgacagctatacctccggaacctacggaaaatatctgttcctgccgtattctcagggtatcattgtcccggaggaagtaagtactgacgagacagctaccggcgatattacctatgatgtattcctgagcacctccgacagctcttttgcaaaacaggatgttaacaatacacaggatttttcacagggtgaaaatgatgtgaatggtcccttcgcattaggtgttgaggcagtaaagactttggatgatggggatgcgacactggtcgtgtacggttgcgagcagctgttcacggatgatgcaaattctgttgtcagcggtgcgaacctgaccctgttcaccaatacgttcagtggaatggcagatcatgagacctcggtatccattccggtaaaaagctatgaggtctctaatctggtagtggattccgcacagattctgttgttggggctgctggttaccgtgattcttcccgtgggctgtatgatcgccggattcgtgatctggttccgcagacggaagaaataattgtgaaaggcgtgagtttatagatatgaaaaagaaacaaagacagatgattggaatgctgctggcactggtggtgctggcggcagcattcctgggcatccgccagtataataaaaatgcatcttctgcgacgtctaccaccgaggatacacaggagacggtgttggatgtgaactccgatgatattatcagcttccgctatgtatatgagggagagacctatgcctttgaaaaagaggatgaaacatggtactatgcggacgatcattccctgaatctgaaccaggagcgtatcaaggcgatgatcctgaaggtggcaccgttaaaggcagatcaggtgattgagaatgtgacggatatgtcacagtacggactggcggatccggagcgtaccattcagtacgagactgcagatcgcagcgtgatcattaatgtcggtaatctgaattccatgaccagccagtattacgttgcatttccctctgaaatgaaagtgtatgtcgtggccaccaacgtggtgacaggcttcaattatacactggaggatctggtggaggtggaggagaccgctgaagagacagaaagcatcgaaactacagatactacgataacggaaagcgagacaacggaaactgcgacggagaccgagaatgtcgaggctgaaaccgcagaaagtgaaacagtggcaacagaaactacggaaaccgtggaaaccaaataagtatcacaaataataaagactgcccctgcaaaagaggcagtcttcactattgttagggattctcaccacgaatgacaatgatgtcatttattttcaacatcgtatctttttgaggcagaatggacagatccccccgcagaatgaggaaaatcgtaacctgttctgcctcttccatttcttccacggatttgcccgcaaagcgtttatctacgaagatctcggcgatctcatgaatatctgccgctttaatattagagagactgcttttgcgctggtactgttccacgaaaccggcactgatgataccggtggggatagccacggcgcccacaccgagataagcaatacagatggccatgatccgccctagcgtggtgatgggatagatgtctccgtaaccaacggtgagtaatgtcgacatgctccaccagatcccactgaaagcattgcggaatacttccggctgggaatcatgctccacgctgtacatgcacagactgctggcgagcatcaggatcaggacgatgaacacggaggaaatgatctgattgcgtttttcatacaataccgtagtgatgacattgaaagaatcatatcgggcattcaggcggaacagatggaagatccttgccacccgcagcatccggaagatgaccatgccggacaggaagaaaaaaggtaaaattgtcagcaggtcgataatgccgtcgaaggagatcagaaaccgcagccgggagcggaactcgcttttatcaggatatagatagtctgcagtccagatccgcagaatatattccacacagaagatcagaatagtgataacctcgatcaagtgaaataccggaaataaaatagcaagctcatcaaaggtttgcagaaaagtcaccagaatatttgcacagataacgatagcaataaaaatatcaaagagccggctcagacggttacttttgtcaccgatctggatgatgttaaatacttttttcttcatgttgaatcctcaatgttttttggggcagcgcaagtaaatgcttgtgattccatcatacggagatggaagaggaaagtcaagaaatgcggtgacagaatccgtcaactttcttaaaaacagtcatatattatagtaaatccaaatacaatgaaaggatacaaaaatatatggctagatttacgaaccaggcacagcttcgctatggaaatgagattacaaactccaatatagcagtgggtgagatcacggaggtattgtcagcaaccaagacggcagtgcgggatacctacggacagaatgaaaatgtgacgtatgtgatcagcattgtgaactcaggaactacagcatttaacggaattacagtaacagataatctgggagagtatttgtttaataccagagaactgacacctctgacgtatattccggggaccgtaaaatactatgcaaacggaattttacaggcaacaccggctgtaacggcaggaccgcctctgacaatcacaggaattactgtgcctgcgggaggtaatgtgacacttacctatgaggctgaggtgaactcttatgcgccgctggcagcagaggcttccattacgaatacggcgacgattgccggggcaggagtcactcctgttactgtgaatgagacagtaaatgcggcaagcggaccgcttcttacgatcacaaagtccgtcagccccgtacctgtgacagagaatgggacattgacatatacgttcctgatacagaatctggggaatacggcagcagatgcagctaccggtgtcgtgatcacagatacctttaatcccgtattggagaatctgactgtgaattttaatggaactgcatgggcagagggaacaaactatacgtatgatacgactaccggattatttaccggaactgcaggaggtattaccgtacccgcagcgacttacacccaggatcccgttacgggagcgtggggaatcaaccccggtgtcagcacgctggtgatctccggaaccgtataagggctggcgccgtataaatctaaaataaaaagtcactggaagtacataaatgtcctcccagtgactttttattttatccttgcatggcttgtagcttagccaaagtatctctttaacagaccctcaaatgccttgccatgtctagcctcatcacgagccatctcatgaacggtgtcatggatagcatccaggttcagagccttggctctcttagccagatcaaacttacctgcggtagcaccgttctcggcatctactctcatctccagattcttcttggtggaatcggttacgacttcacctaacagctcagcgaattttgcagcatgctcagcttcttcgtaagcagccttctcccagtacagaccgatctcgggataaccttctctgtgagcaactcttgccattgccagatacataccaacctcagagcattcgccctggaagttcgcacgcagatcagcaatgatatcctcgggagcaccctttgctacacctactacatgctcagcagcccaggtcttgccttcctcctgcttggtgaacttggaagcgggagcgtgacagatggggcactctgcgggagccgcatcaccttcataaacataaccacatacctgacatacatactttgccataattttttctccttttctctaatgaaatgttttgttttcagttttctctttttgcgtgtgctttataagcacaaatatattatggaacgaagccagttttcattcagaaaactaggactccgtagcaaccctggtgcaggcaggacaagtgccgtagaaataagtgacatgtccccggatccgaccgtcaaatctctctccggcggcctccatgatggaatcaatactatccatgtccagatcaataacgcttccgcattccgtacacacgaaatgataatgttcggaagtatcggcatcaaaatggtcaacaccgtcaccgacccggagtcgtaagatttctcccatctctgacaaaagtgtcaaattacggtagacggtaccgagacttaagtttggatcctgctgcttcagattagaatagatcacatcagcggtagggtgatccttgcgtcccatgagaaaggatttgatcatttcccgttgtctgcttcgtttcagtgccatgataagcccctttctcaataatagtaatgattactgtttcttacaagcttattatacatgatgcgagaataatgtcaacagaaaaatgaaaaaattttgtttatatttttttaatgatattcctgcttcctttatacacagaaggtaggaatcatgctataatgagcgaaagcaaagtataaaacataaattaacatgcgcagacttttgttacaacgtgtacagaagtacacggcactaaagtcacggaaagtttgcagtttgctgaaaggcaagagtaatatgaaatttaaaaccagacttcgtgtaacatttataagtattatattacttccgctgttactgacgatcatggcgttcgtgatgattgctatttacctgatgaattattctcagggtctcagtttgacggatattgattattccatgatgtcggagaatttcagggaattcaccaacaccacggatcaggcgtattatgtgctgctggaccaggtgaaggaagacagcagcaggctggaagataaagaatatctggatcatatcaatgaggaggtatcgcggaagtctacttacattattgtaagaaaaggtgataagctgtattatgccggcaatgaagaagccgcacagcagatttttgaaaaactgcctgcctatggtgacgagaatctgtcggatgacagcggatatttctacaatgaactggagaagtatgtaaaacagattgatttcaccttccgggatggaacaccgggcagcgtatttatcgtcacgaaggtcaattcgctgatctcgagacatctgctgatcgatatgttcgtggcgatcattgtgatcctgatcttcaccagcctgatgctgacccagtggatccacaagggcgtatttgaacctatcaatgagctgaatgtggcaatgcgcaagatcaaggaaggcaactttgattatgttctggagacggatgccaagggggagatcggtgatctctaccgcaattacgaggatatgcgtctgcggctgaaggaatccacagaagagaacattcagcatgagaagcagaacaaagagctggtcagcaatatttcccatgatctgaagacccctatcacagccattaagggttatgtggaaggaatcatggacggcgtggcagacacgccggagaagatggacaaatacatcaagaccatctacaataaagccattgatatggatcgtctgatcaacgagctgaccacttattccggaattgataataaccggatcccgtacaatttccaccggatcaacgtagcagattacttcggcgactgtgtggaagaagtcggactggatctggagcagcgtggtatcaagctgaactattcgaatctggtatctcctgacacagttgtcattgcggatccggagcagatgaagaaggtcatcaataatattatcagtaacagcgtaaaatatatggacaagcctgacgggcatattgatatccgtattcttgacgaagtggattccatccgggtagagatcgaggacaacggcaagggaatcgcacagaaggatctgcagaagatcttcgagcggttctaccgcacggatgcttcccggaactcggcccagggcggcagtggcatcggattatccattgttaaaaaaattgttgaggatcatggcggttatgtatgggcgactgccaaagaaggggaaggaacctgtatgcattttgtattgagaaaatatatcgagctgcagccgggtggaaccaagtaatgaataaggaatgaaacagaattggcatgataaccgataatacaaggacattctgtaaatggaggataaataatgagtaagattttaattattgaagatgaagtagcaattgcagatcttgagaaggattatctggagctcagtgatttcaaggtcgatatctgcaataccggcgatgagggactgaagaccgcactggcaggcgattatgatctgatcattctggacctgatgctgcctggcatggacggcttcgaagtatgtaagaagatccgcgaggagaaaaatattcccattctcatggtatctgcgaagaaggacgacattgataagatccgcggcttagggctgggtgcggatgactatatgaccaaacctttcagccccagtgaactggtagcccgtgtgaaggcgcacatggcccgttatgagagactggtgggaactaaccagaagcagcagaatgatatcgtggagatccgtggtatccgtattgataagactgcaagacgtgtctatgtggacggtgtggagaagacgtttacgaccaaggaattcgatctgctgacgttcctggcggagcatccgaaccatgtatttaccaaagaggagctgttccgtgagatctgggatatggactccatcggtgatatcgctacggttaccgtgcatatcaagaagatccgtgagaaaattgaaaaagatactgcaaagcctcaatatatcgagaccatctggggtgttggatatcgttttaaggtataagggaagaaaaataagatcagaagaaaactcctatgatggatacagcaacaaactgtccccaataggagttttttatttaaaagtgtgttataatcataacattgcggattgcacccgtgaaatttgattagcgattccactgatgagataaagcatcggcggaatggagtgtgttatgaacagtaaaaaaataatacagttgtctacgacacagaagat

SEQ ID NO: 5477 - DNA, 9328 bp, Unknown
  gut microbiota DNA sequence
gccagacctcaggtgatcgcggcgaataagattgacgctatctatacggaggatggatccgatccggtagctgcaatccgggcagagtttgaaccgaagggcatcaaggtgttccctatgtctgcagtaaccggtcagggcgtaaaggaactgttatacgaagtgaacgatatgcttgctaacatcggagaagagaccactgtctttgcgcaggagtacttcccggagagtatgacaggatctgtggatgatgcttacaccgtaacctatgatgaagaagaggacgagtacgtagtagaaggacccaagatcgagaagatgctgggatacaccaatctggacagtgagaagggatttaccttcttccagaatttcctgaaggataccggtattttagaggaactggaagcactgggtatccaggagggcgatacggtacgcatgtacggtctgtcctttgattactataagtaagtttgtgaaaggaaaagatagattatgacaagcaaacagagagcttatttaatgagtctggccagcaatctgaatcccatttttcaggtgggtaaatccagcctgactccggaactcaccgcagctattggtgaatcctttaataataatgaactgatcaagatcggtgttctgaagaactgttttgacgaccccagagctattgcggagatggtggcggagcgtacccattcccaggtcgtacaggtgatcggcaagaagattgtattgtacaagcccgacaaggacaagccgaagatcgaactgcccagataaggttagagcatagccgacgagaaccaatcaagaatgataactgcgtgcaaagggatgaggaagcatgagcagaataggcattatgggtggcacctttaacccaatccacataggacatctgatgctggctgaacaggcgctggagtcggcacacttagaccagatctggatgataccgacgggctgttcttatctgaagacaaaagagggcattacggttctgcccgggacagaacgttatgacatggtacagcgtgctatcgcagataacgacagattccgctgcctggacattgagataaaacgtcccggaaattcctatagctatgagaccatggagcagctgcacagagaatatccggagcaccttttttatttcatctgtggggctgactgcctgtttaccatggaacaatggaaatgcgcaggccgcctgtttgctgcctgcgagattatagctgcggtacggggagatgcggatatgaagggaatgcaggagaagatcagtcagttggaggaacatttttctgcgaagatacagttgctctcttttcgaagaattgagatctcttcttcggaaatccgagcgagaagatccgaaggtctttctgtgcgctatcttgtgccggaaacagtgagggaatatatggaagaaaaggggctttacctggatgagtgatatcttaaaaaaactgaccaaagagatgcaaaaagtacaggatcccaagcgctttacccatacattgggggtagaatacacagcggcggcccttgccatgcgatatagtgaagatgtggagcgtgcacagatcgcgggactgcttcatgattgtgccaaatgcatggaaaatgataaactgttgtctgtctgcgaaaagtatcatcttccggcgacggatgtggaaacgcgcaatccctatcttttacatgccagagtgggaagctatctggcgaaaaaggaatataaaatcgaagatcctgagatcttaagtgcaattttatatcataccacagggcgtccgggtatgacacttctggagaagatcatttttaccgcagattatattgaaccggggagaaaacaggcaccgaaccttacccagatacgccacctggcatttacggatctggatgctgccgtgacgaagattttagaggatacgctggaatatctgaaatcgggggacggtgagatggatcccatgacagaagaaacctataactattataagaagaatggataaataaaatagaaagtgtgaggagttagcatgagtgaagaatccagaaaaatggcaaaactggccgtagaggcgctggaagataaaaaagcagaggatatcaaagtaatagacatcagtaaagtatctgtgatcgcagattattttattattgctggcggtaataattccagtcagattcaggcattgtgtgataatgtggaagagaaactgggaagagccggtttccctgccagacagaccgaaggctatgagacagccaactgggtactgttagactttggcgatgtgatcgtacatgtctttgacaaggaaaaccgtctgctctatgatctggaacgtatctggagagatggcgtacagattcccgtagaggaactttaagcttcgctgtctcccagatggagaaagaagctgatgagatagagtccgctgattcccaccaaaacatatacaattctggaaaaccaggacatgtcaccgaacaggaaggctacaagatcaaagcggaaaagcccgatcagcccccagttcactgcacctattatagctatggtgagagcggttccgtccaaatatttattacccataaaatctccttatcctgtctgtatgaaatttgctgctgcaaaatccatacagacatttttttgaagtttctatttaatgattgtttcatagatagtcttacccccaaaaataaaaaatatactacttttaaataaaaattaagctttgttgatctattttaatgtcaaaaaacatcaaattagaaaataaagtccattgacaaaggaaatagaagcgagtaatatacaaaaataacaattatacattgtatatttgtatacattgttaaaaaggaggaagatattatgaagaaattcaacaaggtgttaagtgttgttgtagcatctgccatggttatggctatggctggttgcggcaatacagacaatggttccgctgcaaccggtactaacgcagcaactgagagcacagcagctgacaacggtgcagcatccggcagtgtattcaagattggcggtatcggacctaccaccggtggcgcagcagtttacggactggctgtacagcatggtgcagagatcgcagtagaagagatcaatgcagcaggtggtatcaacggctatcaggtagagttcaagttccaggatgacgaggcagatgctgagaaatccgtaaatgcttataatgcattaaaggactggggcgcacaggtcctcgacggatctaccaccagtggagcatgtattgcggttaccgacaagaccaaagaagacaatatgttccagatcactccttccggatctgcagtagaatgtgttcagtatgataacaacttccgcgtatgcttctccgatcctaaccagggtcttgcatccgcacagtatattggtgagaatggtctggctgagaagattgctgttatttatgacagctccgatgtatattcttccggtatttatgagaagtttgtaaaggaagctgaaaaccagccctttgaagtagtagctgcggaagcatttactgctgataacaagacggatttctccgtacagttacagaaagcaaaggatgccggagcagacatggtattccttcctatttattatcaggaatccgcacttatccttacacaggcagctgctatgggttatgctcccaagtggttctcatgtgatggtatggatggtattctcggtggtgtagataattttgatgtatctctgaccgaaggcgttatgctgttaactcctttcgcagctgatgcaaccgatgatctgacccagtcttttgtaactaagtataaggaaaaatacggtgagactcccaaccagttcgcagcagacagctatgatgctatctatgtgatcaaggctgctatcgagaagagcggtgttactcctgatatgagtgtttctgatatttgtgatggtatgaaggctgccatgacagagatcactgtagatggtctgaccggtaacggcatgacctggaccgcagacggtgaggctaacaaggctcctaaggctgttgtgatcgagaatggtgcttacaaggctatgtaattttgctgataaagtttccaaagagggttaccgcagggtagccctctttgcttaatgtcagagactttgcaataatgggagagcagttgtttttcccggtatgttctgttatactttattttatatgataatttgtgcattcgcatgaatggaggtagttcacatgagttttatcagttatctgatcaacggtatcagccttggaagtgtctatgcgctgatcgcattaggctataccatggtatatggtattgccaaaatgctgaatttcgcacatggtgatgtcattatggtcggtgcatttattacttatacaatgtgcagtaccatgggactttctcctgtgatcggtgttctggcagctgttatcgcctgcaccctgttgggaatggctattgaaaaagtagcatacaagcctttaagaaaggcttcttctccgttagcggttctgatcaccgcaatcggtgtcagctatctgctgcagaatgtagctcttttgatctttggtgcaaatgccaaggcatttacttctgtagtatccgttcccgctgtgaagctggcagacggacagatcaatattaccggagagaccatcgttacgattgttacctgtctgatcattatggcaggtctgatgctttttatcaacaagaccaaagcaggacaggcaatgttagcagtatccgaggataagggggctgcacagctgatgggtatcaatgtggacggaaccattgcactgacttttgccatcggatccggactggccgctgtagcgggagttctgttatgttccgcatatccttccctgacaccgtacaccggttccatgcccggtattaaagctttcgtggcggctgtatttggcggaatcggatctatccccggtgctctggttggtggtatattgttggggattatcgaaatctttggtaaagcctatatttcttcccagatggctgatgctattgtatttgcagttttgatcgttgtgcttctggtaaaacctgccggactgtttggcaagaatattcaggaaaaagtataagggaagaggcaggtacataatatgaagaaattatcgaataagaaaataaataaaaccttccgggataatcttattacttacggaatggtgattgcagcttatgtcatcatgcagattctggtgtctgccggcagtgtgagcagcttgatccagggactattggttccgctgtgtacttatgcaattctggcggtatctctgaaccttaccgtaggtattctgggagaactgagccttggacatgcaggatttatgtgtatcggagcattcaccagcgcatttttctccaaagtaatggagaatagcgcaatgccttccggacttcgctttttctttgctattctgatcggtgcattttttgcaggtgtgttcggactgctgatcggtatccccgtacttcgtttgaagggtgactatctggcaatcgtaacactggcttttggcgaaatcattaagaatctggtaaatattatgtttgtaggccgggatgagaatggattccatatctcctttaccaataccatggatctgaacatgtcagaggacggagacgttattatcaaaggtgcacagggtatcaccggaacccctcatgattccagctttaccattggtattgtgttattgctgatcacattgtttattgtattgaacctgattcattccagagacggacgtgccatcatggcaattcgtgacaataccattgcggcggaatccgtaggaattcatattacaaagtataaactgatggcattctccatttctgcggcacttgcaggtgtagcaggcgtactgtatgcgcataatctgtccacactgacggcattacccaagaactttggatataacatgtctattatgatactggtattcgttgtactgggtggcatcggtaatattcgcggttccattattgcttctgtaatccttaccctgttaccggagttactgcgtggtctgaacgattatcgtatgctgatctattccatcgtactgatcgtaatgatgctgttcaactgggctccgaagtgtattgaatggagagaaaaagtggcagccagattcaagaagtctgtgaaaaaggaggctgaataatcatggcattattagaggcaaaaaatttaggcatttctttcggcggacttcgtgcggtagatgatttcaatattaagattgaaaaaggttccctgtacggactgatcggtcccaacggtgcaggtaagaccaccgtattcaaccttttgacaggtgtatataagcccacagagggtattattacgctggatggaaaggatgttaccggtaaaaagaccatcgaaatcaatcaggcaggaattgcaagaaccttccagaatattcgactgttcaaggatctgtctgtgatagacaatgtaaaagtaggtctgcataatcatatgagctacagcacggttaccggtattttacgtctgccgaaatattataaagtagaaaagcagatgacggaggaggccatggagcttctgaaggtattcggattggaagaggaagcggaaacactggcggacaatcttccctatggtaagcagagaaagttggagattgcgagagcactggctaccaagcccaagctccttctgttagatgagcctgctgcaggtatgaaccctaacgagacgctggaactgatggagaccatccgttttgtcagagagcattttgatatgacgatccttctgatcgagcatgatatgaaactggtaggcggaatctgtgaggaacttacggttctgaactttggccgtgtcctgtgtcagggcaagaccagtgatgtgctgaacaatccggaagtcatcaaggcttatctgggtgaataggaggacaacagctatggcaatgttagaagtaaatgatattaaagtatattacggcatgatacaggccataaagggtgtgtcctttcacgtagatgagggagaggtcattgcactgatcggagccaacggcgccggtaagacaacgatcctgcacaccgtatccggtctgctgacaccgaaggaaggaaccattacttttgaaggtcaggatctggtcaagattcccggacataagattgtatccatgggtatggcgcatgttccggagggaagacgtgttttcgcacagctttccgtattacagaatctgatgatgggtgcctacaccagaaaagataaagaagagatcacacagactctggagaccgtatttgaccgctttccccgtttgaaggaacgtcagaatcagatggcgggtaccttgagtggtggtgaacagcagatgctggccatgggtagagcattaatgtctcatcccaagattattttaatggatgagccgtccatgggactgtcccctatttttgtaaatgaaatttttgatattatccaggaagtaagcaagagcggtactacagttctgctggtagagcagaatgcgaagaaggcattgtccatcgcagacagagcttatgtattggagaccggtaagattgttctggaaggcaaggcaagcgaccttctgaataatgattccattaagaaagcatatctgggtgaataactcttgatttaagccgctgcgagtggaagcagcagagacagaaaggtatggtgatcgaaatgaataatgtagtcattaccattgcaagacagtatggaagcggcgggcgaaccattggtgagatgttggcgaagaagctgaatgttcattactatgacaaggagctgatgaagctggcaagtgatgacagtggcatcaatgaagcgctgttcgtaaatgcagatgaaaaagtgaagagcacgaagctgttccatattgcgaaaaaggagtatcacggggaactgattcctccggaaagtgatgattttacctccacggacaatctgtttaactatcaggcgaagatcatccgggatctggcaaaggaggaatcctgtgtcattatcggacggtgtgcggattatgtgttgaaggattatccgaatgtcctcagcgtatttattcatgccccgaaggaatattgtctggaaggcgcagcgaagaagcatagcatgagcccgaaggaattggagcgctttatcaataagacggataagcaccgtgcggagtactataagtatcataccggacgggaatggacagatgcaagaaattacgatctgtgtctggacagctccaagctgggatatgaaagatgtgtggatgagatcatttcttatatgaaagtaagattcccggagaactaaatgtaaaatatagttaaaaacagcctgcagctaatcatgctacaggctgttttgcttatctgtaaaagcggaatacgccgaacacggtgccaaggatctgacagtcatctacaatgataggatccatggtatcattctccggctggagacggatatgtcccttctccttatagaaagtcttgacggtagcggaatcatcgatcagggccacaacgatctctccgttattcgccgtgttctggacatgaacgaagacacggtcaccgttgaaaataccggcattgatcatggactctccgcggacattcagaatgaaggattcacccttgggtactacatcggcgggaacagggaagtagtcctgaacgttctcttcggccagaataggctgcccggcagcaacattaccgatcacggggaggctgaccatctcggtacgcaccatctggaagctgtcgtcgcagatctcaatggcacggggcttggtcgggtctctgcggatgtagccgttcttctccagagtctctaaatgagaatgcacggaagaagtagactttagattcactgtctcacagatctcacgaacggtagggggatagcctctcttcaaaatctcatctttgatataatctaatatttcctgctgcttggcagtaatctttccatagcccataaatgacctccgtaaaacatctgttcttactgatttatataacgattatagcatagcaaaaagtaaaaagcaaacatatattccaaaaatatgttcgatttttaacttgacgggtcttcgacacttgctcaaccctaaaatccctacaagccgcagaaatgcggtattttttgtcaaattctcttaaattatagaaagaaaacattctccttcag

SEQ ID NO: 5478 - DNA, 7062 bp, Unknown
  gut microbiota DNA sequence
ggcggcgcgttctgcatcatttttctcaagcatttccttcgcctcatcgtgggaaagactttccttcttcatgatacgttcgatacgatcttccttatctgcgcacacatacacgttaaatacattcggctgatccttcaggatctcagatgcgcagcgtcccagaataatacagggatgttccgccaaccccttaataacctccgcttccgtagcataactgtcaccattcagctcatgctctatgtacgccttatcatacaccggcacccccagcttctcagacaactcctgtgcgatcagactggctcctgttccgaatcttcggctgatagtaattacaaggttcatcgtaagcacctcctttgtaaggtactctcattttatgataaaggtgcggactttgcaagagggatgtctacaaaagcttctgctcgatctgatacagtttctcacctgtcacccgcatgctgtgttcctccgccagtgccctgcctgcccggattctgcgtcttactttttccagcggttcttcatacaagatgtctcggactgcctgctcgtaggaatccagattgctggctttgcgcacctgctcgccgtcggtaagccacccttcatacaccggaatgtctctcacgatcacaggaatctcacaggataatgcctccaataccacgattccttccgtctcttcataactgaaaaaagcaaatgcatccgcaccacagtacgcatcccgcaggatcccggacggttggaaaccggcaaagatcacattttccggcttctctgccacagcccttttgatctctgccggaatcaatgcattgttcccgcccccaaaccatagaaaaataatgtctggcatcctttttgccatttccagaaaatcctcgattccttttctgtgaatcagatgcccggcggatatcacgacctttttatccacaggaagatgaaaaaatatccggaatcgtccacctgcctgctctgttttgtggaaaaattcagtgtccacaccattggtcagtgcgtaaatctcccgatgcagatcatatttcattaacaattcccgggagtattccgttggtgtgataaccacatctccctgtctataacaatggcggatccattttttgaataaaggagccgccagattggaaccggtaaaagaattcttaaaatcttccatagtggaatgcccataatagacgacctttttcccctgccgtcttgcccgccgtgccaccagcggcgaatcaggcaatacggtattgatctgtacgatatccgcctctttccagacgtccgtcacggtcacttttgctgctcgcagcatcttctcctgatggcgtatggcgctgccaacgccgctttttgccaccagtgaaagtccgcctttatatatataaattttcataagtatactctcctataataggtggaaaatcacctggaacagtgtcgtcagtcccagactatacagcgcaatggagaaaggctttcccaaaaagatgactgtcacaaactgtttccatgtcatattcgtcgttccggcgagataacagagaaaatcatccggtgccaccggcagaaagattgccagtgtaaataatttcaaaaatctcccctttagctccgtccatgtcaggtatttttcaatcattttcccgggaaacatcttgtacagcaccgatcttcccagacttcttgctattccaaaagcaatacaggaacccacacagattcctatataattatagaaaaatcccggcaccgctccaaagagcagcactcctgccagacagctgatgccacccggtatgatgggaaacaccacctgaacgatctggatcagcacgaagatcagtgcaccgatcattccgaaacggttcacaaactgctgcatagtctccaccgattggaaaatgccgctctgatagctccagactgccagtattccacagaggatcagactaacccaggatgcaatattgacggctctttgccaagcgtttttctctttcgacctgtttttcttcgatctgtcgctggtatagttgttccatgcttcccgcaaatcttttttgggaaaatatttctgcggactgttttgcataactgcacattcctctgcgttcatcgtcttctttctccttccagttcttcaggtctttcaagaattcctcctcggtccggtactgccagccgtttttgtcctcttccacaaccgcccgcaggcattgatcccttctgcataataacggtaatcctgctgccagtgcttccgcataggtaagcccctgggtctcactggtggaagcgctgacgaacagatctcctgccggataataagatgctacttcagcgggtgataccattccggtaaaaataacgctttccgtcacacccagttctgctgcctttttccgtaaagtctccaaataaggaccgccgcctacaatcatcagtattgtgccgctctcctgaattttctgctggtactccagcaattcttccacattcttctcttttgccagacgacctacatataaaagcactgtggtcttccggtccattttatattttcttcggattctctcccgagaatccgtccgggtctgcgcgtcatatttactcagatcaatccccgatgggatcactgataccggacaatgaatgccatagccttttagtaatgtctctatttttgtgctgggagcgatcatactgtccaccttctcggagatctgtcgcgtcaggaactgtaccatatccctgccccatttcttgtaatgggaaaaatagtgggtataatcttcgtatacagtatggtaagtatgcaccagaggggtcttacattcctctgcgatcttttttgccatgaaaaaggtagaaaattcacactgggaatgcacaatatccggattccactctataatcccgcgatacagttcgcgtcccggggacacccgaagtcttgctcccggataaatatatccggcattcacggaacccatatagatcacaccctcttcttcgtaggaatgagctgtacgggacagggtcaggatcttcacttcatgtcctctttgctgtaattcctcccgcagattgcataccgaagtaacaactccgttgatggccggcttgtaccagtctgttgtgatcaatactttcatcttttttctcccttccgtttattttctctgaattgatctcagcataacagacacaggtaaattccatccgaataaaatcaaaagttttcctaaagtttctgtgagttttttccaaaatgtgcactaaaaaacagcattctccggaaatttccggaaaacgccgtttttaatcgtctttctataaaattattatctttcttctctgaagtacgccagtcccagacttgcggggggctgattctctctcttgctccgcatactggtgatgaccagtaccagtaaggtcacgacataagggatcatcttatacagctcctgatactccatatgctcgataccggtgggcagatacagatacagaatatacagaccaccaaacaggaaagaagcaaatacactgatattcggtctccagatagtgaagatgaccagcgcaatggcaagccagcctctgtcaccgaacgcatcgttggaccagacgccgcaggcataatccattacatagtacagtccgcccagacctgcgatcatacatcccacgcaggtagcgatgtatttgtaccgggatacgttgataccggctgcatctgcggtattggggccctcaccgactgctcttaagtgcaggcctgttctggtatgactcaggacatacgatgccgcaaacgcaatgatcactgccagataagccaggaatccataggataaaaacagcttaccaaaccagccaagttttcccgcaaaaggaagggacttactgaaataactgctggtagcagacagtgcaatggaaggtacatcactgtttaccagcttgatcagggatccgccgaagaagttaccgaagccaacaccgaaggtggtcattgccagaccggtcacgttctggttcgcccgcagcgtaacggtcaggaaacagtacagcagtcccatcagcagggaacccagcagacagcaaagcataggaatcgcaatagcgaggaatccgttcatatttgccgcaccgcctgctgatctctcatagaagaaggagccaatgacaccgcagatacctcccacatacataacgccggggattcccagattcaggttaccggatttctccgtgatgatctcaccggtacttccgtataacagaggaattccctgtacaatagctctcggaataaatgcaagtaaaaatgtccacatgattactgttcctccttttctgcctttttacggaactgcaggcgataggtaatgaagaactcacagccgataataaagaacaggataatacctgtcagaatatcggagtaggaatgattcagtccaaaattggtagagatctcactggcaccacgatccatgaaaatgatcaggaagctggagaacaccatggtcagaggattgaacttggacatccaggataccagtacagcagtaaatccctgtccacctgcaatggtagtggtaacagtatggttgataccgcctaccagaagcaaacctaccagtccgcacagcgcaccggacagaagcatagtacggatgattaccttttctaccttgatacccacatattttgcggtattttcactctcacccacaacggagatctcatatccctgcttgctatagttgagatacacatacatgaaaattgtaatcactactgccactacaatacttaacagatactttgaaccaaatatctggggcagccagcccacgttggtattctggttgatgataccgatcttaccggatcccttgggaacttcccatacaatggtatagaatgccacaagctgggtagctatgtagttcatcatcagtgtagacagtgtctcattggtattccattttgccttgaaaaatgcaggaatgaagccccagatggctcctgctgccaggctggccacgatcatgcacaggatcacaactgcacccggaagcttgtcccccaggcagatcatgcaggccgcggatgccagacccccgatcaagacctgtccctcaccgccaatattccagaatttcatcttgaatgccggagtcagtgccagtgcaattaacaacaggatcgcaatattctgaaaagtaacccaggtcttacggacggatccgaaagctcccagaataatagactgatatacctgtaaaggattgattcccgtggtgatcgtcgtaatgataccgcacaggatcaacgccaacagaatcgctacgaaacggatacccagagatttataccaggggagagcatctctttttacgatatgaaacaaaggctctttattcttctccttcatgttctttgcctcctactctggtcatcagcataccgacctcatttttatctgtctttctcgcatcgaggataccgctgacttctccgccgcacagcaccatgatacggtcggacagctccatcagcacatccagatcctcaccgacgaagattacggcaacgccctttttcttctgctcattgatcagatcatatatggtataggaagaattgatatccaatccacgcaccgcataagctgtcagcaatacggtaggtgcggatgcgatctctcttcctacgagaaccttctgtacattacctccagacagtcggcgcaccggtgtggtaataccaggagtcacgacttccagattctctacaacatcctccgccagctgtttggagggtttgcggttggtaaacggcgtatgtcccttacggaaggaacgtaacatcatattgtctgtcaggtccatattgcccaccagacccatgccgagacgatcttccggcacgaaggaaagtgaaacacccatctctgcgatcttcaacggatccttgccaatcagcatttccttgctgccatcgtcctctacataatgaatcgtaccggtctccaccacttgtaatccggcgatagcttccagaagttccttctgtccgcagccggagataccggcgattcccagaatctcaccgctgttggcggtaaaggacacatcctttaacttgacgattccttcttcattacgaaccgtcagtccctctacctcgatacggggcttgggattcacaggctccggtctctcgatattcagtgtcacagcatggcctaccatcatattggtcatttcggtgacagtggtatccttcgtcagcatactgccgatgtactggccgtttctgagtacagccactctgtcggacagagattcgacttcatgcattttatgggtaatgatgacgatagccttgccgtcatctctcattttccggaggacgttgaacagcttctcggtctcctgcggtgtcagtacggcggtaggctcatccaggatcagaatatccgcaccacggtacagtacctttacgatctctaccgtctgcttctgggatacggacatatcatagatcttctgcttcgggtccacttcaaaaccgtatttattgcagatctcctcgattttacgggaagcttctttaatgttcagtctaccttccagacccagaataatattctcggtggcagacagtacatcgatcagcttgaaatgctgatgcaccataccgattcccaaccgcaatgcatccttgggagatctgatgacctcttccttaccgttaataaagatctgcccctcatccggaaaataaataccggagagcatattcatcagtgtcgtcttaccgctgccgttttctccaagcagtgataagatctcacctttgtagatatccagattcaccttgtcattggcgatcacggatccaaaagtcttggtaatgtttttcattgaaaccgcagctacttttgtctctttttccatcctctgtcacctttccactttacccatgacctgcaaaattttaggcgcttta

SEQ ID NO: 5479 - DNA, 2057 bp, Unknown
  gut microbiota DNA sequence
ggatcatccaatgccgattctataaaagcaatctgatataaaatatcttcccgcaggctgcgaatcttgtccgaaagtcttcccttcaactggctgaccgaagaagaaagcgcatattcgttctgggaatggatcacgtcaataaccgcttccgcccgggataaatcaattctgccgtttagaaaagctctcttggtgaattcacccggttctgccagtctggcaccggcctgcagcactgtctccaatactttctgcatcaccaacacaccaccatgacagttgatttccaccgtgtcttccatcgtatagctttttggtgctttcattacagaggtcataacctcatcaatgatattctcatctttatcaacaatatatccataatggatcatatgactctgtacctttgtcagaatctttttcccggatgcggaacggaaaatactatctactatatatatggcattttcaccactgattcttacaattccgattccggaatctgatagagccgtggcaatggctgctattgtttccttttcataattttccatactgtttctaatgcctttccatgaactgccaacatctatttagcatcaaacactcttcctgtaggaaccagcgtcgattcgtctcccgcataaccagtctgtacatactccaccatatgatcttctcccagatatttatagagaagatatctgcgctctctctgatcaccttctttgtatgcaaagcaatcatcagacgctgcgccatccattaatttataataggcctctaccagatcctcataagagatcggtgctccggatacttgtaaatcatgactttcattcaatccctttacaaataaaataggatgctgtctgccggtttcgttctcgtttttttgagctacttttactgcttcaccttctatgttatatccatgatccgatagtatgataatgacagaattatcataaactcccgcttctcttagtttattcagataagccatagtaacagtcatagaagattcaatagaagtataataatctgcatcatctattacgtttacatccttatcaaaatagaacggaacatgtgcccccattaaatgaattaatttaaatctttttccatctacataggttatatcatcttcctgtacatccttataaaaatcatcatttctccaggaaaataactcttcatctttggaacccatttcctgatttttgagcatacttacattaaaccagcaatacggttttaatacataaggtgcgtatttcattcccaccattttaataattctggtattaaacaaagaacgatcccaaagagaagatttcgtatatgtgatattattaaaagcaccatccatgacgcctttttcaaatttatattcgtcatcataattacttaaagtataaccctgctcacgcaaataattaaaaaaaggagaactcttaaaaattcgatttctataatctataaaaggttctttattttcaaaccattctccagaaagtattaacggtaaagaatgctccgtgtatgcataccctgacattgcgttattataaaaagtaaaatcagtcattgcatcttcatattccggatgttcctgccacacttgccagaagcattcttcatccacagcatctaataagaaaataataaaattagtatctgtagacatttcaaactgatctacttttgtaaatcttgcatattcttttttttcaaaaatattattattaatagaaagaactgtaatcgtacttactaaaatcaataataagaaaacacttatataagaaaccgccttttttatcctgtcatattttaagactataaataaaatcagacaaacaattgctatgatcacccacacaatagtagattttacaaactgtgattgatataaactccaattcacatctgttccatctaaaggaggtaaatttttaaccatatagtttccctgaatataacaggcaacagtaccggtaaaatagcaatataaaacaattttataagcaacatttccaaacagatat

SEQ ID NO: 5480 - DNA, 2540 bp, Unknown
  gut microbiota DNA sequence
aaaactcaaattaaattcactacaattatttttctccggtagcttcctgatatgcactgttcgctaccactgaccatccggtcttatcccccgcaatgacctgcagatcttcactgcggaccgcataaaactccacgatctgtgctgcctctgtggacagattctcttccggattccggtacagcacgaaaatctcacattttccgttctgcgaggtacgattgtagaccagcgtgtatgcataggtctttcccgcctgctcctgttctcccagctgcagatagaaattgcctttggcattgtagcagacttcgaaggaaaagccctgttgttgcagcacagcatcatatactgcctgtgcgtaaggctctaagggatcctgtacatcttccgcgttttccgtctccgacgcatagtattccgcaagccactgttcttccatcgcctgctttgctaccgtttctgcatcctccgggtgggtattttcttccttgtccatcaattccgtcagataagtaatgtaatcctcaccggcaagctccgtctctctccgaaacagcacgccctctggacgccagtaggaataccagtgcctgtccgggaactccatctcttccacactgatcagattctctgtgagccgcgtctccgaagggatgtcattttcaaaccaaatccaggcaattccggcaaacgtgacgatcaggcacagcactgcccacaaagcaatgccgatatcctccagccactcccatttcccgggagttccccacttgtcccgtattttccggtgcagcctgatgggtactctcagatatacataaaacaggagaagcagcagacacagcagatcccccagtaacaacacataactgcgaaaacttacgggaccaccccacagaatcattctggctgccacatatattcctgccagagtaagcagtaaaaccgtaactgccaaatatatcttctttttcatcgttttccgcactcaggctttcttgcgctcgtactttaagaactgataggtaatgtcaaaatagacctgctcgtcactgtctgcggtaatctcccactcaggatcactgtccagatccgggaaataggcatccgcctcgtaggcatggtcaatcttcgtcacatgggccacgtcacagtaaggcagcatctggcggtaaatactctctccgccgatgatatagatattctcttcgtcatatttcttcagttcttccagcaattcttcaatagagtgtaccacgatcgcatccttgacctgataattcggatctttggacaaaataatgttgatgcggttctttaaaggcatgccctgcgggaaagtctccaaagtcttgcgtcccagaaccactaccttacctgtcgtctcttcgcggaaatgcttgtgatcgttggggatgcggatcagcagttcgttcttgctgccgatggcccagttgttgtctactgctacaattaaattcatggtgtacctcgtttctgtttgtttctatgataataaccggtttctccgttcttcgcactcacgaaaccgtactgatattcgtattccgggctaccgccctacttactcatgtcagattgcaatcggaatatccctgatctgctccccggtctggtaaccctccagcttcacatcatccggtgtgaactgatagaagtccctgatctccgggttcagccagaacttcggcgccgggaaggggtctctgctgatgagctccttaatggcatccacgtggcggtcatagatatgggcatccgcaatgacatgcaccagctcgcccacgttcatatcgcagacctgtgccagcatatgcaccagcaccgcatactgtaccacattccagttgttggctgccagtacgtcctgggaacgctggtttaaaatggcattcagggtcagcctgtcctctccctttttctgcgtcacattaaaggtcataccgtaagcacagggatacagattcatctcgtgcagatcctgatgcacatagatattggtcatgatccggcggctgaagggattgttcttcagatcgtagatcacgcggtccacctgatccatcatgccttccttatactgatgcttcacctgcatctgatagccgtatgccttaccgatcgagccgttttcatctgcccactcatcccagacgtggctgtttaaatcatgaatgttgttggacttgcgctgccagatccacagcatctcatctgtggcggattttaatgccgtccggcgcaaggtcaggatcgggaactccttcgacagatcgtaccggttcactactccgaatttcttaatagtgtaggcaggggtaccatccggccagtgggggcgcactttctcgccctccgtgctggtaccgttggttaaaatgtcattgcacatatcgataaaaatatgatccgctaaactcatgttgtctccttattctgattccaatataatatataaacgatttctccgtgcttcgcactctcgaaatcgtccccccttcgtattccggactatc

SEQ ID NO: 5481 - DNA, 5311 bp, Unknown
  gut microbiota DNA sequence
attgtgtttggcataactatcacccgtaccgcaaaagcagaccgcgaggataccccggatccggatgcctttgacatgacctttaccgtcagcggcaacgatctggcggcgcagatcaccacagatcgcactgacgtggagttcagatttgatggaacggactgggggcagaccaaatccaccggagtcggtcacaacgggaaggtgactgcacagatccgctatgcggaaaccgatgattataacgcaagccccgccgtatcgaagacatggaactccggtcacggcccgctgaaccgccacgaccgggtggaacccacctgtcaggcagagggcagcatcgaatactggacctgcgacgtctgcggactgtattttgcatccgcagacggaagcaagagcataacagcgacagagatcgttcttccgaagacggatcatagctgggcagaaggatatctgtccgatatgaccggacactggcataagtgtggtgtctgtggaatcaccagcaatacggaaaagcatgcatccggtggcgcggccaccacagaacgggcggagatctgtacgatctgcggttatgagatcgcaccgaagaagcctgctgccagtaacgacgatgacgatgatgacgacgatgacagcagtcaggcgtccaatacggaccagaaggccacggacgcggcaacacctcccgcagccacgacaacgcccgccacacccggtgtggtaaagccttctgtaattcccgtgcccccgacaacacctgctgcggacgaaaaccgtaaggaagatgcggcaaagccctccggggaggcacaggacacgcaggaatcgagtggagaagcaccgcaggaggagcggatagattccatgaccgcccagacttccggctctcaggaatccggcacagagcagataacggagacctccggtaagggaacgaacgcaggccgcgtggcggcagcggcagcagccggagccgtagtggtcggcggtggcggcgcagctgtctacgtgaccatgatcaaaggaaagtttaaattcaaataacgtatgataagatgataagcgaacctcagaggcccggtgcttctgaggtttgttttgccataggggagaaatctgccggaaattacaacaaactattttcagatgaaaataaatgtattaaaatagaaataagtattggcagaacgaagacagttttgcatagttacagcaaacgcaagagaaaataatgaaatatagaaaacggaggatcctacgatgaagagaatcggaatgttgacgagcggtggtgactgccaggcattaaatgctgccatgagaggtgtggtgaagaccctggcgaacagtaaggaagaggtcgagatctatggcttcctcgatggctacagaggactgatttacggtaatttccgcatgctgacagacaaggatttctccggcatccttaccaagggcggcacgatcctgggaacctcccgtacccccttcaagacgatccaggatccggatcccaacggactgaataaagtcgaagccatgaagcagaattattataagctgcagttggactgcctggtaattctcggtggtaacggcacccacaagactgcgaacctgttgcgcaaggaaggactgaatatcgtgaccctgcccaagaccatcgacaatgacctgtggggcaccgatatgaccttcggtttccagagtgcggtggatattgcaacggatgccatcgactgcatccataccacagcagcttcccacggcagagtatttatcgtggaagttatgggacataaagtagggtggctgaccctgaatgccggaatggcaggcggtgcggacatcatcctgctcccggagatcccttatgatatcgataaggtgatcgagaagatcgaagacagggacaaaaagggctgccgttttaccattatcgctgtggctgagggtgcgatttccagggaagatgctgccctgaccaaaaaagactacaagaaaaagatggaaaaatatccgttcccttccgtatcttacgaagtggctgcacagatccaggagaagaccggcagagaagtacgtgtcaccgtacccggccatatgcagagaggcggaagcccctgcccttatgacagagtattcgccagccgtctgggctccgaggcaggcaagctgatcttggacaatcagtacggtttcatggtaggttacaagaaccgtgagatcgtaagggttccgttagaggatgtagcgggcaagttaaagaccgtggatcccgatgctaccatcgtacaggaagcgaagctgctgggcatctgcttcggcgattaagacagaaaatgaatgagtaactattttcgccaagcatctgctaatatttgatggctctgaatagttacaaggaagagagaaaaaacatgtcatatacagcactataccggaaattccgcccggacgctttttccgatgtcaagggtcaggagcatatcgtgacgacattgaagaatcagctgcgggcgaaccggaccggccatgcgtacctgtttaccggaacaagaggtaccggtaagaccacggtggcaaagatttttgcgaaaacagtgaactgcgaacaccccacagaggacggcccctgtggggaatgccgtatttgtaaggcaatcgcagcaggagccagcatgaatgtcatcgagatcgatgcggcttccaacaacggtgtggacaatatccgtgagatcatcgacgaggtatcctattctcccgcggagggaaaatacaaggtctacatcatcgacgaggtgcatatgctctcccccggagctttcaacgcattgttaaaaacgctggaagagccgccctcttatgttatttttattctggcgaccacagaggtgcacaagatccccattacgatcctgtcccgctgccagagatatgattttaaacgaatctccattgataccatcacggatcgtatgaaggaactgatggacaccgagcaggtacaggtggaggacagagctctgcgctacattgcgaaagtagcggacggttctatgcgagatgccttgagcctgttggatcagtgtattgccttccatctgggcaaagaactgacctacgatatgaccctggatgtgctgggggcagtggatacagaagtgttcagcagattgctgcgctttgttatggaccggaatgtgttaggctgcattgaactgttggaagagatcgtcatgcagggcagggagctggtacagtttgtcacggactttacctggtatctgcggaatctgatgttggtacagacagcggataatctggaggatgtcatagacatgtctacggacaatctggcgaatctgaaggaagaagcttccatgctgtccatggaccagatcatccgctatattcatattttctccgaactgtccggccagatccgctatgcggcacagaagcgtattctggtagagatcgcgctgatcaagctgtgcaagccggagatggagacggatcaggaggcggtcctggatagaatccgccaggtggaggaaaaggtcgagaacggtattgtagtcacggcggcccagatgcctgccggagctcccggagcacagggagtgccgcaggccggtgtggcaaagccgaagccacagttgccgaaggcggtccccgaggatatccaggagatcgtacggaaatggccggccatcgtgggaaatgccgagaatcccatgaagatgtatctgaaaaacgcccgattaagtctgggtggagacaacaagctcatggtggtgttggaggacggactggcttccgattatttcaaaggagaagctcacgagcagaacaagcagcagctggaaatgctgttgtccgatttttccagcaaagagattgaagtgacgatccagacggtggaaagcagcagagaattcgaagataactatgtggatctcagtaaggtcatcaacatggagatcgatgaggaagagtgatcctgcgtgaatttgggattgcggcagacttgcagataaggtaagatagaataataactcaattataaataatatggaggaaacagcaacatggcaaaaagaggtggatttcccggaggcgcaatgcccggaaatatgaataatctgatgaagcaggcacagagaatgcagcgtcagatggaagaaggacagaaggaactggagaccaaggagttctccgcatccgcgggtggaggagctgtggaagtgaccatcaacggtaaaaaagagatcacatccatcaagctggcagaggagatcgtggatcccgaggatatcgagactctgcaggatgctatcgtggcagcagccaacgaagcactgcgcaaggcggatgaagccaatgcagaacttatgggcaaaatgaccggaggattaggaggatttcctttctaatggaactctacagcggacagatcaataaattaatagaagaactggcagcccttccggggattggcagtaagtccgcacaacgactggcttttcacctgatcaatatgccgaaggaccgtgtggacagactggcaaacgtcatgatcgaagccagagccaatgtccgctattgcaaggaatgctatactctgacggataaggaactctgcccggtgtgtgcgaatcccagacgggatcatcgtaccattatggtggtggagaacaccagagatctggcggcttatgagaagaccggcaaatatgagggcgtgtaccatgtactgcatggtgccatttccccgatgctgggtgtgggacccggtgacatcaagctgaaggaactgatggaacgcctgcagggtgatgtggaggaggtcattatcgcaaccaattccagcctggaaggtgagaccacggcaatgtatatcagcaagcttatcaagcccacaggaatcaaggtgaccagaattgccagtggtgtccctgtaggaggagatctggaatatattgatgaggtaacattactccgcgctttagagggcagagtggaattatagacagtatgcatgaaataaaaatggataaaagtgggagggaaagacaatggcagtaacaaaaagtttatttgggaaaagcccggaagggaaagagatctcgctgtataccctgagtaatagtaagggtatgaaggcagcggtgacagatctgggcgctactctggtgcgcgtactggtgccggatgctacaggcaaggtggatgatctggtgttggggtttgatgacggcgagagttattacggaaacggcagctttttcggaac

SEQ ID NO: 5482 - DNA, 11100 bp, Unknown
  gut microbiota DNA sequence
gattttgttaccagggaagatttcgactgggctgtcaggaaagctacggcaaagaaaaaacaggatttttctaaggttgagtttttttcctatgaggagggcttatgtgtacagtgtatgcatatcggagcgtatgacgatgagcctgctacggtagatgcaatgcacagatttatggaagaacagggatacacattggatataacggatcggagaatgcaccacgagatttatctgagcgatgcgaggaaggtagcgccggagaagctgaagactgtaatcaggcatccgataaagagagcctaagggtatggaggaaaataatatggcatcaacaaaagagtatttggattttgttatggaacaattatcaggactggatgaactcagcagccgggcaatgatgggcacatacatcctttattaccgtggaaggatttttggtgggatatatgatgacagacttttggtgaagccggtcccgatggcattgaggttgatgccagatgccgagatggaactaccttataatggtgctaaagaaatgattttggttgataatgtggatgatcggcagtttttgtgtgaactggttgagagtatgtgggaagaattgccgatgaaaaaatctaaaaagaaaaaaggtatctgatatttattattgaacttataattttatcagttataacttataaaatggtaatttaatgattgagattcagatataaaaaagttcgaagaacttttgttttcgaacttttttatatttatattgaatatatgattaccatggtataatatatattcacaaaaatgaaatttataagaatgaaatacagggggaaatggaatgactatcagtgaaagaatattaaaggtattaaaagacagaaatatgacgcaggttgagtttgcaaaacaggttggtattgcgaccagtacgatcagcgaatggaagaaaaaaaagaccaatcctacagccgataagattatggatatctgcaatgtattacagattaccccggagcagcttcttaccggaaagggaattgaagacgaggaagagattgttgcggcaagcccggagagtcggtttacaccttatgacattcaactgattgaagactaccatggccttaaagaagagcagaagaagagactgatggcttatgtggaggctttgaagaaaatagaaagcttggaaaacatgtagttgtgaagtcgcaaattgcgacttcacgaaaggacggtttatgggagaagtattagaattaaatacagtagataatatcataaatagtatttacataattcgtggacagcaagttatgctggattctgatttagcaaaaatatatggctatgaggtaaaacgattaaatgaacaggtaaaaagaaacattaagagatttccggaagattttatgtttcagctaacaagagaagaaattgatttcgtgaagtcgcaatttgcgacttcacggattacgtctttgtttgaaggacaagaaggtggtcgaagaaaactaccatatgttttcacagagcagggaatttatatgttagctacagtactgaaaggagaattagcagaacagcaaagtatttttatcatgcgtgcattcaaagaaatgcgccattatatcagacagaacaggcagtttgtcacacaatcggaaatgaatctggttacggcaaaagtatcggaattatctgttcagatggcaggtgtagtagatcggcagaaacaaacagaaaaatcaatggaagagattcgaaagagcattgatgttatgaatgagaattttataacagagaaagatttcaaaaattttgtaatctataagggacagaagtttgaagcagatgcagcttacatagatatttatcaacaggcagcaaaatctatttatgtggtggatgattatatgaataccaagacattacaacttctgtcgcaaaaacaatccggtgttgaggtaattctttttacagagaatggtcatgggaaaaaaggttttctcacaagtgctgtggtcaatgattttataaatcaatatccaacacttagaatcaaacccaatccagattgtcatgatagatggattgttcttgattatgaattacctacggaggcagtatatcattgtggtgcgtcaagcaaagatgctggtaaaaagttatgtgcaataaataaagtggattctgttcaaatgattcatccagtaatagatagattacttttattgccagataaacagatataacttacagctataattttttaactttatcgccctcaaacatactatatcctgtgggatttttccgaaattccgatggtgaaatcccaaggtattttgtaaattgccggttgaagtaggaaccatacttaaaaccacattgattggcaatatcatcgatcttaagattggtattagataatagttcctgtgatattttaagacgataatgaagcagatattcaatgcaggtacagttaagctgttgtttgaaacgctggttaagtgtggttcgatttaagtgaacaagctcgcatagaaaattcaatgagatattgttccggtaattggcatgaatgtaatcagtgcagatggtaactggattcgaattctcagataattcgtagaaatttaatttgcattgatccacatatatatcataaatacaattaagtgcctgacgaagcattcttctgatacggcaagtccagtaatcatcactttgtgcgtatgtttcagcaccaatcataagcataagttcattcaagcgaatatattgctgtggtgttaagttaaaaatcccctgaaaatatccatgatgctttgtgaacatataaagcatgtttctatcataaacatattgtttgtcaatgggaactgagtcatcaagattttcaaagtttaaacaggcttttatataccatggatcaaaatgaaataccttggcacttaaatgtgtgcgttccagacattgaaaattatcgtattgtgagatacaaagtacggcaggagccgtaactgtctgaatatgttcattgattttgacagttgtgcttccacaggaaatcataatgatagtgcatctgttatctactggcaatgattctaatgtattataaaaatcaaattcaatgggtatttctctttccttatgtctatcattctgaggcatataaatctccttttgaaaatgaaatattaaaatacattatatgcaattcttaattgtaaaaagtataaatatctactgcatatatgtaattgaaagtataatttacacactatatacttgtatatagtataaaataaagaaaaagaggtgtctataaaaatggtcatacgatttgcaaaagaaaatgaattaatacgggtaaatgaattaagaaaacaggtaaatgacctgcatgttgaaggaaaatccgaggttttcaaggccggttttaataaggaattacaagatcatgtatataccatctggaaagatcccgagcagaaaattattgtggcggaatcggaaggaatgatctgtggttttgctgtacttcatcatattcataaaccggaaactccttttatgcaggaacgtgattttatggatattgatgaattctgtgtggataaaaaataccgaaggcagggaattgcatcggaaatgatagcatttataaaagcttatacaaaggaacagggaataaatcgtatggaacttaatatgtgggagtttaatgaagatgcacttgccttttatgaagcagtaggattcaaaacataccgaagatatatggaaatgatgttaaaaatctgaatagacaaggaaaacgaaatatgggtaggtttccagaagactttatgtttcagtttacgtaaaccgaatatgataatctgcgggccaaaatgtcatcgaaatcaattttcagttttacagagacaatccaatcataaatatgataaaatgaaaataaatattggaaagcaaaaaggatataaaagacctatgacattaaagaaaacaatagaacaacataaatacaccatattgttttgtctcatattagtatttggttctatattgcggttggtgcagctggggaaggttccgggcggttaccagatggacgaggcttatggggcttttaatgcgtattcactgtttcacagtgggatcgattccacaggacactcctatcctgtgtatttcgagtcctggggaggcgggcagaatgcactgaactcgtatctcatgcttccttttatggtgttcaccggaggtaagatcactccactggtagtaagactaccgcaggccattgtagcaattttatctctggtggcggtttattttctgatgaaagagatggtggatgaagcggccggactgtgggccatgcttcttctcagtgtatgtccctggcatattatgatgtcaaggtggggactggaatccaatctggcaccagggttcctgcttcttggactgactttttttgcctatggtctgaaaaaaccgagattacttattttgtcagcactctcttacggtctgagcctgtattgttatgcgactatctggcctattgttccgttgcttatgttgtcggaatggggatacggatttcttacaaagactttgaagattaacaaatacttcgtgatccatgtggtgatcattggattactggcacttccgttgctggcgtttttgctggtaaacagaggaatcctcccagagttctccataggccctttttcagtctatgtaatgacggatttcagagtgaatgaaatagcatcctctttccgtgatattttatacaatttcaaaaatctgctgtatcttctgtatcggcaggatatcggtcgtccctacgatgtgatcatgccgtttggatttttcggaatcacagccagagtactgatctttctgggagtttttttactggtgatccgcctgatcctagccttacagaagagacagacaacattattatggatgatattctttcaactgaccggcgcattgctgctgggattactggttaccgtgggaatgacccagatcaactgcatctatattcctcttgttctgtgcggagcattgtgcgtgtcttctttgacagattttctggggaaaaaagtgaatttctatggaaaaattgcagtaagcattcttttggcagcacttctgctgggggaaaatgtacagtttgaaaaggcatattttacttcttataaagagctggtcagtgcctattttcaggaagccgtgcagaaagccatggagattgcggcggaaagcggtcgtgagatcgagatcgaagatgccatcaaatatcccagtgttttgctctacggagagattgacgctgcagaataccttgccaacaggaacttaagcgatgcacctcccaagccggagtctttcctaggcaagggaatccgcttcactatgggaatcgactgggagcatattgacagaaataagatatatatcatttactatacagatgcggaaaaattcgatggattcgctctcctgccctgccgggactggtatgtggcgtattaaaatgaaaataaaaaagccctcacatatcataaaaggtgggggctttcgcgtgtcaaaaattatgtttcatttacgcactcagatccagattctgtccaatcagcatggcggcatcggcagattttttgttctgctggtaaggattgctctcgtcacggtaactgatcttggtcgtggtggtgccgccggcggtgtagacggtgccgcattcgggacataccgcggtccgcagggacactgtggcggagagaacctttccgttgttctgtgcggccttgttgtaagcgttcgttacatgctcctgttcgtgggcacgaactctggaggaggaagcctgtggtgaaatatgagatgcagatttgaaggagaccatttcgttggaaccatcctgatatttccggttcttgcaggtttcgcattctgcgggagaagactttctgccaggcttttctacatcggattttccgggatttaccaccatacccttctcttcgggctgtgcggaagataccgcaccggtagaataaccgtatccgtaattaccggacagactataattattataattaccgattccgtaaatacctgtcataaggcttctcctttctgcataatgttttcattggttgattcgatattcttctatttgccctcattgtagcacctgtatctggtaagggcaagttaagattactgaaaaatctgctcaacttctgaaatcacggagatcgtacctaatattacaatgggatccgaaaaagaatccgccagagtcagtgcctgtttcacggaatctgtccatattgtgccaatatcttcttctgccaatgactcctgctgttttttggaaaaatgatagtgcggatttccggatctggtgagaaggatccggcttgccgtttcttccatggaccgaaccaccccggcataatccttatcctccggaattcccacaataacagtgcaattccaaacccccagatgtcgcaggacttcctttacattctcacagctggtggcattaatacaggcatccagcagaacaaacggcttggaacgcaggacttccatgcgtcccggccagtgcagcagagacagatttttccggatgtctggcaaagaaaaaactgcggattccctgcgcagatcagacagcacatccacacacacagcaagtgccagagcacagtttttcgcctgatgttctcccagcaacggaatttgtaaatccgcataaatgttgtctccgatttcaacatcaaactgcattccgaagcaggtataacggatgttttccgcatgaaaatcccgaccgtagatcttatagggaatatgcagagtttcggcacggcgctgcagaacttccagaacttccggttcctgctccgcaaaatagacacacttctgctctccggtgataacgtgggatttatcttccgcaatggcagtcagcgtatcacccagttccctcgtatgctccagaaaaatccggttgatcacggcataattgtgacgtacattattcacatcatcgtattttgcacctttaccgcattccagtacattgaaatccgtatgtttttccgaaaaataagccagtgccagatcggcctggattcccatgggactgatacatactgactccggcagatcagaggcaatattcagaatctctggctggatctctgtcatcagacggcagaagtcagattcactgatcatcgtattattgacacggaagcgttcgcgaaagtccgtgatatgagggctggtcatcagtcccacagagaatcttgtctgcaggattcgggagatcatgttggaaacggagccttttcccttgcttccggtgacaacgatgcagggagtaacggatttttgccaaagcagggatctggtcagttccgggtgtcgttttctggcgtcctttgcagcataatcctgatgtgaggcagctcgcagataagaggcatagacaaagtcttccgcctccttacgcgtagtgattttatgaaattgcagtgatgtttcggaagtgttattcatataaatacctttttgtagcctgcaattttccagatactttagtatcatgtattttcgtacactgtgcaggcacatatttgcgcatgaaaaaactattttttacactaagtctttgatgtaaagtcagattgtatcgtctcaataatttttcccgcaacatttatgccggaagccttttcaataccttccagtcccggcatgacattgatttcgcaaaaataaggtttttctctgccaaagagcagatcaattcccagaaaatccagtccggtctgttcgtaaatatctgcggctatggtacggatgccggaagtgacagggtaaggctctaccgaagcgcccagagctacatttgcacggaaatccccctgggatgtgcgctgcatacaggcaacggcttctccgcggatgctgtaaaagcgcagatctctgccgtagctttctgagataaattcttcgaagagccattccttggaggaagggtagttaagagagagttcctcataagaagctttatcccggatgcagacgatttcttctcccatggagctttccagtcctttaccgacaaagggaaggcccagttgttctacaatagaagaaaaaggcaaccgtgaagttcccagaagatatttcgggatcaaaaaggctttggaatgaagccttcgtacctgttcaaatttattaatatagatattataagcagttaatggattatagcttcgggtggcaagtgcatttatagcatccttttcccgtccccatttatagcggttgatgacaaaatccactggttccagtattttaccatgatttataacaccctgcggagagaccatagtatcgtggatccctacaatctgcagatccatatccagggcagaagcttcctgtaccaggcgattgcaggtataagcgttggtcatagtattatatttttctatgatatatcctctgataggcataagacacctcgtaatttcagtattctcatggttaacatagcaaaatgttgtcaaaatagcaagaaatatagttcttctattgaaaaaggagcaatatcctgcgtataataagaggtataagagcctaaaagtgggatgataatcccacgatatgcgaatattgggtagaattgtggtagtgcgtagcacgaagcaatccgtaggtatcaaagtcgggggcttttgaccccgacatcattaaaatatattaagaagaaacaaaagaggagacatacaatgaaattactcgaagagcgcattcgcaaagatggtacagtaaaagcagggaatgtattaaaagtagattcttttctgaatcatcagatggacattgatctgttcaatgaaatgggaaaagagtgggcgcgtctgttcgcagaccgtaagattacgaagatcctgacggtggaggcttccggtatcggcattgcctgtgtggcagcccagcattttcatgtacctgtggtatttgcaaaaaagtcccagtccgtaaatattgacggtgaagtatattccaccaagatcgaatcctttacgcacaagagagtatatgacgtgatcgtttccaaaaaattcctgcatccggaagatcatattctgatcattgatgattttctggccaacggatgcgcactggagggtctgatcgacattgtcaataaagcgggagcttctgtagagggtgtcggcattgccgttgagaagggattccagaagggcggcgacctgatccgttccaagggtatccgtgtagagtcgctcgctattgtggaaagcatggatgacaagaccggagagatcacatttcgatcttaatagttagataagttagataggttagataactattcagaaccacattcgcaaacgagttaataaaaatttaatacctctcttgacaagaagtcagacaaatgcttatactgactaatgttgagagagtacaataaaggggttgtatgaaggtgtcatacaccctttttgcgttgactcaccggtttatctgcagatctgtgcccgcgctgctacatggatctgtaacgaagcagcagcgcagaaagaggagaattatgaaaaagaaagtcgtaagtttactcgcagctatggctctcgcagttactgctctggcaggatgcggatccaatgatgcagctaccaccggcacagatgcagcaaccgttgcagctaccaccgaggcagcaggtactagcgaagcagcaggtactaccgaagcagcaaccgacagtgaagctgttaccggtgtaaaggcaggtttcattttcctgcatgatgagaactctacttatgatctgaacttcctaaatgcagcaaaagcagcttgtgagaagcttggtattgagtacatgaccaagaccaacattcctgaaggacaggaagcttatgaagcagcttgcgaacttgctgatgcaggttgtaatttcattttcgcagacagttttggacatgaggactacatcatcgaggccgctaaggaatatcccaatgttcagttcagccatgcaaccggaaccaaggctcatacagaaggccttgataacttccacaatgcatttgcttccatctatgatggccgttatcttgcaggtatcgttgcaggtatgaagctgaatgagatgatcgctaacggtgatatcaccgaggatcaggctaagatgggttatgtaggcgcttatacctatgcagaagttatgtccggttatacctccttcttcctgggcgcccgttccgtatgccccagcgttaccatggatgtaacctttaccggttcctggtatgatgagaccgctgagaaggaagcagctaacaagctgatcgagggcggatgcgtactgatcagccagcatgcagactccatgggtgctcctaccgcatgcgagaccgcaggtgttcctaacgtatcttataatggaagcactgaggcagcctgccccaataccttcctggtatcttccagagttaactgggagccttatttcgagtatgctatcaaatgtgtagcagatggaactcctatcgataccgattggtgtggtactctggagaccggctctgtagagctgagtgatcttggtgctgctgtagcagagggtactgcagaagcagtagaagctgcaaaggctgatctgatcgcaggcaagactcacgtatatgatatcactaccttcactgtagacggcaagaccctggacagctatgaggctgatatcgataccgatcctgattatactcccgatcatgaggtagtaagtgacggatacttccatgagtccgatgttgcattccgttccgctccttacttcaatgtaagaatcgacggcatcaacctgctggacgagcagtattaattcttaaaaagcctggacggcgccgcgtttatcgccgcgccgccctttttctaccttatggatcttttgcggatggatgaggtagaaaaggggcg

SEQ ID NO: 5483 - DNA, 678 bp, Unknown
  gut microbiota DNA sequence
caaaatcagattttcgcagatattttccatttggataggatgttctagtttcagcagagtccaaataatattgctcaactcctctgcagttaattattttcagattgcctaaaggtgcattctgtatactcgtttccaaattttgtttcaaatcccttagccaatgttctctttttagcaattgttcatatagaaagtcctttatagccttttcctcccgttgtacatttttttcatttattgcttttcatttaatctgtatttttctctttctcgcatgtattctcttgcctctggcacatacctatttcatcttttttctgtttccgcatgtattcctttgcctctggcacatacctatttcatctttttccttatttcgcatgtattcctttgcttctggcacatacctatttcatcttttttctgtttccgcatgtatttctttgcttctggcacatacctattttttcatcttttttcttatttcgcatgtattcctttgcttctggcacatacctaatccataattctcccctccctcgcatgtattttacacgttgctcctcatatatttcctatgcatgtataattttcacaaactaacctctaaaaaaataatgttattaaagtaataattgaaataaatatcttgaaatatccgacacagaactgtgt

SEQ ID NO: 5484 - DNA, 1556 bp, Unknown
  gut microbiota DNA sequence
agcaaatagtaaaatatttgctctctttttgttttataccgaagaaaggaagtataatggaagaattcaaattgtaccgtatttcggatgaatatgtggaatggcttcgagaggatttcccgaatgtatattccaacaaagtgaatacaaggagctaagcagaaagcaatgaatgatatgactgcgggatatgtgaaatcggcattggactacagggcattagaatacagatgtgatttatttgagcaaaagagtagcaggttatagaatttttagaaatccttcattttgttataattgttttctgacaaataaggtgctatcataacattatcaagaaaagccaatcaccacaggcgaagcaaagtggatgatccggagacgattttcaccgcccccgcgctggcagaaagaaagaggcgcgtgtttatggaacaacatgatttaagtaagatccaaaaattacaagagaaaggaaaatccgacaagatcatcaaatatctgagttcttccgatgataccgtggtggtagctgcactggaagctctgagccggatcaaggatgaagacagtgtcaacagcattgcccacatgatcgacaatccggatacgaagatccgtgtcgaagcagcaaaagcgttaggaagcatcggcaccgaatatgccaagacctatctactgcacagactgaatgcagaacaggatgagaccgtgaagacagccatcaaggaagcacttcacactctggcagagcatcattaatttaatttgctttactcgtagtttttctacttatacattttccctcttattggcgtccggttcattccgggcgccttttttgcgaaatttggaaaaatcttgcgacgggttctgcttgaagctacgatgcatatctatttataatagaacggtacgtgaaaaaagtagttttgtagtcatggaggtagtttaatggaaaaattaaacattacaactacaaaggataatgaaaaagtatacaaaatcctgggggatctgatgaatgccaacaaggaattccaaattatgatcacggttccttctacgaaaaacgccaaagacagcacagtaaaagcgacagaaaaaaaggaacagacccaggaagtcatccatgacctggaaaaggatgtcacggatatgatccatgagatcggagtgccggcacatatcaaagggtatcagtatctgcgggaagctatcatgatgtcggtagaggatccggcaatgatcagttctatcacaaagatcctgtatccgaccatcgccaagcggttccagaccacacccagccgcgtggagcgcgctattcgccatgccattgaggttgcctggagcagagggcgcatggagaccctggatgccatgttcggttacacgatcgacacgggcaaaggcaaacctaccaattctgaattcatcgctctgatcgccgacagaatccggctgtcctacagatcatgagaaatttgaaacgaaaagttagatgaaaaagtaaatgatgactgaataatagcaataattactttgttttactt

SEQ ID NO: 5485 - DNA, 1656 bp, Unknown
  gut microbiota DNA sequence
cgaacagccccatttgcaggaaggggaaggaatatggcatgatcgctccatggaaagtcatttcgctgaattttcgagcagctatcattgcaatcgggaggccgactgccagagttgccagcgcagcagaaaacgcatagcaaattccctcatagatggtcatttgacagagctgctttctggtcagaccgatggcgcgaaagacgctgttttccctctttctggacatctgattggagagggtggtgttgatgagattgaccacgccaaagaggaacaccagccaggacagcgcctgaaaacctccaaaaacgaccctgttttccatttcctcataatccttatgtatcccaatggtatccaagtcaagatccggattggaagaaatgatcgcactcagactgttttcaatctgctccgccttttggggatcgctgacaatgctccaggaataatcaaaacaatcgatcataggcattgcttcctgaaatagctctttggttgcaacaatgcaggtgctgtccaatgccagaggaccatgaccatttttaagcccatcgtttatgagcagaccggaaacagtgacaggaatctcttgatcccctatggtaagtttgataactgaccccacatctacaccgatcatatcttctgcataagccatatcaagtgcaatactatgggaatcttgaggtaaagttccggacacaagcgccgcttccatttgatccctgtttcggtcactcaacagatcacacattccgccggaagaactttcctcattttcaaaccgcacatgaaccgcctgacgattttctatcacatctgttacgccatccacggccagcacctcctgccgaagcgcttcattcaaaggatttccttttgacatcacctcatattctgttttttcagaatggatatagattttataatccccatccggaaaatactgtcttgcgatccgctccggcgaacgaaccaaaagaatagaagctgtcaccaaaaggatcaccccgcccagactcagggaagccacgatactgatcgtctttttgcggtcacgcctgaaatttgcaattcccatggagaggggatttaaccgcatattcttcttatgtgtgtgggcctttccgctctgattgccggtaaagcggactgcttcaatcggggagatactggcggcaatctttaccggtctgcggatcgcaatggataccataaaccagccaagcagtgcagtcaaaacaatcgcggctgcataaaatagcagattaaacccacggggaaacagtgcaaacccggctgcacatcccagcaaaataccgataccaatgccagcccatcctaagaaacggccttcttttttgacaatacggcggatctgttttggcgttgtgccgatggtccgcagttgtccatagctttggattttatcattgatagaaattcggaagatactttgtatcacaacataccctccgatgatgaccagaactgcaattccggcaaccagcgccagcatactgacattcacaggctgcttatagaacttcatatagctgaggttcatgatcggcatttccaactgatattccttggcaatctccctgctgcgggcagtcagctctgtttcatccatttgctgctcattct

SEQ ID NO: 5486 - DNA, 1106 bp, Unknown
  gut microbiota DNA sequence
ataataccgcatgtaattgtgcacctgggtcacgatctcttcaaaagtgtattctcccagtcttgggtcaatccccggatagatcatggtgataaaattccgcagagtcttcgatgggaaaaagcgccgcagattcaccggcatggcaatctttaccggacgtaattttaaatgccactcactctcctgcttctgcatcagtgcatagagcagaaccgcattgaaatattccgtaatggtggcattatagctttttgccaccttcatgacctctgccaccgacataataccgtctatgatgttcagggtataaaagggctccttggttccccggacacggtaagccttctcccccggtctgggcgggcacaccttggcattggcatatttcatgtaggcatcttccagttctaccggatccggtgtctctaaaatatccagcacaaaaccgccgttctcaatctccgtatgccccttcaggcgcagataagtggccgtcagagtctgcaatacgcacatgcctccggtaccgtctcccagactgtgatgggcctccagggcgatccggttccggtaataatagattcttaccagataccggttattggccttgaaatacatgggctgacagggatttttcacgtcctcctgcacaaatgggccggggcggtcattgggctccaggtatctccagaagacacccttgcggatagccgccttatacgtcggaaaacgaggcattgtcagattcacggcccgctgcagcatctcgggattgatctcctcctttaaaagaacggacaaacgataaacggaagaaaaatctcttctctgtaaggtcgggtatacgatggccgacagatccagtttgtaccagtccttgtgtactttcgatgccctgtctgtcttcgttttgtctcttctattaattgccacggttttcgcccctttcccggttttgtattatatttttcagaaacgacaaaggcggcaacctttcggtcaccgccatgtgatgcagaaagagggacttgaaccctcatggtatcactaccacacggacctgaaccgtgcgcgtctgccaattccgccatttctgcgaacaa

SEQ ID NO: 5487 - DNA, 12386 bp, Unknown
  gut microbiota DNA sequence
ctgcggagatattatatcttaaaaggagcaacatatgaaattcagcattatcgtagtatgcctgaaccccggcaccaaactgaatcagacccttgacagtatcctggcccagacctgcccagacttcgaagtcatcgtcaaggacggtggcagccgtgacggatccatagagtccatgcgcactgacgggcggatccatctctaccaggaaccggatcacagtatctacgaggctatgaaccaggcggtctctcatgtgaccggagattacattctgttcttaaactgcggtgacctcttctatgacaaggaagttctggcgcacaccgcacaattcatggaacagcaccctatgaaactgcaaggcatctattacggagatacctacagcgcgaaaacggacacgaagatatcatccccgccccgaatcaccggctttgtctgctaccgcaacattccctgccatcagtcctgcttctatgccgcagacctgtgccgacagaagccctacgaaccaaaatacaagatccgcgcagattatgaacattttctgtggtgctattaccgggcgaaggctcccatgcagtatctggggcttaccgtatcttcctacgaaggcggcggctactccgagacaaaggagaacctgaaacgcagtgccgcagagcataaggagatcacgataaaatacatgaaacccgtagaactgttccgttaccgcgctgtgatggcactgaccctggcacctctccggaccgcaatggcagaaagcagacatttctctgcaatctatcagggactgacaagcagagtgtatggtcggagacaggaaaaatagggaaaatccccaaagagttgtgctaaaagcatggcttaaaaaagaaaattaacacaattcacagacaacagccatacgaacaactgaattgacaaattatctgacaattcaaggaaaaatctatatttacaaatgagaaaaataggtgtatagtacagaaaaggtcgcaatgaggcgctcgaaagagtctcattgcgaccttttttagttgcaggaaagtgctgaaagcacagtcttgcaaatgaggttatgaatagtaacagacagatgaaaaagagagaaatagaaacccggaaaggagaactatatgtttgatgtaaaacaggagctgcccaaggcaccgttatatcgggaagaatttgagcatgataactgcggtatcggagcctgtgtcaatattcacggagagaagagccgcgcgaccgtagagaatgcgctgaagatcgtagagaatctggagcacagagccggtaaggatgcggaaggcaagaccggtgacggtgtcggtattctgacccagattccccacaaattttttgccagagtgaccagggctctgggcatggacatcggcggagagagagaatacggtgtcggcatgttcttcttcccgcaggaagagctgcgccgcaatcaagccaagaagatgttcgagatcattgtggaaaaagaaggaatggaattcctcggctggcgtgaagtgcctaccttccccaatgtgctgggacataaggccgtagagtgcatgccctatatcatgcagggattcgtgaaaaagcctgccgatgtggaaaaaggacttccctttgaccgcagactttatattgcaagacgtgtcttcgagcagtcttccgatgatacctatgtagtttctctttccagcagaacgatcgtatataaaggaatgttcctggtaggtcagctgcgtaccttcttcgcagatttgcagagtgaagattacgaatccgccattgccatggtacactcccgtttctccaccaataccaatcccagctgggaacgtgcccatccgaaccgtctgatggtacacaacggtgagattaacactatccgcggcaatgccgacaagatgctggccagggaggagaacatggaatccgagcatctgaaaggccagctgcacaaagtactgcctgctatcagcaagaccggttccgactccgctatgctggacaacacgctggaattcctggtaatgagcggcatggaactgcctctggcggtcatgatcgctatccccgagccctgggcgaacaacaaggccatgtcccagaccaagagagatttctaccagtattacgctaccatgatggagccctgggacggccccgcatccatcctgttctccgacggagatatcatgggtgcggtactggacagaaacggcctgcgtccttcccgttatctgatcactgacgatgataccctgatcctgtcttccgaggtaggtgtccttcctgttgatcccacgaagatcaagttaaaggaaagacttcgtcccggcaagatgctcctggtcgataccgtacagggcagagtcattgacgatgaggagatcaaggaaaaatatgcttccagacagccctacggtgaatggctggacaacaacctgacagaattgaagagtattcacatcccgaaccagcgtgtccctgagtacacctacgaagagcgtcagcggatgcagaaagctttcggttatacctacgatgagatgaaacagagcattctgcctatggcaaagaacggcagtgaagcgattgccgccatgggtgtggatacgccacttcccgtcttaagcaagacgaaccacccgctgtttcattatttcaagcagctgtttgcacaggtaaccaacccgcccattgatgcgatccgtgaggagatcgtgacttccaccaccgtatacatcggtaccgagggcaacattctggaggagaccccgaagaactgtaatgttctgaaggtcaacaacccgatcctgaccaacacggatctgttgaagatcaagaacatgaaggtagacggattcaaagtagaagtcgtacctatcgtatattacaagaacaccagcttagagcgtgccattgacagactgttcgtggaagtggacagagcttacagagacggtgtgaacatcctgatcctgtccgacagaggcgtggatgagaaccatgtgcccattccttccctgctggccgtatccgccctgaaccagtatctggtacgcaccaagaagagaaccagagtcgcactgatcctggaatccggcgaacccagagaggtacaccattttgctacgctgctaggttacggtgcctgcgccatcaacccttatctggcacaggataccatcaaggaactgatcgagagcaatatgctggataaggattactatgcagcagtggatgattacaacaatgctgtcctccacggcatcgtcaagatcgcatccaagatgggtatcagcaccatccagtcctatcagggttcccagatcttcgaggctatcggtattgcaccggaagtgatcagtaagtatttctccaacaccgtatgtcgtgtgggaggtattaccttaaaagatattgagcagcaggtagacgacctgcactctcaggcatttgatcctctgggactgaaaaacgatctgaccttaaacagccccggacatcacaagatgcgcagcggcggtgatgagcatctgtacaatcccgctaccatccatatgttacaggaatccaccagacgcggtgattaccagatgttcaaacagtacactgccatggtaaacgacgaagattccatcaagaatctcagaggactgatggacttcaattatccgaaaaagggtgtgcctattgaggaagtagagccggtagagtccattgtgaccagattcaagaccggtgccatgtcctacggttccatttccaaagaagcccatgagaccatggccatcgccatgaaccatctgcacggcaagagcaattccggtgaaggcggtgaggacctggatcgtctgaccgtcggaccggacggactgaaccgttgttccgccatcaagcaggtagccagtggacgttttggtgttaccagccgttacctggtaagtgcacaggagattcagatcaagatggcacagggagcaaaacccggtgagggcggacatctgcccggaggaaaggtatatccctggatcgccaagaccagacactccacgcccggtgtgtccctgatctctccgccccctcatcacgacatttattccattgaggatctggcgcagctgatctatgatctgaaaaatgccaacacccaggcaagaatctctgtaaaactggtatccgaagccggtgtgggaacggtcgcagccggtgtagccaaggcgggagcccaggtcatcctggtatccggctatgacggcggtaccggtgcggcaccgagaaactccatccacaatgccggacttccctgggagctgggactggcagagacccatcagaccctgatcatgaacggtctgcgtaataaagtccgcatcgagaccgacggtaagctgatgagcggcagagacgtagccatcgcagccattttaggtgccgaggagttcggttttgccactgcaccccttgtgaccatgggctgtgtcatgatgagagtatgtaatctggatacctgcccggtaggcgtggctacccagaacccggagctgcggaaaaacttccgcggtaagccggaatatgtggaaaactttatgaaatttatcgcgcaggagctgcgggaatacatggcagcactgggcgtgcgtaccgtagatgaactggtgggcagaactgatctgctgaagagaaaagagcatctgaccgatcgtcaggaggaagtggatctgacccagatcttaagcaatccttacgagggcagcaagcagaaggtgacctttgatcccaggcaggtctatgacttccagttagagaagacactggatgagaaggtgctgttaaagcagttaggaaaagccatcgacgcaggacagaagcgcagcatcgaagtagacgtcagcaacaccgatcgtgccttcggtacgatcctcggaagtgagatcaccagaaaactgggcgatgatgtggaagaggatacctaccatgtactgtgcaagggtgccggcggacagtccttcggagcctttatccccaagggcctgactctggaactggtaggcgacagcaacgactacttcggcaagggcttatccggtggtaagctggtggtatatcctccccagggcagcaggttcaaggcggaggaaaacatcatcatcggtaacgtggcactgtacggtgcaacctccggtaaagcattcatcaacggtgtggcaggcgaacgtttctgcgtgcgtaactccggtgccattgcggtagtcgaaggtgtgggtgatcacggttgtgaatacatgaccggcggacgtgtggtagtcttaggacccaccggtaaaaactttgcagccggtatgagcggcggtatcgcttatgtactggatgaaggcaacgatctgtacaagcgtctgaataaggaaatggtatcctccagcgagatcacatccaaatatgatgtgctggagttgaaatccatgatccaggagcatgtggcactgaccaattccgccaagggtaaggaagtgctggacaactttggagagtatctgcccaagttcaagaagatcatccctcatgattatgagagagtcttaaagaccatcgtccagatggaggaaaaaggactgagcgcagagcaggcacagatcgaagcattctatgccaacaccagaaagtaaatggaggccagtgtgaaaagtaatcttgatagattgcttttcacacgactaatttgtgccgcgggcgccacaaattagtttatcgcagaactaaatatgaaatttagttcgcgattcttccgacgccgaagcgtctgcagaatggagagagtcatgggaaaaccaacgggatttatggaatataaaagggaagtcagcgtggctgaggatcctaagaagagaatacagcattttaacgaattccatgagcatctgccgaaggaaaagcagcgcttacagggtgccagatgtatggaatgcggtgtgccgttctgccagtcgggcatgatgatctgcggtatggccagcggatgtcccctgcacaatctggtgccggagtggaacgatctggtatataccggcaactggcaacaggcttacaaccgcctgaaaaagaccaacaatttccccgaattcacgtccagagtatgtccggctctgtgtgaggcggcatgtacctgtggattgaatggggatccggtctccaccaaggagaacgaatatgcaattattgaaaacgcctacagcgagggttatgcggcagccaagccccctgtggtgcgtaccggcaaaaaggtggcagtcatcggcagcggtccttccggactggcagcggcggatctgctgaaccagagaggacatcaggtcacagtatttgagcgctccgaccgtgtgggaggactgttaatgtacggcatccctaacatgaagctggaaaaacagatcattgatcgtaagatagccatcatgaaggaagagggcatcacctttgtcaccggtacggatatcggtaaggacatcaaggcatccaagctgttacatgattttgaccgtgtcgtactggcctgtggtgcttccaatcccagagacatcaatgcgccaggcagagatgccaggggaatctatttcgcggtggattttctgaaagccaataccaagagcctgctggattcgaactttgaagataagaaatatgtggagaccaagggtaagaacgtggtcatcatcggcggtggtgataccggtaatgactgtgtgggaacttccatccgtcacggtgccaagtctgtaacccagatcgagatgatgcccaaggctccggacaagagagcagagaacaatccctggcccgaatggccgaaggtctgcaagaccgattacggtcaggaagaagccattgcagtctacggacatgatccgagaatctatgaatctacggttaaggaatttatcaaggataagaacggcaacctgaaagccgtgaagatcgtgaagctgtcctgggaaaaggatccggctaccggacgcatgaagatgcaggagatcgccggaagtgagcagatcctggatgcggagattgtactgatcgcagcaggatttttgggaagtcagaaatatattaccgatgctttcggggtggaattaaatgaacgcaccaacgtaaaaactgcccccggcaaataccagaccagtgtggaaaatgtattcgtcaccggtgatatgcacagaggacagtccctggtggtgtgggcgatccgtgaaggcagagaagccgcacatgctgtggatgagagcctgatgggctactctaatctggtgatccagtagaggtattattctcgtagatggatctcagacctttcataagaagattctgatcgatatggatcttcgtttcacaatgtggaatgacggtcgttgcgtaccctccggtggcaacgaccgttgctttttgccctaactctgtctggatacggcggatcagtccgtcgatggcacaggcgttgcccaagagcattcccccggtgatgcattcctgcgtattcgcaccgatggtgtgggcgggcatatgaatgtcccctttcgggagctgggcggtcttgcctaaaagtgccctgtgggcggttccaacgccgggaaggatcaggccacctaaaaagcgacggttctcatccaacacgttaaaagtcgtggcggtgcccaggtcgatggtgacgaaaggcagggaatagcgggaaatggctcctgcaatatctgccagtcggtcacagcccaccttttccgggaagtccgtacagatctcgtagcccagatccagcttatgggaaagaatcagaggtttccgtcccagaatagtttccagagcagaggaaaaaacggctgtcaccgaaggcacaaccgaggaaatcatagatccctcaaaggcttcggcagacaggccgtgtttgttcaagatcatattcagtttttcaatatatccggcatcagacaggggacgacgggacgatatcttctcaataaagagcagcttatttccctgaaatcccccgatgccgatcgtagtatttccgatgtcgattgtcagtaccacgggtatactcctgttatgctgcagactctgctttctgatatacaggaatgacttttgccttgatcagtgccagccctaccgctccggtcaggaacgtggatgcacacatctcgaagaccgcattcacacctacaaaagagcagatgaataaaatcgcgtttttaccacccatcagtccctgcacataggaagtattgccgaacagcagtactaaaagggacatgaaaaatgcggtgttgaaaaatgcgctgcaaaatccggtgatcatgcaggcgattctgtctcctacggctttgcggctgtaacggaagacatatcccagcagaaatccgtccagaagtctggggatgaaacgctggatgaaggccaacacagggttgatgccaaaaagcattgctcccatggcgctggtgcctcccacgccgatgcattgcaaaaagctggtcaatccgaatactgctcccatggcggctccgcctacagggccaagagtgattgcagccagtgcaacggggatgacattgaaggtgattgccagggggccgatgttcaggtacccgagcggggtataagccatcagcaaaagtaccgcagcaaacaatcccatcaacgtgagtcgcattgtcttactttgtttgttcatatgaaattttcctccttgttaccattctccctctgggagatacaatacaagctgccccggtgattcgggacactcctactgtttatatcatatcccggacaaaaagaaaagtgatatttgcataaaatatgcacttatggtattttaggagtacagttttgaagtatttttgataaatcaggcaaaaggagacgactatgctgaagggaaagaccgtagttctggcaatctcgggaagtattgctgcatataaaatggccaatgtagcgcggatgctgttaaaacagcactgtgatgtggaagtgctgatgacacagaatgccacgcagttcattaaccccattacttttgaaagtctgacgggacataaatgtctggtggacacctttgaccgcaatttccagtacagtgtggaacatgtggcactggcaaagcgggcggatgtggttctggtggcaccggcttctgccaatgtgatcggcaagattgcaaacggcatcgcagatgatatgttgactactacggtcatggcatgtccctgcaagaagattgtgtcccctgccatgaatcataatatgtatcacaaccccatcgtgcaggataatatcgaaaaattaaagcatttcggctatgagatcatcactccggccacgggaatgctggccaacggcgatatcggtgacggcagaatgccggaggagtccgtactgttcgaagccgtggtgaaggagatcgcctgcgagaaggatctggcgggcaaaaaggtgctgatctccgcaggtgccaccagagaacccattgacccggtgcgttttatcacgaatcactccagtggaaaaatgggttatgccctggcgagagctgcaatgcaccgcggcgcagaagtgacggtggtggcagcccatacggatgtggagccgcctttgtttgtaaatgtggtgccggtacagacggcagcagagatgtacgatgcaatcgtgtccagagcgcaggactatgattttgtcatcaaggcagcagccgtggcagactacaccccggcagtgacagcagacaataagattaagaaaaaagacggagacatgtcgatccctctggtgcggacgaaggatattttgaaggcccttggggaaaacaagagaccgggacagattttgtgtggattttccatggagacggaaaatgtactggagaattcccggaagaagctggagagcaagcactgtgacatgatctgtgccaacagtttgaagagcgcaggagcgggctttggcacggacaccaatattgtgacactgatcacaaagaattccgaggagagcctggaactgatgagcaaggaacaggtggcacataagattctggataaactaatggcaatatgactctgtattaagtaattgcataatataggcatttgcaagatggcccaaaagatattgtaaacatttgaagaaatatcttttgggctattttcaagatatggatatataaaaataaatttgtagggataaaagcttgtaaaacttcgcagaaacgaatagaatagatttacaaaagggagtgataaaattggaaaaatatatatctgtaatagaattggcagagagatggaatgtttcgcctagaagaattcaagtattatgtaatgagaacagaattattggagcaaaaaagcaaagtggagtatggcttatcccctatgaggcaaaaaagccagagaaaatgaaatctggaataaaaaaggaaaagaaggaaaccttgaatgtattatccctgttctcaggttgtggaggaatggatttggggtttgagggtggtttttcagtgttaaagcaatcagtaaatattgatttgcataaagagtggaaaataaaaagggaaaatagtaattgggttaaattgcctaaaaatagatttcatactgtatttgcaaatgatataaaaccggaggcaaaagcagcgtggtgtaactattttggaaacagaggagtggatgaaacatgttactatttagacagtattgttgatttggttaaacttcaaaaagaaaataaaataaatatttttcctacagatattgatattgtaacaggagggttcccttgtcaggatttctctgtttcaggcaaaagaatgggatttgagtcagataaaggacataatggtaagaaaatagatgtaaatgcacctactgttgaaaatagaggacatctatacatgtggatgagagaagttgttgcaattacaaaacccaagatatttattgcagagaatgtaaaaggtttgacaaatcttaatgatgcaaagcaaattatagagaaggatttttcgaccgtatgtaatggaggatacttagttgttcctgcaagaatattaaacgcagcaagatatggtgtaccacaagggagagaaagagttatttttttggggtttaaaaaagatgatttgacgaaacaagctttagaaaaattgagcgcaacacaaatagaccccgattatgatccatatccattgccaacacattatttagacagagctaataaaaaggaaggggaaattccatttgttacggtaaagcaagcttttgctgaattacaagagcctgataatacaagggatgtaagtcagcaaaaatattcaaaagctaaatatatggggaaacattgtcaaggacagcaagaggtaaaattagatggtattgcacctacaataagatcagaacatcatggaaatattgaatttagaagattggcagaagaacatggtggggaatatatggaagaattgaaggctgggatgaaggagaggagactaacaattcgtgaatgcgcaagaattcaaacgtttccagatgattatgagtttataataccgagaaaacgggaaaatgtatcagtgtctgcatctgaagcttataaaataataggaaatgcagtaccgccacttcttgcgtatcatatagctaaacgcatagaagacaattgggaaaaatattttggaggtaaatagttttgagagaagaaagatggatagcatatgttgagaaaataggaaaagtaacggaagaaatacaagagaaattacaagacagaaaacgaaagggattattagctaaaaaaatctcaggaacagattttgaagaggtagtatatgattgtttgctggaagctggatttgaaaaagaaaacattacacatagtacacaaaaatttccggattttatagtagaagatatacaatctgggaaaaaaataggcatagaagttaaaaagacagattcaaagaaatgggaagttataggtggtagtatttatgagagccttaaaaatgatatagatgatacttatattattatggctaaaatgggaggagacaacccagaagtccggtttagaaaatacgaggaatgtattgcagatttaaaagtgacacatagtcctagattttatttagatatggatttggaaaagggaagagattatctttcccaaaatgatgcaatggatttactggaattatcaggagaagaacttaataaaaagataaggaaacttcttagaacaaaaaaatcaacatggtggagtgagggggaaacaatagctttttctgaattatctagggaagagaaaaatatata

SEQ ID NO: 5488 - DNA, 1039 bp, Unknown
  gut microbiota DNA sequence
accactgtcttgccttgtcatcaagcatatccggaaagcagcatttcccgggccataccccgataatgaaatcttctccgttttcatccttgcagaagtatccgttcgctttgccttcttcatagacatcatagccatcttccttttttacaccaccatcaataatgggaacgagatgaatgttctccttcctcatttcttcgacaagctcttcaaaatcagcgaagctgtcccggttaatcgtgaagtccttataccgttccatataatcaatatcgagatagatactgtcaatgggaatgttatgctttttatattccgctgccacctcacgcacttcatccgctgtatcataactccaccggctctgtccatagccaaatgcccatctgggtgcaatatagcttcttccgatcagttcacggaattccttcactacatccctgtaggaagctgcctcaatcagataaattttatagttctcctcttccatggaaatgcaaagatcatcaatatcggtataaccaatatcgaaggtcaccctgcccggcgtatccacaaacaagccataggtttcatgcactccgtcatccaccataatgaagttgtgtgctccatacagggaattggtattctcacagtaattcggattatcgctgcaattgctgatgtaacgccatcctctcttgttgatgccacgcacattttctccaagcccatacacgatttcatcctctttcaaagaataatgaaaaccgtcttcttttttctgaaaaacaccatcgctccatgcagaggatgcgagctcctttaccacagcatctgtttcaatcggttctccaaagatatatttccttaccatcgttcctgtccctgactagcctttcactccgccagccatcaatccttccttaaagtatttttgtgcaagagtataaattataataatcggtatcatagaaagcagactacctgccattaaaatattatactctgttccatactgcccgttcaagctgtttaatgccagggtcagtgt

SEQ ID NO: 5489 - DNA, 5363 bp, Unknown
  gut microbiota DNA sequence
acgagcgtgccgcgtttcttataccctgccaagggctacggggatttgatagcatttctttactaactctcaagttaatataagacgggtgagctttacagctcacccgtcttatattttgcaacgatattctgaattctttcattaggattcaacaaatcgctgatggaagaatcgtggttcaaagtatcaatgatgtaagcaatgtacttactcatatcacagttgatataccactctctctgaagcagttccggagtctggtagatcaggttggtggtcagaaccttgtcgatgatgccgttctcataagccttgtcgaacttgtccagaccgttggtgaagaggccgaaggtggagaagacgaagatcttgttggctttacgctccttcagagcagcggcaacttccagcatgctttcaccggaggagatcatatcatcgataatgatcatatccttgccctctacgctggtacccaggaattcatgagctacgatggggttacgaccgttgacgatgcgagtgtaatctcttctcttgtagaacatacccatatccagaccgagaacgttggcaatgtagatggcacgtcccataccaccttcatccgggctgatgaccatcatgtggctggaatccagctgcagatcttttacattgcgtaacagacctttgataaactgatatgcaggctgtacggtctcaaagccgtgcagaggaatggcattctgtacacggggatcatgagcatcgaaagtgataatgttgtctacacccatgcttaccagctcctgcagtgccagtgcacagtccagagactcgcgggaagttctcttgtgctgacggctctcatacaggaagggcatgatcacagtgatacgacgggccttaccgccgacagctgcgatgatacgcttcagatcctgatagtgatcatcgggagacatatggttctcgttgccacacagggaataggtcatggagtagttcaggacatctactaacagatagagatcagtaccgcggacggattccagaatctgtccctttgcttcaccggaaccgaaacggggtactttggcatccaggagataggattctctctgataacctgcaaatgccagagactctttgtgttcgctttctctctctgccctccattttacaagatactggtctaccttctcacctaaaggcttgcagccgggcagggaaataatgcccagagagccgacggggatagtctccagatttcttttttcttcacgattcgccattggggtgatcctcactttctgattctgtatactgttctgttacaaacaaatgattaattgtcagatgtattctgtatacgctttttgcacatacgaatatcggggccggtcagcttacacagatcgtaatgactggtgatacgggaaaatacccggtctgaatatcggtcgcgcagttcctccagactcaaatttgtggagatgatcgtagcgtttttccgcagatgtctctcattcagacaggagaacagctgggaggctacaaaagtattggtcatctctgtgccgaggtcatcaatgatcagcagatcgcagttatacagatcctcgtagaatccggagagagcttcttttgccctgctgtcgaaggcataacgggcaagagtatcaaacagcccggaagcactgaaatagatcacggaatgaccggtttgcaataattcactggcgatacatcccgacaaaaagcttttgccagtacctactgtaccataaaagaataaattgtggtagtcttgtttgaagttttgtacaaaattgcgacagacatccacacattttcggaaatgcgtaagatcatcgccctgatagtattcgtaagaaaggttggaaaaattctcagaagcgatcatatcccggatatgggactgctcatagagaatatccagttcctgctggtgaaaacagtgacattttttgcgaagaccatcttcactgtcaatataacctgtatctttgcaatcggggcaatcatagatgggttccagatagtctgctgggtatccggcggacgtgagcaattctcttttctgacgggagatttcctttagagaagaacgcagtctggtaagcgcctcgtcatcaccgttcaataaaagctttgcctgcgccacggaaagttcaccgacagactcatccagtcttccgtattccggaagctttgtataaatttcccggcggcgctgctctgccaggtgacggttgcggtctctggtctgctcatagcccttcataatagaattgtattgtgcgttagtcagtgacacggtcggttccccttatctgctcattgctggttgttcaatatctgaatattagttgcttaaaatttccttttccagagcggcgaaatcgtagctgttctgggtaaactgtgtaaagcggttggaggacccagaagaagcgggcttcgcagtctttttcttctggaaagagtcatccatctgctgaatatcggccttgtggcgtacattagcctgtctccagctgttcaggattccttccgcatattcaaagcgatgcttgtccgtagccagagagctgcgctcacaggcttccagtataatatctgtgctgaaaccgtaatctctggtccaacggttgatgaattccagttctttcgctgtgggagaggtactgcgtcctaagctgttcataatggaatatacgcttctgtcgtagcgggtggagaatttctgcgcctgcttcggggtggtgattccttcttccgcccagttgacagcaactttttctatgtatttgaaatctttcttgccgcgctccacacagtactgtagcagataatcgatcagatcctctgaaaaatgcagtacatcggtgaaaaacaggatcgtcttgatctcggaaggagtcagaggcttgccaatataagcttctgcaataaagagaagctgggaggtctcttcccgttccttgaattcccgtaactgatccagagaataagccggctttgcgtaagggttgacagtttcctggggtgttgccggtacaactgcagccgaaacctgcggaatagcagcggcaggaatcacagagactccggcgggagtattctgcatctgcgaaggaccggaggtcagcaggacattatgctggggggcaggagcagcctgcgtgctcagatcacgaagatgaatccctaccagtgttttattatcatcgaagtccagatccaggatctgctgcttttcccagtatttcagtgcacggatcacatccttttccgtgtggttgaacttgtccgcaattccggacacactgatagcctgttccgcattcagcatgcgcagcagatagaaatagaccttcagctgtgcgtcgttggcatctttcatatattcatcaataaacagattggatactaccgtagaatctgcataattatctttatagagcgctatccgtgccataacacacaataccttctttcacaaatcgttcctttttcaaagtaagaccaagtatagcataagacctgtgaaaaagaaatagtcaatttgccggaaaaccttgtaaacactggactttcggactcctggataaaaatgtggaaacggtggatattgtggataccaaaagacggtgtatcgagaaaaccctatatatcggcagatcatcgccaaaatccgacagaaaattatccacaggaaaacaacaaaatatccacagggaaaacggggataatccccggtgtttcctgtggataatgtggacaactatttgccaagcaggttttcaccgatttttactacatctccggcacccatagttatcaacaggtcaccgtttatgcaattttctaataaaaagttttcaatctcatcaaaagaaggaaaatagtaacattcatggcccagtgcccggatctctgtctggagcgtctcagaactgattcccagggtatcggtctcacgggcagcataaatatctgccaggacgactttgtctgccagacttaaggctttggcaaaatctttcatgaatgccttggttctggtgtaagtatgtggctggaagacacaccagagggtcttgtggggataattcgctgccgcatgcagggtggctgcaatctcggtgggatgatgtgcataatcatccacaatggttacaccgccgatggtgcccttgtattcgaatctgcggtctgtaccggtgaaaccgtgcagggcagaagcggtaacctcgcgatcgatcttcagcaaatcggccagggcaatggaagcaatggcattgcatacgttatgctctccgggaacctgcagagaaaaactgccggacacttccccatgccggtgaagcgtaaaggaaggatgaccgaactcgtcataagtaatatccgagggataataatcggcagcggacccgtcactgttgaccgcttctttattaaaagtgatcacgcgacagtccagatctcctgtgatctcctgtaatctgtcaatggcaccgttgatgatcagacagccgtcagcgggcagaagctttgcaaatttatggaaggaattccggatatcctccagatccttgaaaaagtccaggtgatcttcttcgatattcaggatcataccgatcctgggaaaaaagcttaagaagctgttggtgtattcgcaggcttctgtaacgaacagatcggtactgccgacacggatgttgccaccgatgctttttaacattccgccgatggacagagtgggatccgtaccggcatgcagcagaatctcactgaccatggaggtcgtggtggtcttgccgtgagtaccgctgatggcaataggggtcttgtaattctgcatgatctctcctaaaagctgcgctctggtgagatgcgggatccctttttccatagtagcgacatattcgggattgtctttgtgaatcgcactggtaaatacgacacaatcgatatcatcggtaatattcccggcacgttgtccataaaatacattgatcccctttctttccagagtttcggtgagggggcttttggaacggtcggaaccggacacacggaagccggcatccttcagaatctctgcgagaccgctcatgctgataccgccgatacctacaaaataaatggacgaggggtgattaaagtctatctgatacatattggcacttccttaatatagtgtagttgcattgcttattatgtaactattcagagcagttaccttattattaacattatatacataggaacgaaaaaaaacaatccataggtacgattttgaaaaaatgtgtaagtttactattttttgcaaaaccaatccagacggg

SEQ ID NO: 5490 - DNA, 9891 bp, Unknown
  gut microbiota DNA sequence
aaagcttacaaaagataagctaattatgtaaaaaatggatataaaaatcgtaaaatgacaaaaaaacctagtaataaatattcactttcctttggcaatgtgttataatcagattatcacatccgaaggaaagagcaggcactttttcgagacagatggatacatcggataatagccgcgagcgactatttattacaacaggtggaaggctagatagaggtgaggatatgattaagaaagaaatgatagccatgctattggctggaggacagggaagccgtctgggtgttttgacatccaaggttgctaaacctgccgttgcatttggaggcaagtaccgcattatcgattttcccctttctaattgtattaattcgggagtggatacggtaggcgtactgacacagtaccagcccctcagactgaatacccatatcggaatcggtattccctgggatctggatcgtaatatcggaggagtgaccgtgctgcctccctatgagaagagtaccaacagtgaatggtataccggtactgcgaatgcgatctatcagaacctggagtatatggagagctataatccagagtatgtgctgatcctttccggagatcatatttataagatggattatgaagtgatgttggatttccacaaggccaacaatgcagaagttactattgcggtaatgcctgttcccatggaggaggccagccgtttcggcatcatgatcgcagatgagaaccatcgcatcaccgaatttgaagagaagccggaacatcccagaagcaatcttgcaagtatgggtatttacatatttaactggaagacattgaaggaagcactgatcgctatggcagatcagccggcactggattttggtaagcatgtcattccttactgccatgaaaagggggctccgctgtatgcgtatgagttcaccggttattggaaggatgtaggtactttgagttcctattgggaagccaacatggaactgatcgatatcgtaccggaattcaacctgtatgaggaatactggaagatctataccaagagcgagatccagccccctgattatattgctgccgacagtgtggtagagcgcagtatcatcggtgaaggctccgaggtctatggagaagtatataattccgtcatcggttgtggtgttacgatcggtaaaggaaccatgatccgggattccattatcatgaaccagacccagatcggtgagggatgtgagatcaacaaggcgattatcgcagagaatgttgtggtaggtaatcaggtaaaattaggtgtcggtgaagaagcagagaatgatacggcacctcatatttacaaccacggacttgtaaccatcggtgagaagagcgtgattcctgacggtatcagcgtaggcaaaaactcagtgatatccggagtgacagctgctgcagattatgaggattcccagctcgcaagcggcaaaacattaattaaggcaggtgaatagcagtgagagcgattggaattattttagcaggcggtaacaatcacaggatgcgggaactttcccagaagagagctatatgtgcgatgccgattgcaggcagctaccgcagtattgactttacactgagtaatatgaccaactctcatattcagaaggtggcagtgtttactcaatacaatgcaagaagtctgaacgagcatctgaattcttccaaatggtgggatttcggacgtaaacagggtggattatatgtattcactcccgctgtaacagcagagaacagcaactggtacagaggaaccgcagatgcaatttaccagaatctgcagtttttgaaggacagccatgagccttatgtagttatcgcatccggcgactgtgtatacaagctggattataataaggtgctggaataccatatcgagaaaaaagcagatatcactgtagtctgccgcgatatggaagccggtacgaatgtagagcgtttcggtacgattcgcatgaacgaggaaagtcgtatcgaagagttcgaggagaagcccttacaggcgaagaccaataccatttcctgtggtatttatgtggttcgacgcagactgctgatcgagatgatcgagaagtgtgctgaggaagaccgctacgatttcgtaagagatatcctgatccgttacaaggatctgaagagaatctatggatacaagatcaaggaatactggagaaatatcgcatctgtggatgattactacagcaccaatatggacttcttgaaagcagatgtgagaaactatttcttcaagcagtatccggacgtatattccaaggtggatgacctgcctcccgcaaaatataatcccggttcccaggtgcgtaacagcctggtatccagtggatgtatcgtcaacggtgtggtagagaattccgtgatctttaagaagagctatatcggcaataattgtgtgatcaagaattccattatcctcaatgatgtgtatattggagataacacgcatattgaaaactgtattgtagagagccgtgacacgatccgtgcaaattcgtactttgtgggagaaggcgaagttaagatcgtagttgagaggaatgaacgatacgtgatctaagtgatccggattctcaatgactacattgcgagactgcttgcaggcagggcaatgtggtcattagggaatctaacagatatgagtaagtagggcgatagcccggaatacgaatatctgtagcgtttcgagagcctgcagggcggagaaatgcgtagggatcacgataacaccaagggggttagcaaatgcagattacagatgtacgtgttcgtaagatcaccaaggaaggcaagatgaaagctatcgtatccattacactggatgatgaattcgtcgtacatgatatcaaggtgatcgaaggtgaaaagggattgttcattgcaatgccgagcaagaaggcaacggacggagaatacagggatatcgcacatcccatcaattcttccaccagagagaatttgcaaagggtgatcctggagagttacgaaaaagcattggaggagccggaagaggcaatctaagctgcatagggataaacaacaaaagctgttgtcaacagagtgatctgtggcaacagctttttaaattgcagttatcttttattccccggacgaaaatcaggaacgctgataagcacataatccgttttcaaattgcagacgatcgatcaattccagggaaccgccgattctccggtatagttctatggtgcctgttgcattgccgccttcccagagaggaatgtcggatacttttccgtcaggactttcatagagtaacggcatcatctgctctttgctgcagcttccggagatccgtacaacggaagtgcggttctgggctttgaaatgccagataaaacgtttgttggtctctttcactttccacttgcagcgggacagtgtaagaggtctgccaaaatgatactcgaaatcttccccggtataggtcagctgcatcagaatcctgcgtcgcatggggaaaaagagaaatttcggacaacagccgtcgatggccagagccgaatgcttcaattcccgcccggttttctcactgatcaggtggccggaagcaaattgcagccagggttggttgtaactgcggccccaatgtttgtccgcatagccataggatgtctcgggagttacctcgtaggtgacaccgttcaaaatgacggtcccacggaaaaaggtacggataccttccccatgccagaaactttccagggcatgaaccgcagtaaaaaaagcattggcaatatagccggtatgacaggcaaccgccttatgcacttccagatcccagataaaactgcccgcatcggtcataagagagcgatgtcttgcaacctcatcggagatatcaatcgaaccactgatccggttttcgctgtagacacaatcctcaaactgcatgtaaaagggatcctgggccacctgcagagaggtcaggggataatatgcccgaagttggagcccgctatctcccggctcagggaatacaccggcttttatgcagagataagatggtttcagaccatgacgtttatagtagggatgctgacctaaaataggctgggaagtaccgagagccggatttaaaatgctgtattctacaaaaaaagtgcgggtttcctgcgtcgtgggacaaatgccctggaaggaatgccaccagcgcatgtagccacgttttgcatcggaaccccgcaacatatatgcatttcttttcagatcagataaattcatggatcaaagactcccccgcttttgtacccctcaaaacaacatttcgtagataatatgtatattatagtactatatgttgtgaatgacaagagtgtcggaagaatcttaagaattatttagatattttctttgatccggatatctaccgctacataattgtattctttttccggattttcgccggtcgtcagataggcaaacagcagggaaagagggttgctgccctgaattttcggctgttggcagatggtggcggcaatggtgccattttccagcatttggcgtgtggtggggaccagatcaaaagcgatgatccggatcgccttttttttacccagagcctctacactgcggcagcctccgtagacaccgccggcggcgaagaacagtgcattgatctccgggtgctttgacagaagtgtcgttgtcttttcgtagctttccacttcgtcatcgtggatctccacggtatccacgacgcggatccggtcagagaaaggttctaatgtcttcagaaatcccgcaatgcgctctgtgtgacagagaatgttggaggaacctgtgacaatacccacgtttaccgtgccggaggtcatcaattgcagaagaccggcggcggtggcaccactgcgggtgtagttgctgccgacataagcgatacgtctggaattttcaatgtctgtattcagcgtgaccacgggaatcccctgctcgtataaagtattgatgcagtcgcggatccgttcgtcgttgtaaggggtcatggcaatgccgttcacttcttctgcaagaagctctttgactgcctgtaactgggcctccacaccgaaagaaatctgtttggtgatcacggtacagttgtaacctgccagctcttccgccttttcattgattccggccagaacatcctgaaaaaaaggattcccggtggaaaacagaatgacacccagcttcagccgctttttctgcgctgccagaacgagaccggcgcggttgggtttatagtccagctcttttgcaatttttctgatcttttcggcggtctccgggtttactgcgccgcgatcgtttaagacgcgatccacagtgccgcgggatactccggccaatgcggcgatttctttgatggttgccatagaatactcatgcctttccgtaatatctgtcccaggtatctagttataaaagtatcatatttccagaggaacgtcaacgaaagtgcagaatttgtccgggcacgctgaatggatgatgaatgatgaaattccatcttcactttttagtgaaaaaatgctgaaaacataaaaacttctacttgaaaaattttttcacaacagttatgataagactataacgtgcacgggcacgaaaaggaacgaaaatggatcacaacacaaacgtaggaggaagattcatgctatatattggaatcgatctgggcacttcggcggtaaaactgcttttaatggacagtgaagggaacatccggaatattgtatcccgggaataccctttgtatttcccacatcccggctggtcggaacagaagccggaggactggtatgaacagactatggagggcatccgggagcttttgaaagatgcggacaagagccaggtggcaggcatcagcttcggaggacagatgcatggactggtcattctggatgagaaggatcaggtgatccgccctgccatcctctggaacgatggcagaaccacagaggaatgcgattatctgaataatgtgatcggcaaagagaagttgtctgagtacactgcgaatatttctttcaccggatttaccgcgccgaagatcctctgggtgaaaaagaatgagccagagaacttcgcacggatcaaaaagatcatgttgccgaaggattacatagcttatcgtctgaccggcgtacattgtacggatgtatcagatgcttccgggatgttattgtttgatgtgaagaaccgttgctggtcgaaggaaatgtgtgagatctgcggagtgagagaagagcagttggccacttgttatgagagttatgaaaaggtgggctgcgtattgccggaggtggcagacgaactggggattcccgcaaatgttgtggtagcggcgggagccggggataatgcggccgccgctgtaggtaccggaactgtaggggacaatatgtgtaatatttccctgggtaccagtggaacaatctttatttcctccaatcatttcggagtagatcagcacaatgctctgcattcctttgcccacgcagacggacattaccatctcatgggctgcatgctgagtgccgcttcctgtaataaatggtggatggatgagatcatcggaacgaaggattatgccgcagaacaggcgcagattgagaagctgggagaaaatcatgtctacttcctgccgtatctcatgggcgagcgttctccccataatgatcccaatgccagaggaacttttatcggaatgaccatggataccaccagagccgatatgacgcaggcggtactggaaggcgtggcatttgcactgcgtgattcactggaggtggcaaaatctctgggaatccatctggagcggaccaagatctgcggtggcggagccaagagcccgttgtggaagaagatgatagccaatatcctgaatctgaaggtggatgtgatagaaagcgaagaaggaccggccatgggcggtgccatgctggcggcagtagcctgtggggaatatgcaagtgtggaggagatcgcggagaagttcgtcaaagtcaccggaacggtagaaccggatccggaactggtggcaaaatatgaagaccgctatcagaaattccgccagatctatccggcatgcagaccgctgtttgagatcattaaataacgcgtagaaaaatcaaacaacaacataacaaaatgaacctcgtaattttaagtttgagctataatagagaaaggttggtagagtagaatgcatattttatctgtaaaagatcctgcatttcgtaagtatggcagagtgatcaccaatgtggattttacacagctggtggaagaaatgaaaaagactccggttcctgacggcgtggtgtacgagcccgggatcaatgctttggaagcattacctgtgaaaaaagaactggagaccatcacatacggagaaatgcctgtacagatcggttactgcaatggccataattccaaactgaatgccgtggaatatcacagaagttccgaaattaatgtggcagcaacggatgctatcctgatcctggggctgttagcggatgtggcagaagattttacctacgatacttctaagatggaagcatttttagtaccggccggaaccggtgtagaggtcttcgcaacttctctgcattatgctccctgtggagtagacggacagggattccaggtagccatcgtgttacctcagggcactaactatccgttagaaggagcacatcagaaggtggagcagggcaaggcacccagcgaggatgcgctgcttgccgctacgaacaaatggctgatcggccatgcggagggtggacttccagagggaagcttcctcgggcttgttggagagaatctggatgtcagcaaataatggtggcagaataaaaagatttgaacgccggaatcccctgcatggatgtatgacggcggtaaaataaatggtgtagagaaaaagaaaacgaaaataggaggattacaaaatgagtaatttacccgaagtaaaaattggcgttgtggctgtcagccgtgactgtttccccgagagtctttccgtgaacagaagaaaagctctgatgaaggcttatactgagaagtatggaacagacagtgtctatgagtgcccggtatgtatcgtagagagcgagatccatatggtacaggctctggaagacatcaagaaggcaggctgtaatgcactgtgcgtatatctgggcaactttggccccgagatttccgagaccttactggcaaagcattttgacggtcctgcaatgttcattgcagcagcagaagagacccagaatgatctggtaggcggcagaggcgatgcttactgcggtatgctgaatgcaagctacaacttaaagcttcgtaatgtaaaagcttatatccccgagaatcccgtaggaactgcagcggaatgtgcagatatgctgcatgagttcatttctatcgcaagagctattgtgggcttaagtgatctgaagatcatttccttcggccccagacctttgaacttcttagcttgtaatgcacccatcaagcagttgtacaatctgggggtagagatcgaggagaactccgaactggatctgttcgaagccttcaagaagcatgatggagacgagagaatccccgccaaggtaaaagagatggaagcagaactgggggcaggcaaccataagcccgaagtactgcctaagctggctcagtatgaattgacactgttagactggatcgaggctcacagaggatatcgtaagtatgtagccattgccggaaagtgctggccggcattccagacccagtttggtttcgtaccctgctatgtgaacagccgtctcaccggtatgggcatccccgtatcctgtgaagtagatatttacggctgcttaagtgagttcatcggaacctgcgtcagcgcagataccgtaactctgctggatatcaacaacactgttcccgatgatatgtacgaagagtccatcaagggtaaattcaactatacccacaatgacaccttcatgggattccattgcggtaacaccaactccaagaagctgacctcctgcaacatgaagtaccagatgatcatggcaagaacccttcccgaagaggtaacccagggtactctggaaggagatattgttcccggagacatcaccttctatcgtctgcagtctaccgcagacaacaagctgcgcgcatatattgcacagggtgaagtacttcctgtagctaccagatccttcggtggtatcggtattttcgctatccccgaaatgggacgtttctatcgtcacgtactgatcgagaagaacttccctcaccacggtgctgttgctttcggacacttcggcaaggctctgtacgaagtattcaagtacatcggcgtacccgtagaggatctgaatttcaaccagccgaagggaatgctgtatcctaccgagaatccttttgcataaaaagaacttaagtaactgaaaagttagtttggtgtaaatagtccaaaaacgatgaattccgtacaaaaaaagttcctaaatcaggaatttttgtacggaatttctttattttgcttatgtagcgaaaatagagactttttacatatcaaaatttcatatttttgtatttttttcgcagaaattggcgttttaaatacaaacagaactcccggagtagcagaaggccctcaggcagatgtctgtcggagcgtgttgatattttcttaagcagtggtgagtcatcagggtggagcaaacacgatgtttgcgacaggcggccggcgacatggatgtcgcctagagccgtgcccgttcggatgagatacactttatccactgcttt

SEQ ID NO: 5491 - DNA, 169 bp, Unknown
  gut microbiota DNA sequence
tctatttttatacggcgacagccgtctatgaaataagattgacagcgttctttgctgacaatcttatgaataggcatggttcgtagcggagggagccttagaccagacgaactcccggagcatgcgatacacatgtctcgatgtaaggtctccggatgtgaattttcta

SEQ ID NO: 5492 - DNA, 20746 bp, Unknown
  gut microbiota DNA sequence
ccttcaatggattcatagtctttctgttcctggtaagtgaattttaatttgcgtttctgtccgtttttccagtttttagaagtagtttcctcatcggcgttcttcggctgggatgctgccgccgttcctgtgctctctgtgttcccctccgcagctttcctattggcataatctgtgtaaccgccctcatactgcaccatgcgggtatcctccagggcgaagatcctgcggaccacacgatccagaaaataccggtcatgggacacgacgatgacgatgcctgggaacgtgtccagataatcctccagtacctgcagggtggcaatatccagatcgttggtaggctcatcgagaatcaggacattgggtgcccccatcagtaccttgcataattgcagtctgcgccgttctccaccagacagctttcccagctgtccgtactggtcttccccggaaaacaggaaccgctccagcattctcgctgccgtgatctgtccatcctccgtggtgatatattctgccacatcccggatataatcaatgactctctgctccggatgcatcatggtgtcgtcgatctcctgggcataatatcccagcttcacggtctgcccaatctcaatatgtccgctgtccggagccacttcacccaggatcattttcatcagcgtggttttaccactgccgttagggccgataaatcccacccggtcgtccttgccgaacagataggtaaaatcacggatcaacactttatcgccatagcttttggatacattctcgatctctactgtggtacggcccagtctggatgctgcggaagtcaattccactttgccgtccgtcacgggtcccttcacatttttcaattcctcaaaacgctgcaatctggccttctgcttcgtagagcgggctctggcgccccgctgtacccaggcaagctcattgcgtaggatattcaggcgctttttctcactggcctgtgccatctcctcccgctgcattttcagttccagatagccggaataattggcatcataggaataaatcttccctttgtccagttccaggatccggtcagtgacactgtccagaaaatagcggtcgtgagtgaccatgatcatagcgcctttgcggcggcgcagctgatcctccagccagtcagacatggaattgtccagatggttggtaggctcgtccaataacaggatatccgccggggacaacagtaccgataccagtgccagacgcttgcgctgtccgccggacagctgcccgcagggctgatcaaattccgtaacccccagtttcgtcagcatgcttttggcatccgcctcgatggttccggcgttttcctccacacgattgccacgcagcactgcctccagcaccgtctcctccggagcaaattccgggttctgcggcagataacgcaccagacaatggtttgccttgatcacggtgccatcatcggcttcctccagcccggcaatcatttttaacaaagtggattttccggttccgttaataccaatgattccggccttttccccttcctgcaggaaaaaggaggctccgtcaaaaatcttgcgtactccataacttttggtaatattatcaacagtcaatatattcatctgtactacctcatattttctgaatgaattctctggatggcttatctaaacttttttctcaaagaatcgtatcatttttcatgtgctatgctttccaaatgtagtatactataaataatctattttaggaaagaaggttttcgcatgaacttaaaagatgctgctgcgaatctgaatcaggcgcacccggaagacatccttcatcccctctatactccctggggtgaaatgatgatgcgctccggttcctatgacgatatcctgtcggaatatccccgtccgcaaatgaaacgaacggattaccatacgctgaacggtctctgggaatatgcttttgtgcccgcagatgggagcagttcttcggaggatcctgcgtattttaccgctcagggttccatccgggtgcctttttctccggaagccctgctttccggagttcacagacggctggagcccacggagtacctgtggtaccaccgggaactctcttttaccacggaagagctttcccaaaaagaggaaactatgcgctgcattctgcattttgatgcggtagatcaggaagcaaccgtcttcctcggcacaaagcggcttggcactcacagcgggggctaccttcctttttccttagacatcacagaatatgtaaacgcagatccggtatctctctatgtaaaagtccgggatctgaccgacaccggttacgccaccagaggcaagcagaccctgaaccgcggcggcatgttctacaccgcccagagcggcatctggcagagtgtctggtacgaatgggttccggaaaactatgtgatcaattataagatcaccccggagtacaacaaggcttccgtaaccttcgttctgtgttctccgaagccgttcaaccatttggaattccgggtgaacattccctcctgcgacggaaccctcgcgcaggaaaataccggttcactcacgcggatgcgtgtacgtaaaatttccgagcaacaggattcctttgggctcacgcataccacggtagtactttcttttcccgccagcgtcacctattccgctacagctcccgcggatgtgccggagccggtgaatttcaagccctggagcccggaacacccctggctgtatccctttaccctgaacgccgatgaggataccgtggatggttattttgccatgcgctgctactccgtagagccagattctaagggcatccctcgcttctgcctgaatcacagaccttattttctccatgggatcctggatcagggctactggtccgacgggctaatgactgctccctgcgatgaggcttttgtctatgatattaaccttgcaaaaggcctaggattcaacatgctccggaaacatatcaagatcgaatctctgcgctggtattaccactgcgatcgtctgggtatgatcgtatggcaggatatggtcagcggcggctctacctatcatatgccctgggtgtgttatatgccaacattattcccccacatgtccgcccacacgaaggacaatcattacgaactgttctcccgtagctccgaggaaggccggaaaagctgggagcaggaatgtttagacaccatagatcatctgtacaatgtcccttccatcgccgtatgggtgcccttcaacgaaggctggggacagttcgatgctgcccgtattgcgaaaatggtggcaaaaaaagaccccacccgtccgatagaccatgccagcggctggttcgaccagaaaggcggggatttccgcagtattcataactacttccgtccgttacaggtaaaattggatgaaaaaagggctttcgttatctcggaatatggtggctacgcctgtcacatcgacgggcattccagtgtggaccgggtctacggatatcagaaatatgacaccccggaggagatggctgctgccctaaagcagttattttccagacaattatttcctctgatctcaaagggcttgagcggtgcggtatatacgcagctctccgatgtggaagaagaggtgaacggtctggtgacttacgaccggcgtatcgtcaaactgcctgtgggacatccgtttgcggcaccatcctcttttgcagcaccttactcacatggaaataagccggaataaggaatgcatccgccatgatccaggcaatgggactgcccaggcataccccggtgaagccgatgattggcaccagtccaaagcctgccaaggatctggcgatcatttcgaagacacctgctaaaatggcgaatttcgggaaacccataccctggatcaggaaacggacaatgttcaccagtgcaagcggaatatagaatgccgtattccataacagaaaagcacacacgttggcaatgatctctgcctcgccgccgtccacgaacagctgcgccagcggaccgccgaaaaatactgcaatcaaaaatgcgatcacagagtatcctacccccaacagtacacaggatttaagtcccttgccaagacggtccagtttgccggctcccacgttctgtccaccgtaggttgccatagtggaacccatggcatcaaaaggacaggctaagaagttaccgatcttgccgcctgcagtcatggccgcaactgccgcagaacctaaggtattggctgcagtctgtaagattacactgccaatggcggtaatggaatactgtagccccataggaactcccatgccgcacaacaccatcatcatatgtccgtccactttccattcttccctgtggattcgcaggatctcgaattttttcaccatatagaccagacatgccacacctgagactccctgggagatcaccgttgcccaggctgcccccgccacgcccatgtgcagggatatgataaaatacagatccagcacaatattaataacggaagacagcactaagaataccacaggagtcttgctgtcgccggttgcacggatcacacctgccacgatattatacagatacactgtagggataccgatgaaaataataaaaatatagttatacgccccatcaatgatgttggcgggtgtcttcatccataccagaatatcccggcacaggatcgctgttacaacggtcatgatgacggaaaatgccagtcccagccaggcgcagttggccacatatttgcgcatgcccacataatctccggcaccgaatttatgggacacggggatggcaaatccattacagacacccatgcagaaaccgatcaccaggaagttaatagatccggtagatcctactgccgccagatcatccacaccaagaaaccgtcctacgatcatggtatctaccagattatagaactgctggaataaaaatccgaataataacggcacagcaaagctgatgataagtttcatggggctgccttttgtcaggtcttttgtcatggtaataacctctccatttttcaaatcaaccgcaagcactgaatttatcagtgtttcctgttatttctatcgttgagagtatatacgcggcgctccaaaaaagcaatatctttttttgcacattttatgtttttttgctatactctttttgtcatttttttacaagcattgttattatgagaggggaattgtcatgaacgaatttttgaaatatctgaaaatgatacctgtaattatctatccttatatttatgtattgattcttgctgtcttcttcctgtttgtaggcgtactgccagaggataccacggatatctccctgcttgtcctgcttatcatcgcagtcatctataacctgtattcctttgtcatcgtaatcgtcaatgcggtacagaccgccaggggaaaattgactgcagggcaggctgcccggatgaacctgatcatcaaaggaattcagattcctgcttatatcatgcactttatcctgggtttcatcggacttgccatgagtgtctggggcatcggctttctcctgtgggcagtactcattgatcttttgacgatcctgctcaccggcatcagttccatcggctgcagtattcgcatgcgcaaagaaaggcttgtctccctgccgggtgccatcttcatggggatcggatgttttatctactgtgcggatgtggcgatcgccattgtgtatgttgtgaaagcccggaagaaatctcctgctaaatagaaagttagcctagctacgagccatgcaaaaatagagtggaacacctcggtgggagcttgctcacacaagaggttatttcgttctatttttatactgtgcgtccaacggacacactcgacagccgtctatgaaataagattgacagcgttctttgctgacaatcttatgaataggcatggttcgtagcggagggagccttagaccagacgaactcccgaagcggcagaaagccctcaggcagatatcggtctccgagtgtgaattttctaaagcagtggataaagtgtatctcatccgaacgggcacggctctaggcgacatccatgtcgccggccgactgtcgcaaacatcgtgtttgctccaccctgatggctcaccactgcttaagaaaatatcaacacgctccgacagacatctgcctgaggaccttctgctactccgggagttctgtttgtatttaaaacgccaatttctgcgaaaaaaatacaaaaatatgaaattttgatatgtaaaaagtctctattttcgctacataagcaaaataaagaaattccgtacaaaaattcctgatttaggaactttttttgtacggaattcatcgtttttggactatttacaccaaactaactttccagttagttcttaaagctatgaataggtgcggggatgcggccgccgcggttgacgaaagcatcacaggagaaggtattcacgggcatgatgggtgcataacctaacaggccgccgaactccacggtctctcccacgccttttccgattacggggatgattctgactgcggtggtcttctggttcaccataccgatggccatttcatccgcaatgataccggaaatggtggttgccttggtgtctccgggaatggcgatcatatccagacctacggagcagacacaagtcatggcttccagcttctcgatggtgagggctccggcattcacggcatcgatcattccctgatcttcactgacaggaatgaatgcaccacttaaaccgccgacgtaggaagatgccataacaccgccctttttcacctgatcattcaacaacgccagggctgcagtggttccgggagctccggcatgttccagaccgatctcacacaggatatccgctacgctgtcgccgatggccggggtcggtgccagagacagatccacgatgccaaagggaacatttagcatccgggatgcctcctgtgctaccagctgacctacacgggttaccttaaaagcagtcttcttgatagtctcacagagaacctcgaagttctcgccgcgcaccttttccagtgcggtctttacaacgccggggccgctgacaccgacattgatgatcttgtctgcttcggtcacaccatgaaaggcacctgccatgaaaggattatcatccggtgcattacagaatactaccagctttgcacagcccagggaatcatcttccttggtatactctgcagtctccctgaccatctcacccatcagctttacggcatccatgttgataccggtcttggtggagcccaggttcacagagctgcacacacgctctgtggtagacagcgccagaggaatggaacggatcagcagttcgtccgccggggtcattcccttgctgaccaatgcggaataaccgcccaggaagttcacaccaacctcatgtgctaccttatccaatgtctttgcaatacttgcaaagtcttctatcgtatgacatgccgcaccaccgatcagtgcaatgggagttacggaaattctcttatttacaatggggatgccaaattctctggagatctcctctccggtcttcaccagatccttggctgcttcgtagattttgttataaatcttctcatttaatctgtccagatcggaatcgatacagtctaacaggctgatacccagtgtgatggtacgcacgtccaggttctcttcctcgatcattttgttggtctctgttacttcatataaattgatcattacggctcctatctgccccttcgggtcttatttatttcgaaatcgtggggcttatcagatgcggtgcatcttgtcaaagatctcttccttctggcacttgatcactacgccaatctcttctccgagagcagccagttcatctgccatatcaccaaaagttttctgcatctgattggtgtcaacgatcatcatcatgttaaaatatccctgtacgatggtctgggaaatatccaggatattgatgccgttttccgcaagataggtacatacctttgcgataatgcctactgtgtccttaccaactaccgtaataattgttcttttcataatcgccctcattttctgcatgaaatcatgctattatttttatctattaaactacactttactacaatttgcaacctcaagttcagcctatgaacatattcagacacagaaatcatacttgcatcattttgtgagcgaatatgtttcaggcaccgagcgccaaactatggagcaaagctagtcatgaaatgacgcaaaagcgtgctatgatgcggctccaacgaataatgctggctgatgcgctgcgcatccgctacgcaatattgatcaccggagatacattgctcctgtctgccaccatcatccggaagtcttccgcccggtaagggttctctcccatggtgatttccatccggactgcttcataggccagctccggaagattattctccttgctgagatgtcccagcacgatagcctgcagcttgtcatgcaggattcgacagagcagcttgccggaattttcattggaaaggtgtcctctgtcccccagaattctctgtttgagataatagggataaggtcctacctgcaacatcttcacatcatgattcgcttccagcagcaaggcatccattcccttcaggcactccacggtgtaatcattatagactcctaaatccgtacagattcctacctttttatctccgtaagcaatacgatagcccaccggctgtgccgcatcatgggagattttcatgggattgacagtcagatccttgatagtcagtttcacatcttccttcacttcccgaaacagggctggatcgatcttgcccagattccccatcttctggatttcttccagggttcccgttgtggcatagatcggcacttcatattttctcgccatgacacccagtcccgccacatgatccatatgttcgtgggtcaccaggatgccatccagatctcttccggtgagtcccagactgttcagcccggcctccgcctttttgccgctgattcccacgtccaccagcagatgcgtggcctctgatcccacgtaaatacagttgccgctgctgccgctggcaatactacataatctcataacttcttaatctcttttctatcttacttctgtcttactctttgccgttttccatcttcggcattaatgcatactagtgcatgcttttccagtagatctcgatcacatctccctctttcaaaggttccatgaactgtgccgggcgtccatttaagttcgtcacaatggatctgcctgcggatgcggaggatcccagatcaaaatcaatataatcaaacacatccacaaatacataggaagccttaccctgcatggtgatgggggaatggttcacgatcactgttaacggatgcggtccctgtggtgacacgctttggctctgtgccgtctgttccacgctttcgtacttttcgtcctgcttcccggaagtcccctgcgttgtcacggaagccgtcccgttttctgctgcagtctctgtcccctgtgtcatcgccgcttctcctgccacagcctctgccttctgcatcacaggcccttctccataaacaggctcttctctataggcatcctcttctgtgtccgcatccggcaggtctgcataactcccttccggcagcgggttcttcatatcccagcttacggtgaaatgctcataaactctggtatccggctgcgccgctgtatcattgaccctgatatccgcaccgagaggcacatccagaaattctgcgatttcctttacagtataagaattccgaatccgaatatcatcgttctggccgatccggtagaattcattctctctgtgaccgttgacttccgctgtcttcggcagactgatctgtttaccgttcacatagacctgcagtgcatcccccagttcagagagttttcccagctccagcaccgccggttcgccctccgtggaaggtgttaccacaatgcggtccccattatgtacctgggtatacatatccgcctcgtctccgttgacccggatgactgctgcctctccctgttcgccccgcaccatacgggtcttaccattgacagtaaacagaagggcttccccttttctggggaacagctggtcattggggaactgcatctgcatagcggcatctgtcacggataatttgccgttatcatagagctttacccgctctccgttaaattccacgaaaataaaattattgctctgtacataatagcttaaacagataccgataggtgttaccatcatggcatcctttctggcattttccagttcaaatgtaatggtctgcatgacttcctgtccccggattgccacacgttccttcacgatgcccagcttttctgccagcttctccgtgtaaccgggcaccattccaccgccgcctaccacgaacacggcactgaccggtttgtccccgttcagttctttgatggtatcggataccagctgggtcatacgttcgatctccggatccagcagttccagcacttcgctggctttgatggtctggggcagtcccatgatatcttcgtattcgatagtctcctgggttctgcattttctcttgatctgctcggccacctcgaattccacgagacaatgctgtaccagaatatccgtcaggctgtctcctgctacggggatcatgccataggctgtgatggttccctctttggtaatggaaatatcactggtgcctgcacccacgtccaccaatgccatatttaacatacggaacttctccggaattgctacctgaatggcagcaataggctccagtgtcagattcgccacatgcaggcccgccagttctactgccttatacagaccgtccactacatcatccggcagaaacgtggcgatcagatccactgcaatgttttttgccttatgtccctccagattacccatctggtagccattcatgtaataccgcatggccgtataacccacacagtagaatttcatatctgtatccgtattgctgttctggaattcctcgtaagccttctccacgcccatggtacacaaggaatacacatcttcctgcgtgatctcccggtcgctctcaaagctgtgctccacataggtagtgacggtacgcagcacacggcctgcagctgcgatacatacttccgtaagttctctgcccagatccgcttccagctgttcctttacctgggaaatagtctctcccaccttgccgatgtcatggatctgtccgtccagcatggctctggtctcatgctccttggagcgctgtgccagcacatggaatttcccaccatttaagtatcctaccgtacctacgatgcttctcgtaccgatatccagtccgaataccagctgtccctgtttttcttttactccttccatgaatatgcctccagtttctgtctgatctgtctgtagctgtcttccagactgtcactgttatcaatgacaaaatcacaatgctgccggaattcttcctccgaaagctgtgatgctatgatcttttctatcttctccggtgtgtaattgcggctttccgaaagtcttcttctgcgtacatcttctctggcgtagatataccacatttcatccactatatgttcatacccgctctcgatcaaaagtgccgcttccacaaaaaacagttccacatcgcccttattctttgcctctgccagacgatccgccagatatttttttaccgcaggatgaatgatggcattcacctgttccaacagtgtcggatctgcaaaaatctttgccgccattgccggcttatcgatctgtccgtccggcgcaaggattccgtctcccatcagcgctaccagcgcatgatagccttcggttcccggttccttgactttatgcccgatctcatccgccagatagatctcacatttataatgctgtccgatatattttaaaatctctgttttcccggcacccacaccgccggtaatacctataaaacgcatttatttcgcctcataccagttattgcccgtgtgcagatcgatttccagcgtcaccgccagatctgccgcggacttcatattttccgtaagaatctcacggactcttgcctcttcctcctgtgcggtctcaaccaacagttcgtcatgcacctgcaggatcagacgggattttaacccttcctctttcaatgctttccataccttgatcatggcgatcttgataatatccgccgccgttccctgaataggggcattcatggccactcgctcgccgaaggaccgttgcatgaaattggaggatgacagttccgggatagggcgtcttctgccaaacatggtctctgtatagcccttttcctttgcatccgccaccagtttgtcgatgaattccttcaccttcgggtaagtggcaaaatactgttcaatgtactgtgccgcttcctttttgctgatactcagatcctgactcagtccaaaggaactgataccgtagacgataccgaaattgactgccttggcattccggcgctgcagatccgtgactttctcgaaaggagtatggaataccttggatgccgtgatccggtgaatatcctcttcctgtctgtaagcatcaatcagctgttcgtctccggacatatgagccagcactcgcagttcgatctgggaatagtccgcatccatgaattcatagccttctctggggataaataccttgcggatctgtctgcccagttccatacgcatgggaatgttctgcagattcggctctgtagagctgatacgccccgtggcagtaatggtctgattgaaattcgtatggatcctgccgtcctcttcaataaaagctgccagtccgtctgcataggtggactttaacttggtcagacctctgtattccaggatatctcttacaatagggtaatccgccgacagcttttccagcacatccgcagctgtggaatatccggtcttggtcttcttgccgccggggatctgcatggtctcaaacagtacctcgcccagctgcttgggggaattgatattgaactctgttcctgcctgtgtgtgaatggactgttccagttcctcaatgcgggccaccagtgcatccccataagccttcagttcctcccgctttacagccacaccttctttctgcatgtcatacagtaccagtgaaagaggcatctccatctcctccatgagacatttcatgcctgctgcctccagcttgtccttcaggacttttttgcctttccgggagacataggctccgtagcacgcatactccatggctttcccggtgtcctcggaaagcagtgtccggaaatctctcttgccgaatacttccgctctgcccgggatcagaattcccagatgctccgaagcaatggcctccatgtcataatcattcttcagaggattcagcagatacgccgcgatcaatacgtcaaaatactgttctgtactgctgcggtccagatagtcatactggtgcttcacatcaaaggtagcgatctgtgtatccgtacctgcggaaagttcctgtagagcttccgtgatctctgcggtgtcatccacagattccacctcttccgcaaacagacttaactgcccttccggttccttttcatgggtcagggcataaaataccgtctcctcatcggacacagacaatgccacccccagcaattcttcttttttcgtagtagcatccactggttccgtgatcagccacaggccgatctccttctgtttctgcgcttttttcagatattgtaaaaattcttttttatcttcaatctgtcggaagctttctgcgatcttgctgtcattggcggcggcatctttttcaaatcttcccaacagatttttgaattccagacgtttgcacaaggtataggcttccggggtatagaacccctctgctctggcctgttcgtaatccaactgcaattcgcagtcggtcttgatcgttgccagcgtcttgctcagatctgccagatccttatgctcgatcagggattcccggatactttttttcgagatttcttccacatgggcataaatattatccagagaaccgtactccaccatcagtgcctgtgcggttttctctcccaccttcggcactcctggaatattatcggcggtatctcccatcagggctttcagttcgataaactgtaacggagtcacctgataggcagccagtacatctgcggcataataatcctcgatttccgttctgccctgcttcgtcttcggaatccggatcttgatatgatccgtggcaatctgcagcagatctctgtccccggagaccagtgatacttccaatccggcctgctctgcttttttggccagcgttccaagaatgtcatctgcttccagtcccgcctgctccataatggtaatatgcatggccttcaggatttccttcatgacgggcacctgctcccgcaattcctccggcataggctttctcgttcccttgtaagcctcatacatcttgtggcggaaagtcggtgcatgaacatcaaaagccactgccagatattccggcttttcctcctccagaattttaaacataatattcaaaaaaccataaatggcatttgtgtgcagtccctctgcattactcagatccggcactccgtagaatgcccggttcaatatactgtgtccgtcgatcaataccagtttctgactcatactctgtctatcctatcttaattctatcctcttgattctatcaggtgtcgctaagagatgatccatcccagaaatcccataagaaaaatcaccgtcagcacttccagtacagcccctgtcttcagaaaagccatatgaaatcttaccttgcgctttgcttccgcaagtctcagttccagttctctctgcaggtcaaaagcatcgccgtcttccagacgctgcataccttccgttacaaggaactgaatcaccaattcctccttgcagcccgggcattcccgcatatgctccccgaattcctgcaaggtctgaaaatccagttttcctgcaatgaaatcaggaatattcttttcaaattctttgcaattcatgcttccaccctattccaaaacagttctacagattgcgttcccatatactcatacacttctactatacaacatcttgtgtaaaaagactagaaaaatagtagcaagattccagaaaaaaactcttgtcaacttttttaatctatgataagataatctctgttgtgagtgtttgaatgccggcgtgtcggaatggcagacgaggcagactcaaaatctgttggtggcaacaccgtatgggttcaagtcccattgccggcagttagtgcagaatcaaatcggttctgcgctttctttttgtatttttataaccacatcgcatttcctgctttttctaatttttttccaatcatctcctatggattaattgttacaaaattgttacaattcatttgtgcttagctaacacagacgtaaccgaacaccaggcaacaggaaaaggaggaagaaagtatgtgtttcaaattcattaactgttctcagtggttgaatgcattctgcggctacttcaattttggctgctaatatcgttttcgacgaatagagcgttccatagacgcacgaaaaggctctcccgtttgggatgagccttttcttatttctacactttttctatgaatttatacattttaccgatagtcataacggagggtgacatcattgccctgtacctgtacttccgcacagcttccggtgacaatcggcatcatgggtgccagatgtcccagatccacatccatgatcacgggaacattcttctctcccgccacggccagaactgcctggtactgatccagtcccatcatctcctgtccgaaacacaacggtcttccgatgagaaaacctttgacatactgaaaccatccggcttcctccatctgccacatggctctgcggatggcaaaaacattcaggtcacaggcttccaggaaccagatgattccgtcctctttatacttttccagaaaatcctgtgttttatcaaaccgggttcccagtagattcaccagacaatccatacagccgcccagcaaccgacctgaaaagcggatctccggttcctcttctgctgtctgtctgccaagatactttttcagcactctggattccgtggtgttatagggcaacagaggctgttcttcatttttcagagactccttttcccacttgtcatatccatgcacctctttggtctctccggtcaatattccgaaggcatctttcagggatgcatgccagggctccatgccaaaagcggccgcgcaggggccgtagacggaggcggtatcacagatggttgccagcagataggtcatgttggtattgtcagaataccccagataccacttgggctctgctgcctgcagacgctcaaaatccacatggctcatggtctcgcacatcagttctccgccaccgcaggagatcagacagtcattttccgggctgcaatagtaatccgtcagctcctgcccgcatttttcgggggtgttactgataccgatgccctctccggcataacagttggggcctaattgtaactgatagcccatttcccggaatttcttctgggcattgccaaaggcagtgtaataaggttctatctgacagccaaaagaaggggccacaaatccaatggtccctccccgctgtatatgtttcggatatttcattgcttcgtatcctcctatatcgcccattcgcattccgggctatcgcccttcttgctcatgttcgttcacttccctcataggaggtttgctttgcctgcaagcagtcacgccaacctcctatgggtactcccattcgcattccgggctatcgcccttcttgctcatgttcgttcacttccctcataggaggtctgctttgcctgcaagcagtcacgccaacctcctatgggtaagtgttatgcgtcaaaattaatcttattataaatatcgaaacagtcaaaggttgcaaaataatccttcggtgtctcggcacggcggatcagttccacgctgccgtcctccttcagcagaagctctgcggatttcagcttaccgttgtaattgtaacccatggcaaaaccgtgtgcaccggtatcgtggatggcaatatagtcaccgatatcgatctttggcagcatccggtcgatggcgaatttgtcgttgttctcgcacagggaaccggtcacatcgtacttgtggtcgcagggctcgttttccttgcccagtacagtaatgtgatggtaagcgccgtacatggcgggacgcatcaggttcacggcacaggcatccacaccgatgtattccttatgagtatgcttctcatggatgacctgggtcaccagatgtccgtaaggtgccatcatataacgaccaagctctgtgtagattgccacatcacccatgcctgccggtaccagaacttcctcatataccttacgcacgccttcgccgatgactctgatgtcgttgggttcctgatccggacggtaaggaataccgataccaccggacagattgatgaaggtaatgtgtgcgccggtctcctctttcagctttactgccagttcgaacagttctcttgccagagtgggataatagtcattcgttaccgtgttactggccagaaaagaatggataccaaaattctccacaccctttgccttcaggatcttatatccctcaaacatctgctccgtggtgaaaccgtatttagcatcgcccggattgtccatgatgttattgctgatggaaaaatatccgccgggattgtaacggcagctcagggtcttgggcagataaccgatggtcttctccaggaaatcgatatgggtgatgtcatccagattgatggtggcaccgatttttgccgcatattcgaattcatgggccggggtatcgttggaggagaacataatgtcctctccctttacccccatagcattgctgagcatcagctctgtcaaagaggagcagtcacatccacagccgtaatctcttaagatgttgatcagaaaagggttgggagtcgcctttaccgcaaagaactccttgtagcccttgttccacgcaaaagcttccttcagcgccttcgcattctcccggattcccttttcatcatagatatgaaacggtgtgggatatttttctgcgatcttttcgatcatttctttggtaacaaatgcctttttttccataagtatctcctctgcatctatcttatttacagtaacgcacttctcatctcttccggagtcagagtgctcagataagcaggggccacatcaaatacggtcttgcagcccttctggccttcctgattcatgcggtaagcagctcttgcataagcggtcagtacgcaggaagtgaactccgggttggaatccagctttaagctgtactcgatcacatggttgtgctcaccgtttaagccggtcttgccggtacgcagtacaaatccgccgtgagggatacctgcgtgatctctctgcagttcttcctcagtgatgaaatgtacagtagtatcataatctgcaaaatagttgggcatggtcttgatctgctcttcgatctgtgccttgtctgcgccctcttccgctaccacaaaacactctctggtatgcttctgtctggtggtcagaaccggattctcacagtttctgacagcttccagtgcggactctacgggaatggtatactgcttggcatccttgacaccggggatacgacggatggcatcggaatgtccctggctgacacccttaccccagaaggtataatcgctgccgtctcttaaaatggcattggcatacagtctgttcagggagaacataccgggatcccagcctacggaaatcatggctaccttgccgccctcttttgctgcagcatctacctgtgcgaaatgctcggggatcttcgcatgggtatcaaagctgtctaccacgttgaaatattttgcatactctgcggtctgtttgggcagatcggttgcggagcctccgcacagcaccaggacatcgatcttgtcctgcatggacagtaactgatctacattataaaccttcacatctgttaaagtctttactgtagcaggatctcttctggtaaatacggctaccagctccatgtcatcattctgctttactgcacattccattccttttcctaagttaccataacctaaaattgcgactctgatactcatttttctatccctttctattttatcctatttatgagaacgctgcggccgtttccacccggccaaagcgttttctacataattattgctcaccctgcttcaaccgaatgagggcgatctcgttgcgcatggcatccttgaagactctgacaaaattcttctggccactgtaaaggcaggtatcactgctctttcccgtcaccgtaccggtgagaatgtactcggaatccatgatgagacggatctgatccatctgctgttcctcttccttaggctctctgaaatgctccggcaccaggtattctatgatcccggcctttaattccgcatcttccggaaaaggttctctgttgtcttctgaaatcagcaccacttttttctgtgcccggaccagctccctgatctcctccgaccattgctccaggaatccacctgttgcggaaaaataaatacgcttctcggcacccagaagcatgtgccggatcttgtcacagatgtggtcatagccttcgatggtgatatagccttctctaggtaaatttttcctggggccatccgccaccagacgttcttttgctttccgcagataccggatccggttatcgcagaactcggataatgctacagccagatattttgaggaggttccttcgatcacataagcagctccatgctccaccaacgatgccagtccattatagacattggatctggaaatccccgtcagcttcgccacctcatagcctgtcagttcttcattttgaagaagacacaggtaaatggcagcctcctgcctgctcagtccgaacaggataagttgttctatgattgccgcttcttccataggtactccttttagtggttctttacaggaacactatagtaaggattccttgttttgtcaataggggaaatacttattgagaaaagatgtcagtaaagaaatagaaagtgatgccactcctccgggagttctgtttgtattaaaaacgccctttttttctaaaaaaatacaaaaacaggagattttggccttttataagagcttattttcgctaaaataggaaaaataataaaatcagtacaaaaaatgtttgatttagaggttttttgtactgattttgctattttaatgcgatttgcaccaaagcaatagaaatggctgcagcagaaatgcctatggtgtacagatattatgaaaaaagcagaacgtccgcagcggatggaatatccttccggggatgtttgtcggacggtggtgacattttctcgaaaagtgttgaaaatcagggtggtgcgaacaggacgttcgcgacaggcggacgttcgtggagggtatggcagcactacgttacgagccatgcaccctgagtgaaccagcctc

SEQ ID NO: 5493 - DNA, 1818 bp, Unknown
  gut microbiota DNA sequence
catctgacgatgcttactttttgctcatgtggttacttcgtcgcatcaattctgccgcacagtcttacgaatgcaagcattcgacgcctgtcagcagaattgcgctactctgaatagtttacacgttgaagcagcttccacccacaaattccctgcacagagaattattgggaaggctttcactggtcacacccaggaaatactccaggaacttaagcagtctcttggcttcgtaatattccggttctcccttatcgatctggaacaataacggctctgcgaactgctttaacactgccagttcatagatcaggacggaattaaacatggcatccgcatcctcctggaacgggaaaatattctgttcctcaccccgtcgtacagaagcccacatatcgatggtgcgtctcgcatccgcacctctggtcctcgcatctctgaccatacggcggagaagtcttccgtccgtagtcgggatccggttatgctcatcaatattgatattggtcaatgcactgatatagatcttgtatttactctcctcgggaagtgcataagatgtcttctcattcagaccgtggataccttcgatcaccagaatatcatccggtcccagttgtttgaaattgcccttatattcccgctttccggtcttgaagttaaaggaaggcagctccacacgttcaccggctaacaatctgcacatgtcatcattgaactgctttacatcaatcgcttccagacattcgaaattgtaatcaccgttctcatcccttggcgtgaattctctgttcacgaaatagtcgtccagtgcaatgggatgcggtgttttccccagggtcttcaactgaatggataatctgtgggaaaaactggtcttgccggaagaagagggtccggcgatcatgacaaatttcacgccgcccctgtctacgatgctcttggcaatctcgccgatcttacgctcctgctgcgcttcctgtaccaggatcagttcactcagcgacccacggcagatctgatcattcagatcacctacggtctcaataccgatctcctttccccattcctcagattctttcaacgtccggaataacagctttctctcttgaaacggcttaacatgtgtaggatcttttttatccggcagcagcagcataaatccatcttcatacgctatgacatcgaaccactttacatagccggcattgggcagcatgtagccgtaataataatcgtaataaccgtccatttcataaatatttacgaaagagcctctgcggtaacggaacagtttttccttatccttcatcccctctttccgaaacagttccatggcattatccagggaataggatctcttcagaaaaggtgtctttgcctccaccagctcccgcatccggttacggatctttgcagcattttcttccgtcacattaatcttcccctttggagagatgtaggaaccgttgccgatggcaaattccacacgacagctctgggccgcctctctgccgtagacatcaaataccgctttcaaaaacagcattgtggcagaacgcacataagtcttgttgcccacatcatccttcaaggtaaaaaaggtaacctcgcaatcccttgtcagtttcttgaacaattctctgatcttgccgtctctggctgccagtgcgatcagattctcatactcctgctgataatcgttggccacatcctcgtaagtggctccctgaggatattgtctctcttccccgtttatcttcactgtgatcatttttctcaccctgtccttctgtaatctgcttttacaggtcttat

SEQ ID NO: 5494 - DNA, 104864 bp, Unknown
  gut microbiota DNA sequence
tattataggtgatggcgaatatattattccaacaattattttagataacaaaaaggtagaaccaattaaaaaaattgaaaatataaaagtttttagagtagatgcagaatcagaattttttccaagagatatttcagatattgtattgaatagaaaatttttccacgatgaaataataaaaaatcattatggcgaaagagaaatagcaatggtaacatcgagaggatgcatttacaactgtgctttttgcggaggggcaagaagtgtgaacggagggattcctgtcagaattagatcagaacaaagcattgtgaatgaaatcaacgatatattaaagatgtatccggaggtgaaaagtatcagggttttggatgatttatttctgagtaataaacagcgtattaaacaggcaatacatgtattttcaaaatatccgcagttgagttggagaggaatggcgcatgtgctttctttaaagccaaatttagatgatatagaaaaactgaaaggggctaattgcagagaactatttatgggaatagaatccggatcagaatccatgagaaaaaagatcaacaaagtaggaagtattggagatgttatagaagtggctcaaaaaattttgcaggagggtattgacttaaaaggatatttcatttatggttttccacaagagacggaatgtgatttccaacaaacatttgaactggcaagaaaaattagcaatatttcacagacaacagagggcaattttaggacgagtgtttttcaattcagaccatatcatggaacaaagttgtataatgacattgtgtctgagaagggaattgtccatgaatgtgaatttaatgacataataagtaaattcaagggaagaaaccaatttaactttgattttggtaactatagcgaagtttcagatgaaattttgaaccaatatattatcaaaacacaagagataggggaaggaaatgcttgaagatatacggatgtgtagtaaatgcggattatgcaataatcaaagaccattgttggattcggaaagaccgtgtcaggttttttgggttggactgtctgctaaaaaaattacatctgaagaggaaacacctttatcagagcagacaaatactggaaaactgatacaaaagatagaagagatgtgtaatgaagtgagtacttataaaaccaatctggtaaagtgtcttccgcttacggaacaacagaaattgcgttatcccagcaaaaaagaaatggataaatgttttgacaatttagtaagtgaaattaatgcgatgtcacctaaaattgtatttttgttgggagaaaaagtttattcttctgtcgcaaggcatttacatttagattttgaaaagtggaatgatttcgaatatcattatacagaatgtaatggaacctattatgttccaattcatcatccatcatatatatgtgtctataagagaaaacaaatggacgattatatcgcagcagttgaaaaaatgattaatgaattgttatgaaattgatattaagtataggatgcaaagggtaaaggcagaatgaaaccaagatctccccaaagtatgcaattatataaaatgctcctatcccgcggctacccggaatcgttctgtgatctggtgacgaagaatctgaatacggattttacggcgagccgtatgatcggttatctgtgtcattattctgatctgccgccggaggagatcgcggacgaaatgctgtcgatcttaagtgaccgcaatcgcattatgcagaagaaagaactggaaagcaataatgcagagtggaatcgtattctgatgcagggactggggattgatacagaagaggatgatggcgacatggtagatccgacagatttttgacggtgattacggctgcgaggaacgcttgcccggacagggaggtaataacatggaatacattacaagagacgaagcattcctcactgcttccggaaatccctcggagcacagccgtatacctgcttaaaggtgcgcaggaataatttatagttcgtgactccgtgccgatccagtatttcgctgatgctcagatcggtgtcttttaaatccttgcagacatgcgtcagacgcacgctgttgatataggaagtgagggtggttcccatgttccgtcggaaaaaacggcagaaatattctgggttcagatgagccagggaggctgcattttccagagaaatggcttcggcgtaatgggattggatgtactgaatcaccggttcgaggcgatgcagatttttctgactctgaatccgggaagtattgtcgacggtgaccttatagtgggtcataaggatgtataaaaaatcataaagcagaccggaaaaccgcaaagtatagctttgcggtttttttgtatagagatcgcccatggaagtcagaatctcctgaatctgcgcatcggcagaaaaatccctgcgggagaacagaaaacggatgctttcatattctgggatggcacctatgagaaacgcataaggaatctgtaataacagaacccgggacggtgtcgtggtccgggtagcatggacggcggcggaatttaccacatgataatctccggcatgcagcaacagaacccgctgtccctcaatgagttccatggaaccctcatagatatagataacttccatgcttcgatgccagtgttccggtatgtaatcgttattgctgttatagattgcaaaacggacgttgattccgctttcaaaagcaacctcttcgtgtggaaattgcggcatcgcaaagcctccttctgaaattatattatttcccgcgatatatttatatcatagaataaaaagaaggaaaaagtcaatattgacctaaaaagaagtcataatcagatataggaatcaatgtgaaaaattgctaaactggtaaacagaaagagcaagtggacaaggttgaatgacaggaggttatagcaacatgacaaagaaaaaaatcaaagatctgatagcaaaaatgacattggaggaaaaggcggcaatgtgttccggagcagatttctggcatactgaaagctgcgagcgactggggattcccgcaagtatggtatccgacggtcctcacggtctgcgcaagcaggatgacaaggcggatcatcttggagtaaatgagagtattaaagcagtatgtttcccggcaggatgcggaaccgctgcatcctttaacagagatctgttgtatcatatgggcgagacactgggcaatgagtgtcaggcagaaggcgtcagtgtcattctggggccggctgtgaacatcaaacgatctcctctgtgcggtcgtaattttgaatactattcagaggatcccctggtggcgagtgagattgcaggctctctgatccgcggtgtgcagagcaagcatgtgggaaccagtttaaagcattttctggcgaataatcaggagacccgcagaatgtccgtgaatgagatcattgacgagagaacactgaacgagatctatctggcagcatttgagggagcggtgaagaaggcaaaaccctggacagttatgtgctcttataacaggatcaacggtacttatgccgcggctcatcacaaatatctcacagagaccctgagagataagtggggatttgacggttatgtcatgagtgactggggcgcagtcaatgaccgtgtggaagacttaaaagcaggtctcgatctggagatgccttcctctatgggagtcaatgataagctgatcgtagaagcggtacagaacggaacactggaggaacaggtactggataccgcagtggaacgtattctgaacatcgtatatcgttataccgagaaccgagataccgaagcggtgtttaatctggatcacgaccatgaggcggcgaagaaagtggcggaagagaccattgtattgttgaagaatgagaatgtgctgccgctgacagagggcgaagagatcgcctttatcggaaaatatgcgaaaaagcccagatatcagggcggcggcagttcccatatcaacagtcataagatcacaggagccctggatgcggcagaggcagcaggcaatacacatattgtgtatgcccagggatttgatgacaaagaagacaagacggatgaggtactactggcagaagccgtggagacagctaaaaaggcaaaggcagccgtgattttcgcaggactgccggatgcatttgaatccgaaggctttgatcgtaaacatatgcggatgccggattgccagaacgaattgatcgaaagagtggaagcggtacagcctaacaccatagtcgtattgcacaacggtgcaccggtggagatgccctgggcagatcgtgtgaaaggtattctggaagcctatcttggaggacaggctgtgggaggtgccgagtatgacatcctcttcggcaaggtgaatcccagtgcgaagcttccggagacattcccgaagcagttggaagataatccttcttatcttgccggcttcggtgagggcgaccacgtggaataccgggaaggcattttcgtgggataccgctattatgataagaagaaaatggatgtattgttccccttcggctacggattgtcctataccacatttgcctacagcaatctgtgtttggacaaaaagacaatgaaagacacagaagaactgacggtgtctgtggatgtgaccaataccggagacagaacaggtaaggaagttgtacagctctatgtggcggataaagatagcactgtgatccgaccggtgaaagagctgcgggattttgtcaagatcgaactggcacccggagagacaaagacagtaacttttacgcttggaaagcgagcctttgcttactatgatgtacagatccatgactggcaggtggagaccggagagttcgagatccttataggagcatcttccagagacattgctctcagagataccgtgactgtagaatccaccgtgaagattcccttccactataccacagatacgacaatgggcgacatcatgagccgcccggaggcctggaaactggtacagagtgttctgagcaaaggaatgttcggtcatgacagcgaggtcagcgaaggcggcgatgccgcgaaggaagccatcagcgatgagatgaatgcagcgatgcttcagtatatgcccctgcgcggaccggtcagtttcggcggcggagtcagcatggcagatgtacagaagttggtggaccgcctgaatgccatggaagaataattaactgtttatatatagcaatccctaaaagttaggcaaaaactaacttttagggatttttatatataccgctgagtgacatttttaagtcggatgaatgcaagaaagaatgtggagaattgttataattagaatatgaaaaataaacagacatagaaagccgcattaccaaggcacgttaaggaggaaacggatgaaaaaaatagcaattggcggaggacagggattttggggagattctccagatgctgctatccatatgattcacaatgcagatattcaatatcttgcatgtgactatctggcagaactgacgctgtccattatggcaaagcaacaactaaaagatccatcaaaaggttatgctcctgattttgtgacaagattgttgaaagcagcaggaaaaactgcttgggaaagaaatattaaaattttgacaaatgcaggtggcatgaatatttcaggatgtgtagatgctattcgacagtatgcaactgaagaaaatatgaaagggtataaaatcggttatgtaacaggggacgacattaaatcaaaaatcccgcagctgttaaaggatggatggacatttccgaattttgactacgaaggcgatttcacggatattgttgataaaatatataattgcaatgcctacattggtcatgaaggcattcaaagtgcaattgaagacggagcagatgttgtagtcaccggaagagcagctgatagcgcacttttcctggctccgttggcttatgaatttggttggaaagacaatgactgggataaccttgcaagaggaattatggcaggacatttactggaatgtggtggacagggagcaggcggcaattatatgtatgattggcgtagcgtacctcagatggaaaatctcggatttcctattgcagagttgacagataaaacatttgaaattactaaggcccctgattgtggaggagtcatttgcgagcaaagttgtaaggaacaatttttatatgaagtgctagatccggcaaattatctgactcctgatgtaaatgtggatattagtaatgctactattacacaggttggtgataatcgcgtcagaattgatcatattcatggtaaagagaaaccggatactttgaaattgtgtgttgggtatcataaagggtggaagacggtttcaatgttgagctttgcatggcctgatgcttatgaaaaagcccgatattgtgcagacattatcatgaagaaaatgaagcaaaagggaatgaaagcggatgatgttcatatcagttttattggtctgaacagccttcatcttaatgtggctgatatgagtgaagaagcattgaaaaatctgaacgagtgtgtaatgcgcattgctgtattttcagaggataagaatgaatgtgcgaagatcatcccggaaatcagccctatgcagttaaacggacctcccggagcatctttcttcggaggaagggctcgtgtgcaggaagttatggcactgtggccgacatctgttccacgagaggcagtagagatcaagagccatattattacaatatagttttgcatagagaggacaagattatgagagaaatattattgaatgatatcgctcatggaagaagcggtgacaagggagataccagcaatatctgtgtatttgccagaaaacctgaatattatgaaattattaaaagagaagtaacgcccgaaagactacacaattttttcggcgacatggtaaagggcgaaattataagatatgaagttcccagccttggtggatttaattttgtactcaaacatgcacttggaggtggtgcaaccatgagcttgcggttggacagccttggaaaatctatggggagtgccattatgagattaaagattcacgtaaaagatgaggaattataaggggatcggaggtgagaccttatgggattagaaaaagtggaagcactacagaatttggtagttcttgacttgacccgggtagtagcaggaccctatgcaggctctatattgggagacttcggtgctgaagtaataaaaatcgaagtgccggaaaaaggtgatgatgccagaagctatggtccttacagaaatggagaaagtgtttactatgcgaacctgaatcgcaataaaaaaggaattacattgaatttgaagacggaagaagggaaaaaaatcttcctggaactggtgaataaggcagatattctcttggaaaattatcgacctggggttatggaacgattgggattgggatatgaagttttgagagaaaaaaacccacgccttatttacggagcagtgtcaggctttggctgctatggatcgtactctgacagaccgggttatgatattatttcacaggcaatgggaggtcttatgagcgttaccggtgcaaaaaacggagatcctacgcgttccggaaatgccatgggtgatatactgggcggtatgaatcttgtgattggtgttttaatggctttgaacgtaagaacactcaccggaaaaggacaaaaggtagatgtatcattggtagattctgtagtggccagcctggagaatgcatatacaagatattttgagtcggggcaacttcctgtaagaaatggaaatgcgtatgcatctattgcaccctatgatagttatcaggcgaaggatggtcaggttattatagcatgtggaaatcaaaagctatatgagaagctttgcaacgaagttcttcatatgccatggatgataacggatgaacgttttcttacggtttctttgagagtacagaataacgaaatacaaaagaaatatattgaagagtggacaacgcaatatactgtgaatgaaattgtagaaaatgtattggcaaaaggaattccggcaggccccatctataatgtaaggcagatcacagaagataaacatatcgccatagaacgtgaaatgtttgtggagatagaacaccctgtgattgggaaaatgaaagtaaatggcaatcctattaagttgatggataatatgcctgagatcagtaaaccggcaccaacactcggacaacataatgaggaaatattctgtgggttactgaaacattccgaggaacagattaaggaatggaggaaacataacattatatgatggaagatataccattcagtgccattatgaagtcgcctgaatgcaagaaagaatcttgaaaactgatataatggaaatacatagaaaaggtggtggagagatgaaaacaaaaaaacacaattggaaaagatggctaccgctctacttgatgatggcacctggattaatctatatttttatcaataattatattcctatgtttggtacaattattgcctttaaacatatcaattaccagaaaggcattttggggagtgattgggtaggactgaaaaatttcaaatttttgtttgccacaaacgatgcctgggtaattacaaggaatacgttattgtataatcttgcttttatagtgattaatacagtggttggaattattcttgcaatttttatatgcgacgttgtgagcaaaaaattaaaaaagctttatcaaagtgcggtattgctcccctatctgatgtcaattgtaattattagctatattgttttcgcatttctttcaacagaaaacggaatggtgaataattcactgctgattccattcgggaaaaatccgatttcgtggtatgcggaaccaaaatactggccgtttattttgacacttgtgaatgtatggaagggagtcggatatggttgcttgatttatatctcggcgatcaatggtattcccaaagattactatgaagctgcaaatttagatggagcaggtaagtggaaacagattcgatgtattacgcttccatccttagtcccttcggtgattacgcttactttgttatcgattggaagaattttctattctgatttcggattgttttatcaggtaccgttggactccggaacattgtattctacgacaaatgtaattgatacttatgtatatagagcactgattaaactgggaaatgttggaatgtcttctgctgcttgcctatatcagtcggttgtaggatttgttttagttctcaccgctaatttgatcgttaggaaagtaagtaaggaaaacgcactgttttaggaggagaaaaatgatccgttcaaaatcgaatatgcggtttcagattttagcgaattttatactgattctgtttaccatatttgtaattaccccttttattcttttgattatgtcttcctttacggaggaaagtacactgataagaaacggatattcattttttccggaaaaattcagtttgggagcctatgcttacatatggaaaaatgcgtctaagataatgagggcctatggaattacaattttggtcacagtagttggaacagctgtcaatgttatgctgtcaacaatgattgcctatccgttatctcttgaacaattgcctggaagaagagcaataactttttaccttttctttacgatgctttttagcggtggattggtaccatcctatttgttgtacagtaattattttcatataaaaaatacaatttgggctttaattgttcctaacctgttgctgtcggcaatgagtgtgctattaatacgtacatatatatcaacaagtataccatcagcattgtttgaggctgcaaaggtagatggggcaggagaatttacagtattttttaaactggtgattcctttgtctaaacccattattgtaacgatgggaacttttgccggtctgggttactggaatgactggacaaatggtttatattaccttacggatactaaatattatagtatccagaatctgttgaataaaatgattacagatatacaggtattgtcttctaattcgtccatggcttcacaagcctcttcggaaatggcaaaattacctacagtaggtgtacgtatggcgattgcggttgtagcaatgctgccgatatttgtattatttccgtttttacagaaatatttccaaaaaggaattgcattaggagcagtaaagggttaatacattgcccttacaagataaaataaatatatgggaggataacaaatgaagaaaaaaattttatcaatgttactcagtatggtgttgacggtagcttgctttacgggatgcgggagtaacccaagtagtggtggagaaaccggtggagcagcttctacagaaacacctaaaaatccggaagatatgtatacggtcacaatggctgtgattggaaatgatcaggaggacatggatcttgtagaagcagaaatgaataaaatcctggcggaaaaggttggtgcacaaattgatgtaatcacattgggatggggagtatatcagcagcagttacaacttatgttatccggtgcggaaaaactggatttggtccctataatgtataataacgtgagtacctatgtaaacagcggtcaggtattggatatgtctgatttgattgaccagtatggcgttaatatgaaagaagctttgggtgaagatattctcaaaattgctaatatgaatggctatgtgtatggtgtgccggtggaaaaagaatggtatgcagacagctgtctggtaatgagaaaagacattttggacaaatataatttggatgtgtctaatgtgaaatctttggctgattgtgcacctattttcgaaacgattcatgaaaatgaacctgatatgaaaattattgtaggcgctaaagatggtttgatcggtaacatatattttgccgatgtactttccgatcgctttggagtattggataatggcggtgctgatactacgattgtgaattactatgagacggataactacaagaatctggctgctacggttcatgattattatgaaaaaggttatatcgacaaggatatggcaacatctacagatgccggaaccacaatcctgaaggccggaaatgcattctgctttgccactccttataaaccgggcgttgcggaacaggaaagtctgaataccggttatgaactggtggctgtaagaatcaaccctactcctgcgttttgctataccaatgctgttgccgcaattacatggggaattggtcagaattgtgaaaatccggagatgacaatgaaagtgctggactacatgtacggtgatccggaattaatgaatctgtttaactggggtattgaaggtgttcattatgtcgtaaaagatgctgaaaatgatgtgattggattcccggatggggtagatgcttctaatgcaaaatacaatctgaatatgggatgggaacttccgaaccagtacaagatccatgtatgggagggaagctccagaaagattatggatgcgcagaaagagatgaatgccactgcaaataagtcaaaagcattaggtttcatgtttgatagtacatctgtcagcaatgagattgcagcactaaacaatgtggttagtgagtattcggcttctatcgattgtggcgcagctgatcctgccacggccattccggagtttaatgagaagttatacgcagccggtcttcagactgtaatggacgagaagcagaaacaattgaacgagtggctggaaaatcaaaagtaatgtgttataatgtggctgtgaataacaggaataaataaatataggaggtcccgattaatgtcgagaaaacataagaaggtcttgagaaaaaatattactctgatcatgtgcgcattaatcgggacaattgttgttgtatacggtgttggtatgatattattccgtggatatgtcaaagagatagcaaatatagccagccggacatttgatttctacgggaatgaattggatcaaaaaatgaatggcattaatacgcagcttgtaaacacgttgttgaataataaatctatcagagaaatagaagagatggatttaaacacagaggataactctgtggtttacagcattgcggagcaaaatgaattgaaacaatattttcaggcaatggcaattaattatggggacgaataccatttttggttttataacaaagacaaagatatttttctgattacgggagacgatgaataccttcaaaaggaactttttaaaggatatattaggacagtggcttccgaagaacggattcctataacagaaaagagaaaatggtttgtgcaggatgttcaaggaacgttgtttcttacaactaccttttgcctgaaaaataattatgtgggttgttggatacggcctgagaaaatatgcgcttcttttcgagaaacacaggaagatacactttccttttttattcgggatttgagcaccggagtacattatttggagaatagcagtgcatccggaagtatgtttcagaaaaatgaaaacattcaggaaataagtagcgcgcattattgggaatacgaatttgaaaatgcaaatgtatctataggaatagatgtcagcgacaaaataaagaaaagtgctggaacctatgaaatactgatgggaattaccacagtattgatttgctttatgtgtattggagctttttattatttcaggcactatgtacaaaaaccgttatacatttttgaagagaatctacgaaaatttcaggaaactggagaattagagcaaaataattattatgaagaattcgaaaatgtaggtgaaatctggagaaatctggaaaaagaaattcaggaattaaaagttcaggtatatgaagaacagctggaaaaacagaaaactaaaatagattatttacaattacagatcaggccccatttttatattaactgtcttaatagcatatacagtatggcgcagttgaaacatacagaagaaatccagcaactggcattgtatgtatccggatatatgagatctattttccgcaaaggaacgaagcctatcttaatggatgaagaattacagcagattgtaaattatgtaaaaatccataatattttataccgctatgattgcaagtgtcatatctgcgtagatgagcgtgtgaaacaggcaatgattccaccgttgataatgatagtctttgtggaaaactgcgtgaagtacacggtaggaagcaaaagaaagatagaaattagcattgaaggaagctttctggatgaggaacagaaaaaaatacgaattcgtatagcggataatggtccgggttttcctgagaatgtgttagaaaaatttcgaaagaatgaatttggagcaaatgatgacagattccaaattggaatacgcaatacaaaagatcggcttcaactgctctatggggcggaagcaagtctcatgataggtaacggtgaaaacctgggaacggaagttataataataattccgtatcaaaacggagatgaaaagagtgaatattctattagtagatgatgatgtgaatgtgctggaaagtctgcagtttggggttgcatattcgtcactgggaatagaaaagatttacgttgctgaaaatgctgcggatgccaaaaagatacttaagaatgtaccgatccatattatggtaacagatatagaaatgccaaacgaatcgggaattgaattgttaaaatggacaaaaacacagaatttagacgtggttactatattctgcacgtgttatgcagattttaattatgccaaaaaggctgtggaacttcaatgttttgactattatctgaaaccgatttcttttgacgattttgaaaaaataatatctagggctgtagaaaaagtcagacaagagagcaggaagaaaacatattatcagtatggcgtgtattggttggatgatgtaaaaaacagaaaagcacatttttgggagcatatcatgtttccgctggcaattccggatgaagaacttttaaatgcattgattgaagacaatcgtttggaatatgacactgagcagttgtttgatgtttttttgctacatacatatgaagaagaggaacgttttcagaatctgacttcaacaatgagcgaatttattattaaaaatgtcgttacagaaatttttagcgatatgtgcaatatggagaccatagtgaagtatggagaggatacctatgtgattgtaacccgtaatctaaaagaaaatgcggagatggtactgaagaaattgattatgcagtgtgatatccatcttaattgtcgaatgcgtgtattttatgatcttgaatgtcctctgcccgccgtaaaggaatgttttgaaaggttgattcatatttggaatgaaaatatcagcaacgatgtacagatattctgggcgcggacataccaaagggaagaaaatacatattcattcggtgctattggagaatgggagatttatctgaacacaggtgcggtgaataagattttagatgaaatcgatcactatttctcagagaaaaagagacatcatgggttaacagcgtatgaattaaaagctatgcaggtgaatctgattcagatggtgaatactgtgttgatgaaaaacaatatcgaagcccatgagctatttgtaaatacggaatatgaaacttatcggaaaatgtcattgaagaattatgataactatatggaattttgtaaatatttattgcaaaaagcatatagctatattgcctacgtaagagaaaatacatctattgtagaggtagttaaaaaatatattgaagaacattataatgaggaaatttccagaaatgagctggcaggaattgtatatttaaatgcagattatctggcaagactttttaaaaaagaagaaggaatctctattaccgattatgttattcgtatgaggataaagaaggcgtctgaactgttacaatacagtgacatctctattaatgaaattgctatgaaagtgggatatgataacttttcatatttttccagattatgtaaaaaagtgttgggatgtagtccgaaagattatagaaaaaaagcaaaggagaaattaaatgagtagttattttgaatgttcgggaaatggaccgattgtgacaacaaaagcaggaaaaataaggggatatttgtggaatacaacatatacatttcaggggattaagtatgcaaatgcaaaaagatttcagatgccggaggaaattcagccgtgggatgggataaaagatgctacttcttatggctatgtatgtccattgttaacccaggatgttcccaacggtgaaattatggttcctcatagatactggcctatggatgaacactgtcagtatttgaacgtttggacgcagacgttggatactttggcaaaaaaaccggttatggtatggcttcatggaggtggattctatgcaggatcttctatcgaacagatagcatatgacggtacaaatttaagccaatttggggatgtggttgtagtatcattgaatcatagattaaatcttttgggatatttgaatttgtcagaatatggagaaaaatattggaactcgggaaatgttggaaatgctgatattgtagcggcattgcgctggattagagacaatattgaagcgtttggcggggatcctcaaaatgtaacgttattcgggcaatccggaggaggcatgaaaatatggacgctgatgcagacaccggaggctgatggcttgtatcataaagcgattattcagagcggcgtattggaagattttattgatgaagagaatacagatgccaaaccactgatccgggcaatgctgcaggagcttaatatggaagaatcggatattgagaaatgggaggatatgccttacagagagctggcagatgcttataataaagtatccgataaagtactggctgaaggtggttatataggaggacatccgattcggaactcttattacatgggggatcccttaaaaattggattttcggaatatgctcaaaaggtgccggtgttaataggaagtgtgttcggagagatgggatttgcacccgggctgatcggaaggaatcaaatgacacaagaggaattgatcaggattgtcgaaaaacgatttggtgaacatactcagtctgtgattcaggcatacgcgcaggcatacccgggaagaagcattgcagacttaactacatatgatatttttttcagaaaaccggtaattgattttgtgaaaaagagaaagacatacaaacaatctaatatatatgcatatgtctttgctgttgaatttcctctggatgatggaaagccggcatggcattgttctgatctggcttttgtatttcataatacagataaggttcccgtggctaatatgccgggagtcacggataaactagaagaaaaaatgtgcaaggcatgggtgaattttgctaaaacaggaattccattcattgatgaaacgattgcttggccggcctgtacagaagagacagaaaattatatggttatcgacaatgataaatggcaggtaagagagaagtttgattacgaattagtgaaacaggtagcggacagtggcatgaaatctccattttctataaaagaaaggagaaaaatgttgcagaaaactcaaaaagaagcagaagagaaaggcgtatttttacattgaagacagaaaaaataataactgaattattggaacagatgaccttggatgaaaagatcgggatggttcatggaaatggattgtttcagaataaaggggtagaaagactgggaataccttctatgaaattttcagatggacctatgggtgttcggaatgagtttcaaaatgataaatggattcccctgggcaatactgatgattatgtatcttatcttccaagtaatagtgctatagcatctacatgggatgtcgatgttgcatatgaagttggcaaggtcctgggagcggaagccagaggcagaggaaaagacatgattttggcgccgggaattaatatcaaacgaagtcccttatgtgggagaaactatgaatatttgagtgaagaccccgtgctgacagcagagatggcagttgctttgataaagggaatacagcagaatgatgtggcagcctgtgtaaaacattttgtggcaaacaatcaggaaactaatcgactgcatgtggacactaaagtaaatgagagaaccttgcaggaaatatattacccggcgtttcgacagtctgtgcagagggcagatgtttattcggttatgggagcctataacagattaaacggtacctattgctgtgaaaataatctgttgctgaaggaagtattgcgtgatcaatggggatttgaaggaattgtaatcagtgactggggagcagtgcataatacgttagatgcggggcaggcagcacttgatattgaaatgtcagtatttgataatttcgacgaatattgtctggcagaacctttgaaacaaaggatcttggatgaatcagtagatatggcgtgtctggatgcaaaggtacgtaacatcttgcgagtaatgtttaagttaaaaatgattggaaaggaagcggtacatcgaaaaaacggctcctataatactatggcgcaccggcaggtgttgaaaaaagcagcggaaaaatctgttattttattgaaaaatgatagtaaattattgccacttggaaatacatatcataagaaaattgcagtcataggttgtaacgcagaccgaattcactcgggcggtggaggtagtgcagaaattaaggctttgtatgaaatatcaccgcttcttggaatcaaaatggaatttggaggtaatgcagaaatagtatatgaaccggggtattatattccggaaaaaaaggagcttaacggagaaaactggcaggcttccagtgtggatgacaaagaaaaaatacaacaacagatccgcaggatgagagaagaaaaaagaagattaaaaaaggaggcattttattcagacctatcggaaattgaggaagaatatcacagaagagctctgaagcttgctgaagagagcgatattgttctgtttgtaggagggttggatcatgaatatgacattgagggagaggatcgtccctgcatgaaacttccgtatcatcaggatgaattgattacaaaattattaaaggtaagaccggacacaattgtaactatgataggaggatctccggtggagatgccatgggaagaaaaagcaggtacaattttgtggtcttattatgccggaatggagagtggcacagccctagcgggaatcctcaccggaagaatcaatcccagtggaaaactggcagaaacttttcctcgtgtttatgaagatacaccgacaggtcataacggacaatttgggagagataatatggtctgttatgaagaagaaattatggtcggatatcgtcattatgagaaaaatgatattttgccgatgttctgctttggacatggactctcttatacagaatttgcgtatcacgatctgcaggtgaaacaagataatgatgcaaaagacagagtgagcatatcgtttgatatagaaaacgtaggtcaaatagacggaagagagattgtacagatttatgtgagggatgaggagtgtacagtaatcagaccagaaaaagagttaaaggcattcaaaagcattacgctgaaagcggggagtgtatgcagagtagagattactttggatagtatggcgttttcattttatgatgagaagaaacatgatttttgtgtggaacccggaatttttgaaatatgtgtaggcaattcaacgcaaaatattttattgcatcagaaaattgaataccctaactgcagtaagcagaatgtgtgaaatcccgattctaattcattataaaataaaggataaactagctaccgctttgggctgactgatgagaccgtcagctcaaagcggtagttttattattttatggaattatgaaagcggttgtcaaattggaaagcggaatgcggaatccttaggatatggcttgccattgtagcagattccgattataataaaagattgtaacggcaacggcttggaattggggattatcatgaatatagtagtagacggatataatatatgttataaaacaaccggtaccggcgataagacggttgtgatcttacagggctggggtacggatctgggagtgtatgattccgtagccggtgtgatagacggcagcagataccgtgtgatccagttcgatttcccgggcttcggaggcagtgatgaaccgaaggaaccctgggatgtagacggatttgcggattttttctgcagatttatggaagtaatgcaggtaaagcaggccaccctcatcgggcattcctacggtggccgcgtgatcatcaagctggcagccagagagagcatcccttttgagatcacaaacattatcctgatcgacagcgcaggtgtcctgccggtgcgtactactgcacagaaatggaagatccgcaagtacaagatcctgaagaaattcctgaacatgaagctgatctatgctatgttcccggaggtgatcgatgactggaggagccgacagggatcggcagactaccgcaatgcgacacccatgatgcgtcagtgtatggtgaaggcagtgaatgaggatctgacggagttgcttccgaagatccgtcaggaagtgctgctgatctggggagatcaggatacggcaactcctatccgggatgcacatattatggaagagaagatacccaactgcggtctggcagtgatcccgggaaccggtcatttttctttccttgagaagccggcacagttccggggaattatggaggcatatttgcaatgatcatacgtgtgctgatagcggtcgtgcttgctgttccggcatatttttataccatgcggtataacattcatatgttccagcagaacggctataagaataaagaacaccttcactggctgaagaagaagttccggctgcaatggattctctattttggtctggcactgggcattgtaacctgtgtgtttccgtaccttgcccttgaaatcttcgagtatctggtactgttcgtgatcatcgtggtatatcgtgccatgaagcggatgaatacgaagaaaaagctggtgtatactgcccgggtcaagagattgctcgctacggagctgatccttacggttgcggtattcgctctggtgtgtggatttggcggaatgaagcggatcccggggctgtgcctgatcctggtatctgtgaatctgtttctggatattgtggctaatgtcatcaatcatcccatggaggcggggatcaatcagcattatatcaatgacgctgtgagaaagctgaaaagcgtcccgggacttaccgtcatcggtgtgaccggcagctacggcaagaccagtgtgaagttctatttgcagacacttttacaggaaaaatataacgtactggtgacgcccgagagtttcaatacgcctatgggtgtggtgaggaccatccgcggtttcctgaagcctaccacagagatttttgtctgcgagatgggtgcccgccatgtgggagatatcaaggagatctgcgatatggtgcatcccgatcacggtgtgatcacatctatcggaccgcagcatttagagaccttttttaacatggagaatattcagaagacgaagttcgagctggcggatgccctgccggaaggcggcatgctgttcttgaacggtgacaacgattatattcagcagcaggcagcttctcccgcgtatgatcagaccccggagaagatcttctattattccgagacggaagggacaggatactgtgccaaagatgtgaaggtatcccagttaggtacggagttcacggtagtgaccccggacggcgagagcgagagattccagatgcgtcttatcggtgcccacaatgtcatcaatgtggtgggggctatcgcagttgctcataaaatgggcatgacgctgcaggaactgcggatcccggtacgccggatcgagccggtgccccatcgtatgcagatgcgggagcacggcctcgtgaccattattgacgatgcttataattccaaccccgtaggttccagggcagcggtcgagacgctggctatgtttgacggtatccggatcctgatcacgccgggcatggtagagctgggtgacaaggaagcggaatacaatcataaattcggtaactacgcagcggattgctgcgattacatcctgttagtgggcagacggcacaccgagcccatcagggagggcgtgttggagaagggattcccggaagagaaatgcctggtattcgacaagctggaggaagctgtatcttacgcctatgccatcaaagggcagggacataagtatattttattagagaatgaccttacggataactattagacgactcagaggcgatttcgcgaaagtgattccggatagttgacagagagagtaggaaaattcaggagggaaaataaatgaagacaagagtagcaatgctgtttggcggcaagagtgtagaacacgaggtatccgtgatctccggcatccaggctgtcatgagcatggacacagacaaatacgaagtaatcccggtctatatgaccaagcgcaatgaaatgtacatcggtgaggagatcggcaagatcgaatcctacaaaaatatcgatgaactgttgaaaaagtcccagagagtcatcatgaccaacgaggatgggaaggtattcctgactccgttcccggtgaagatgttcggcgggaagaaagccgtggagatcgatgtggctttcccggtagtgcatggtaccaacgtggaggacggtgcttttcaggggtatcttaagaccatgggtattccttttgtgggatgtgatgtgaccgcatctgccatcggcatggacaaatacattatgaaagctgtcttaaaggaatgcgatgtgccggtactggatgcacagctgtatactctggcagattatgcggagatggagacacttcttgacaaagtggaaaagggactgggttatcccgtgatcgtaaagcctgtcaacttaggttccagcgtaggtatcagcgtggcaaagaaccgcgtggaactgacccattccgtggacgatgctttcaagtatgccactaaggtactggtggagcatgccattacgaatctgcgggagatcaactgctccgtactgggagatgagaatgatgccatcgcctctgagtgtgaagaacccctgcataccaaagatatcttaagctatgaagacaaatatgtcagcaatgccaagggcagtggttccaagggcatggccagcgtatcccgcaagattcccgcagagctgtcaccggagaagagagaggaagtccgggagctggcagtcagatcctttaaagcactgggctgtaacggtgtgtcccgtatcgactttatgatcgatgaggacaacggtaagctgtattttaacgagatcaataccatccccggatcactggcattctatctgtgggatccggtgggcgttccttacaaagagcttctggaccgtatgatccagctgtctttgaagagagcccgcaccgaggagagactgacctttacctttgacaccaatatcctgaattccgcaagctttggcggttctaagggtggtaaattgtaatagccggtttatggattttatgattatttaatatattttttagcactctggacttgtgagtgctaatctatagtgataatataatctctgtaaaagcaacaagcgactgcagcagcagacaattgtttgaaaagagatgtgaagtggtcagccgcgcagggaactgtgtggctgatttttacatggagaacgtcttggttgtgtggctcaccggttgggcagaatggagggaatatgacgaagacaacaaaaagagattattatgaagtactgggtgtcagcaagacagcggacgccgcagcgataaaaaaagcataccggaaactggcgaaaaaataccatccggataccaatgcaggagaccctgtggcagaggagaagctgaaggaagtcaacgaagcttacgatgtgctgggggatgaaaaaaagaagaaactatatgatacttacggttttgctgctttccaggagggatttaatgaggaggcagccagacagtatcaggagcagtttaagaacggaggcggcttcggcaccgatggattcggcggctttggcaacggcacgttccattacagcaccggaggaagcggtttcggtaccggtgatttcggcagcttcggcggggatgaggatatttttgacaatctgttcggtcagtatttcaagggacagaaaggatccggacggggcagccgggcgaactaccgcagcaaaggtcaggatgtggaatccggcatcaccatcagctttgacgaagcaatgcatggctgcgacaagacctttaccttaagagatccggctaccggcaagtccgaatccgtgcaggtgcacattccggcaggtatcgataccggtaaaagtatccgtctgaaaggtaagggtggtgaaggttactccggcggtgagagcggtgacctgtatctgaaggtgacggtacaggagaagccgggctgggagcgtagaggacaggatctgtataccacggtcaatattccttatactaccgcggcactgggtggagagatccgagtccccacgttgtacggtgatgtcatgtgcaaagtgaaggaaggtacgcagtccggcagtaagatccgtctgaaaggcaagggtgtggtatccatgaaggataaaaatgcccacggcgatcagtatgtcgtgatccagattcaggtgcctaagaatctgaccccggcagcaaaagaaaaattacaggaatacaagaaggtcagtggattttgatccactggccttttgtgtttttgataaatgataaaatttttcattaaacgaaaaaagctggaaataggaaaaacaggtgcttataatattcattcataaatagaataaacaaaagacttcacacaggaggaaatgaattatgttgaaatgtttaaaaaagattgataaagctaaaaccggtatcttcgcagcaggcgttcttttcggaaccgcaggcatcaagattctgtccagcaaggatgcgaagaagctgtacaccaactgcaccgcagctgttttgcgtgcaaaagagtgcgtaatgaagacggctaccaccattcaggagaacgcagaggacatctacgcagaagctcagcagatcaacgaggagagagcagcacaggcagctcaggagttcgacggtgaggttgaggcagaagcagcagagactgcagcagatgctgaataatccatcgaagcttacaacacagaataaatgacacctgcatgctccggcatcgcaggtgttttcatgaaagcaggcataaattatgagatttgtgatcaaacatgagataaaggggagactcagggttcacattctgcagagccgcatgagctttgcacaggcagatacactgcaatactatctggatggacagagtaatattgtcagtgccaaaattcaggagcgcaccctggatgttacggtagtctataccggttccagggaggaggcactgaagacactggagaattttacgtatcagagtacggaagtgccggagaactatctggccaattccggcagagagatgaaccgggaatataaggatcagctgatcaataaagtggtaatgcattatgggatcaggctgtttttacccatggatatccgttccgtgatcaccacggtaaaatctttcaaatatctctggcatggaatcaagaccctggcaaagggcaagatcgaagtaccggtactggatgccactgctatcggtgtatctgtgctgcgcggtgattacaacaccgcagcctctgtgatgttcctgttaggcatcggtgagattttggaggagtggacgcacaaaaagtctgtcggtgatctggcgaggagcatgtccttaaacattgacaaggtatgggttgtgagcgacggacaggagatcctggtgccgtccacatccattaagtcaggagatctggtaaggatccacatgggcaatgtgattcctttcgacggtacagtgacggatggagaaggtatggtgaatcaggcatctctgaccggagaatccgttccggtgagaaaaattcccggtggaactgtctatgccggaactgtggtagaagaaggtgagctgactatctgtgtgaaagaaaacggcggctccagcaaatatgagaagatcatgaccatgatcgaggaatccgagaagctgaaatcctctctggagggtaaggcagagcacctggcagataagctggtaccctatacgttcttaggcaccggtctggtatggctgttcacacggaatgtgaccaaggcattatctgtgctgatggtggatttctcctgcgcattgaagctgtccatgccgttagcggtattgtctgcgatccgtgaggcaagcacctatgagatcacggtgaagggcggcaaatacttagaggctatggcagatgccacgaccatcgtatttgacaagaccggtactttgaccaaggcacagcctaccgtggcggatgtggtatcctttaacggacagccagcagaggaactgcttcggatcgctgcctgcctagaggagcattttcctcattccatggcaaaggcagtggtgcgggaagcagcccgcaaggaactggtacatgaagaactgcataccaaagtggaatatatcgtagcccatggaatctcttccactctggaaggcaagaagatcatcatcggcagctaccatttcgtatttgaggatgagcaggcacagattccggagggcagacaggagctgttcgaccagctgcctgaggaatactcccgcctatatatggcaattgacggcaagctggctgcagtgatctgcatagaggatcctctcagagaagaggccccggaggtcatccgacagctgaagagtctcggaatccacaaggtagtcatgatgacaggagacagcgatcgtatcgccggggcaattgcgggtaccgtcggcgtggatgagtattattccgaagtattgccggaggacaaggcaaagttcgtggagcaggagaagcaggcaggccataaggtcattatgatcggtgatggtatcaatgattccccggcattgtcagcggcagacgtagggattgctatcagcgagggcgcacagatcgccagagagatcgcggatgtgaccatcggtgcggataatttacaggaagtagcgacactgaaggagctgagcaatgccctgatggagcggatccataaaaattatcgcatgatcgtaggcatcaataccggactgatcattttaggtgtggcaggtatcattcctcccactacgtccgctcttctgcataatacatctaccctgtggatcagcaccaagagcatgaagaaccttttggacaaagaagaagtataaagaaaaaaacataggccattgtaaggggaaggatgagttccccttgcggtggcctgcattttgctttatagtaagtctgaactaaccacaaagtgtaatacaattcgtcgagaatgtacggtacttttgtaggaattatatgttgcatatttgtatatgcttgtatataatgatatagtaattcctagttggacgctagagataggaggaagtatatgtcagaacaattattacaggtgcgtaacttgtccgtaagtgtagaggacaagcccatccttcatggaatagatttagaggttcgtcccggagagacccatgtcctcatgggacccaacggtgcgggcaaatccacgttgggttacaccatcatgggaagtccccgttatgaggtgaccggtggtgagatcctgttcaaaggaaaacaattattggaggagaccacagaccagagagccaaggatggtattttcctgtccttccagaatcccctggaggtacccggagtatcgcttcggaatttcattcgtaatgccgtggaacagagaagcggttcccgtatcaagctgtggaccttcaaaaaggaactggagcaggcaatggaagtattgcagatggatccttcctacggggaccgtgatctgaacgtgggattctccggcggtgagaagaaaaaggcagagatcttacagttacttatgttaaaaccctcgctggcaatcttggatgagaccgattccggactggatgtggatgcggtacgtacggtatccaagggtgtggaagaataccagaaggacaaaaagggtgcgctgttgatcatcacccacagcaccagaattttagagtctctccatgtggacaagacccatgtactggtgaatggtaagatcgtggcatccggcgacgctgccctggtagacgagatcaacgagcatggtttcgagcgttttctggaagcataaggaggttgacgatctgaatgagtgaacgtgaaaagacatacgtggaagacgtcaacagaagcatttatgatatccgtaatgaggagaaggacgtctatcgtattaaaaagggactgactcccgatattgtggcggagatttccgagaaaaagaaggatcccgcatggatggcaaatttcagattacagtctctgcagatctataatgagatggaagttcccgactggggtccttctattgagggtctgaacatggaagacatcgtaacctatgtaaaacctaatacccatatgagcgccaaatggtccgaagtgccggaggacatcaaggataccttcgaaaaattgggaatcccacaggcggagcgaaagtccctcgccggtgtgggcgcccagtacgattccgagctggtatatcacaatgtcagggaagaagtggcagcccagggcgtagtctataccgatatggagagtgccctgaatggggaatatgcggatatggtgcggaagcatttcatgaagctggtgacccccagagaccacaaattcgcagcgctgcacggtgctgtgtggtccggcggctctttcgtatatgttccccccggagtgtccgtgacgatccccttacagtcctattttcgattgaacgcaccgggagccggacagttcgagcataccctgatcattgtggacgagggtgcatacctgcattttatcgaaggctgttccgccccgaagtacaatgtggcgaacctccatgccggctgtgtggagctgttcgtggggaaaaatgcaaaactgcgttactccaccatcgagaactggtccaagaatatgtacaatctgaacactaagcgggcgctggtggaagaaggcggtaccatagaatgggtatccggttccttcggatctcatgtatcctatctctatcccatgagcgtgctgaacggtaagggagcgagagcggaatttaccggtattactttcgccggagccggacagaatctggataccggtacgaaagtggttcacaatgcaccggagaccacttcttatatcaacacgaagtctatctccaaggatggcgggatcagtaccttccgaagctccgtagtggtgaagaacagtgcggcaaagagtaaatccgccgtatcctgccagtccctgatgctggatgacaagtctcgttccgacaccatcccggccatggatatccgtacccaggatgccgatattggacacgaggcgaagatcggccggatcagcgatgaagcagtgttctatctgatgtcccgcggtatctcagaagaggatgccagagccatgatcgtcagcggattcgcagacaatgtatcgaaggagctgccgttggaatacgcggtggagatgaacaatctgatccgtctggagatgaagggcagcatcggttaatgtggcaggaggaatggagatcagtatggaaaaagaatataatatgaccattaacagactgccggcgaagacctggaactggcttcgcatgaacgagacgcagttggaaaagatagaagtacctacggcaggaggggtaaaggtaagcctgccggaaaaaataacaacagtagaaaatgagggatcccagccctggaatgcggattttgcaggcatcccatccggcatgggagaggacatggacggtcttctgacagcagcgggagtgaaggcacagcattatgaggtgtctgaggaaaccacagaagcacagccgttgctgttggattatacctacgtacaaaatagtttacaggccggtgccgtagcagtgagagcccggaaaaacagtgaaatcactgtgatcgaggactttgcttccgacagggagacgtcagggcaggcggcagtatccaccagactgcatctggaagagggagcgaagatccgcctgatccagattcagagactgggcaatggatttacctttatgaatgatatcggagccctgtgtgaagagaaggcttccctggaagtgatccagctgatcctcggcggaaagaatacttaccttggatgcaagactaccttacagggcagagagagcagcctgaatgccgacaccgcttatatcgtgggcggtgacggaagactggatatgaactatgtagctgtgcatgaaggcaaaaagacccagagcaatatgcaggccggcggcgttctgcgggatcatgctttcaagctgtatcgtggcaccattgatttcaaatggggggctaaaggcgcagtaggcaatgaaaaagaggatgtactgttattatccaacgatgtggtgaaccagaccattcccctgatcctctgcgcggaggaagatgtggaaggtaatcacggcgccaccattggcaaactggatgatgagctgctgctctacctggagagccgcggcatgaacagagagcagatctatgagatgatggctatggccaaggtggatgcggtctgccgcaagattcctgatgcagctacacgggctaaggtacaggagttccttggcagagccggggaagaagaggaagcggaagagtaagataacaggaggaagtatgacgacttcaatcagcgagatccgtaaggattttcctctgcttatgagtaacgatgtgatttatctggacacggcggcgacttcccagaagccgtcctgtgttctggaggcagagagaacattttatgaaaaatacaatgccaatcccctgcgcggattatacgagctgggagaggcggcaaccgaaaaatacgaagaagccagagagacggtccgggagtttttaaatgccagagaggcggcggagatcgttttcgtccgcaatgccacggaaggcttgaatctggtggcctacagtctgagttccctggtgctgaagcctggggatgaaatcctggtgagcatcatggagcaccacagcaatctcctgccctggcagcaggcagcagccagaacaggagctgtggtaaaatatctggagtgtaccgaggatggaaaatataccgaagaagcattccgcgcggcactgagcgaccgaacgaagatcgttgccatgacccaggtatccaatgtgctgggctgcaaaaatgatatcaagcattttgcacagatcgcccatgagtccggtgcttattttgtagcggacggagcccagagcgttccccatatggcagtggatgtacaggatctggatgtggattttttggcattttccggacacaagatgtatgctcccatgggaattggtgcgttatatgcgaagagagaactgttggagcagatgcctcctttcctgtgcggcggggaaatgatcgattccgtcagccgtaccggagccgtgtgggcggaagtgccacataagttcgaagcaggaacggtaaacggtgccggagcctatgcactggcagaggcaatccggtatgtgcagaagatcggttttgactttatcgaagagagagaagcgaagctgacagccatgctgatggatggcatgaaagagattcccgcagtacacattctgggctcacagaaagcagaagaccatcacggcattgtgaccttcaaactggacggtgtgcatccccatgatgtggcttctattttggatgcggatcatatcgcggtccgggcgggacatcattgtgcccaaccgttattgcaacatttgaaagtattgtccaccaccagagtaagcctgggtgtctacaatacggaagaagagattcaggcatttttagaaagccttgcaaagataaggagacagatgggctatggagaataagacattttataatgaaatcctgacggagcacaatctgcatccgtatcacaagcacaagctggaggatgcgaatctggtgttggagggcgttaatcccagctgtggtgatgacatttttctggagctgaaagtggaggatggtgtggtagttgacggtgccttcgaaggcgacggctgtgccatttcccaggcttccgcggacatgatgctggagctggtcattggcagaagcaaggaggaagcgttgcatctggcagacctgttcctcaagatgatcaagggaagtattaccgaggaagagcgggacgaactggaggaagcctccgtattgcaggatatcgcccacatgcctgccagggtaaaatgcgcggtgcttggctggcatactatgcaggaattattgaaaacagaagaaaaatagctgataaaaagataaagatacatcttgcacgccctttttggatacgctacaatgaaaaaagaagtgtaagaaaagcgggggggctgtgcatgttccacatagagcttatcattgaattcctggaaaatgtgatgaacaatattgtccaggtggcaatactgttctttgaatttgtcggagtgatcgttattattctctccggtctgaaagggttttataattatgtgcgtcgggtgccggatatgaagatcaccctggcgcaggggcttgctgtagggctggaattcaagttgtgcagtgagatccttaagaccgttattgtcagagactggaaggagatcgttactgtagccggtatcatcggacttcgtgcggcactgactttcctgatccattgggagatcaaggaagagaagaatcattcctaaaaatcggcagctgatgaaaatcggctgcttttttttagaatgatttccggttacccaacaaaagtcaataagtttatccagataaagagattaaatttgtaatggtatataggttaaatttgcaccttggaaaaaagctgtcagaggactaacatataacgataaagtatgtatttacaaaaaagtgtaaagaaatgctaaaaaatccgttgcatttgacacttcgacgtactaaagttatcgatagcatgaacgtaaatgtaatcgattacgcatgcttaaaaggaaagcagaatgaaattacaaaagacacttactcccggggaagcgctggaacgcgtcctgcgatcttatcagacctactacaatatcaaaacagaggctgtagaaccgccattcgcagccgaagcgatcttcggatcccataatgagcagtactttctgatcaagaaagctaaggtggcagatattgacaccaacgagactgtgtattttgccacagaggaatctttatcaaaggatcgccttctggaactggactccatcgcctgggaacggggaactgccaacgtgcagccctcatccaatcatcggaacagcgatgttgccctgatcattctgaccggtcatgcagaggaggatgcgcttacacaggtgaaaaagtgcaagcattatcagagttacctctggggatttcatggctggagtaattaccgtttgattgtcgccgagttatcttcgggtcggatcgtccacaaccgccacggacagattttgaagaagctcgtaaaaaaggcaatgaaaaattaaatctgtgtataagaaaaggagaaacacaaatgacagcattattaattgttttggccgctatcgtattattgtttatcggctatgtgttctatggctcctggctggcaaaacagtggggcattgatcctaccaagaagactcctgctattgagaaggaggatggtgtagactatgttgcagcaaagcccgccgtacttatgggacatcatttttcctctatcgccggagcaggcccgatcaacggaccgatccaggcttccatcttcggatgggttcccgtattcctgtggtgtattatcggtggtattttcttcggcggtctgcaggacttcggatctttattcgcatctatcagacatgacggtaaatctgtaggtgagatcatcgaggattccatgggatccagagcaaagaagcttttcatcatcttcgcacttctggtattgattctggtaatcgcttccttcgttaacatcgtggcaggtactttcctgactgtggcagacgaagccggcaagaccgctttcggttttgtgaccaatcctaccggtaaccagtctaccgctatgatctctttgttatttatcgttctggctgttatttatggttatgtgaccaacagaatgggtgtcaagactctgcccgctaccatcggtggcatcatcggtatcgtactgatcactgttcttggcttgaacgttggttttgcaatgaaccgtatcgcatggatcgtattcgtaggtgtgtacatcgctgtagcttccctggttcccgtatggatcctgttacagccccgtgactatctgtccagcttcctgctgtacgctatgatcggtctggcattcatcggtgtggttgcaggtgctttcaccggtactgttgctttcgatattccagctttcaccagctgggagcccaaggcaggacagaccctgttccctatgctgttcatcactgtagcatgtggtgcatgttccggtttccacagcttgatcgctaccggtacttcttccaagcagttagctaacgagaaggatgccaaggcaatcggttacggctccatgctaatcgagtctgctctgggtatcatcgctctggtagcagtcggtgcagtatatcagaagtacttaaacggtgagttcggatctcccgcagctgcattcgctgcaggtatcgcatccatgttcggtaccgagacttccaaggcatatggcaccatttacgcactattaactctgtctgtatccgtattcgcgctgaccagtctggataccggtacccgtctgagccgtttcatgttctccgagctgttcctgaaggaaggcgaggctacctacaaggatgccaagggcgcacgtaaagtgctggctcatcctctgttcggtactgtttctatggtactgatcggttgtatcctgggtggtctgtctctgagccagatctggggtctgttcggtgcagccaaccagttgctggcaggtatcgcactgatggcagtagctgcatggctgggtgaagttggtaagaacaacaagatgttctacttccctatggtattcatgcttgctgcaaccctgaccagcctggtgatcactgtaatcaacaagtgtaaggctatcggcgccggcaccgctgcatggggtgactggttccagctgttcttcgcaactgcaatggcagtgctggcaatcttcctggtagtggaaggtgcacagaccttcgctaagcagatgaaagagaagaaggctaagaaggctgcttaatataagcgcaagatacaaaagataaataaagttaagcaaagagaaatcccggagactgtgaaaggccttcgggatttttattgtgtatgcgggaaccgcagaagcggtgtccggaataataatggatgcggcaatcgcaatatcagccccgcgtaaggaaccggggcaattcttcaatgggaatcggcttggagaacttatagccctgtaaataatctgcatgactgatgatacacagttcttcctgggcatcggtctctacaccttcgtacagtaccttgtaacccagacgctcaaaggcggtagagaagtaatccagcatgaagcgggaattggcatcctgatccgccatcagtaaaaggcttctgtcgaatttgaccacatccagtttcaggcttaagatccggtcgaaattggaataaccggttccaaaatcatccagataagtacatacccccaactgtttgaactcactgacgcattcctgtaccagttcgtattccgtatcgttctgggactccgtaaactcaacggcaatggtgtggaagtcgattccggcggctcgtacgatggatttgaattcttccatgaagtccttttcgcccagctcttccacagaaagatttacggatacacgggagatctgatagccctcatcttgcatctgcttgatctgcctacaggtcttattcagaatgatcatgctgaggcggtggatgtagccgtatttttctgccagaggaataaaacgatccgggaataccagtcctgtctgtggcagacgcaaacgcatcagggattctgcggtatcgtaagtacccgtgtggacattccgtaccggctgacaatagaccagaacgcgttcgtcatctaaggagccgtgttccgcaatatccttcaactgggacttgatataatgcatttctttataagtctggtaatcttcttccccgaagacacgataggaattctgcgctactttttcggaaaagtaattgaatacctcgtagaactgttccagattctcacaaaagtccagatggtcgaagagtaccagcttgtagggaagcttatattcttcataatatttctggaacacctttttaatcagggatactgccctttctgtggcatccgggatattgtggctgtccactgccagtacgaagaagctggtggaaggattgaacaacataccctttcgaaaataatccgtccagaagctgtagaacagctttcccatttcctctgtcatgacgtattcgaaatccatgtcaaagcgcaggcacaggtagtaggtatcctgagcggtctgtcgctgctggcgcagatattcatccaaggatgcggaacccagggcaccggtcttcgggtcgtaggcgttggcatggagcatgtacaataccaccagaagcggcagaaaataggttgtggccaggaaagaagtcgtattcatggcagcttccatgactacgatcaatccacagaccgtctcagtaaatatcagcatatggaacagtgcggtaggaagtctgcggcggtagcgaaccaacagaaagaggatcaccgccagatacagaagatatccgaccataaaaggagtggacaggatattttcataccagattccgtaatgatcctgatgaaatccccagccggtcagaggagatgccagatcggcaactccggtcaccacaaggatggcgaaggacagaaaggtatatttcctgccgatatttttcgggaagacgatcagtattttcaggtaagcaatatagagacagaacagggacagaagactgatatggtagacggcccggaggatccagagaagggtgttctgtctggaaaaaaggtcggcataataaaaggcgatattggaaactgcggcaatgaaaagcagggcaaaacaggccttgaagatccgaaaggtccggctctgtttaatgaaagtctgtcggatcagtaacaatgccagaagacacataaccaccaacagaaaatctgccacgggagagtaactgtggatgacgatatgatttgtggatagtaacaggttcaaccccataaaaattctcctctctggtaatgtagaaaatgaacaaacaatataaaatgaatttacaatataccataagaggagaaatttgtcagtggggcagctgtgggaaattagtcctattttgagcaaatgggaaaaattgtaatagatttaatgttcgaagaatgcaacggcaacagcacccgggcccacatgggttccgatggtggcacccagagtgctgacgggaagctccttggcataatccttccagagatgctcactgtcgtgaatgtatttctgtaaaagttcgtcactcagaccggtatagcccagacagaagggcttggagaagtccacgccgtccgctttttcaatttcacggatgaggaagttactgccgtttttggaaccacgggcttttcccagcataatgatctcaccgtctacgactgctaccacgggcttgatggccagagcgcccccgatgaatgccacagtgggggagatacggcccccttttttcaagtattccagagtgtctaagagtcccatggtgtggatcttatgcttttgctcttgcagaacgcttacgatctcttccgcggtcattccctgctttttcagctgcaggccgtattctaccagaatctgttccccaatggtggcattcagactgtctacgacgaagactttgccttcataatcctcggcagcgatccgggcactctggcaggtgccggacagcttgctggaaatagtaaccacaatgacagtttctccggccgatacagctttttcgtaggcttcttcgaagactgcgggagataccagactggtggtgggcagagtatcacattcgatcagtttctcatagaattccttatgactgatggtgacaccgtcagcatattcctcctcaccgaagcggatatgcagggggagaatcgtgacgtcctctcttgaactgttcatatcggatgcggagtccgtgataaaacgtattttttccataattgtttcctgtactttctatatatagttatgatgaatattctttcgggcggaaatgcgccggggcatccatcgggatggacatacgacatcgttcatgtcaccttgctgttaattctgttggaaagccggtcagggtgagttgcggatggatcatttctctgtgggatgcttgacagaaaactctgtaagatactgctccagattatgggagatccgttccagagagtcatagagattcaaccgttgttcttccgtcatgccatcaccgccgtgagccagtgcggaatagatccgggaactgatctttttgactacagtattgccttcttctgtcagataatacagtgtgcggtaggaacgtttatgttccggcagctcgcaggacaccagccccttggaactcaactggcttaaggtacgggagatggcggccttgtcttccttacacagctccgtcagctgcgtggcggtcagcccttccgggtgctttcccagataatacagacacatggtataaccagcttttaagtccatctgtcccatttccagttctttcaatttttgcagataacggtgcaattctgtgatagataccacaaatctttcaaaacgatcctgcatgaaggttcctcctgtaaaatgttgacactgcaacaactttatgaagtgtaacacaaggatgttgataagtcaacaaaaagaagggcaaaaaaataccttatccattaagataaggtactgataagaataaactatgcaatttccagccgctgctttatttttcggacatcattttccaatacattaagccggacgcgaaccagttcatcatcttcttttacttttaaggcccggtcgaattttctggataaatctaaatgagcttctgcaattgtacagatattacgactgacttcattctcaagagtcaactccatattggtaaggcgattcgccatagagagctgaccggattccagattggtaaggcgctgttccatggcaatctgaccggattccagattggcaaggcgctgttccatggcaatctgaccggattccagattggaaacacgttgttccaaagaatcgaatctttgctccagtgaatcaagtcgctgctccaccctgtcgagtcgctgttcgaccttatcaagtcgttgttccaccctgtcgagtcgctgttcgaccttatcaagtcgttgctccaccctgtcgagtcgctgttcgaccttatcaagtcgttgctccaccctgcccagtcgttggtctatactttctaatttaattactatcgtctctaataattcccggttggtcatgaattctcctcctgtacatgtatactagcacagttcaaaagtgttgacaattgggcaatatagagaaaaaagcgattgtgaattattacaacaaaaaatatgataaatggatgataagccccaaaaacatgatatatccaaggaaaaagagtacggcaaaataaacaatgccgattggaacggtagaagagccagagagagcggctacggtatggattgtactgcgtattcgtttatgctatgctaaatagcagaagtattccggaaacgggaatgcacaatgtgcaaaaagcataatgcactaaaatcacatggtgtgatagatcgtattgaacatagaaagagtgaggactacagcatgctcagacccagcatcggtattgattgggacgatgttaccgccccgtttaacagtatcgccatccgtatggcaaatgaaaaatatcatccgaaggaaccctatcgcatggaggaaatcacttcctgggccaacgaagggcggacttcggtgatcaaagaattctataacgatccggaactgtaccgaaggcagatcccgaccgaggagacgaaacgagggatccgcagactgatgcagatcgcggatgtctttttcattactgcggtgtcaccacattttatgggagtgcgggcagaacagatcatgacccagttcccggagcttccaccggaaaatattattctgggaagtgccaaggatcgtgtccattttgatattgtgctggatgatgccatccacaatattctggagagcaaggcggagtatccggtgctgatgcggaagccctggaatgccaaaatgacggggctgttgtccgtaaataccatggcggaatttgtctctctggtgaagcagatcatgaaagcatccacttctaagacagagaagatcactgctccggcggtgctggccctggtggggccgtccggctccggcaaacgggagattacggaagctttgtgcggtagccgcgggacaggcgcgagcgaaaggacagagagtggggagatttttgtccgcccggtgaactactgcacggaaccggggcgctacggccacaagtacgtcccggaggaagccttcgaccggatgaacttttttgaaaaaacggcttatgccggggtacggtacggcaccagaaaggaagacattcagaccttgctggatcagggaaagtttgcggtgatccccgtggatatgtgcggtgccattgccatgaagcgttcctttcccacccatattatctatgtggcgagagataaagaaaagctgatcgccgatatcattgattccgactatgacaccgaggaaaagacacttcggatcctgtctatcgatgcggagaagcgtaatcgcaagatctgtgattatgtgatccataatgataccatagaaggggaacgtgtcagcggagcggaagaaatccggcggctgatcctgctggaaggcgaaaaatactgaaatgtaccggggagcgatacccggaaaacggaatagagttgcacaaaaccggatagagaaggagcggggcggacggatacgtatggaagaaaaacagctgaaatactataaaatgcatcatgatttacaggaacagatccgactgggagaactgcgcagcggtgaacgtgttccctcggagaaccagctggccgccgcttatcaggtgagccgccagaccgtccgcaaggcactggccattctggaacaggagggatacatctatgcggtacacgggaaaggcacctttgtgtcggagcgggtccgcccggagcataagtctcacaacattgccgtggtgaccacctatctgtcggattatatttttccccgggttattcagggcatcgatgaagttcttacggcacaggggtatagcattttattaaaaaatacaagaaactcccggagccaggaggcacggtgtctggaggaactgttgcagaaggatatcgacggggtcatcatcgaacccagtaagagccagatcagctgcagacatctgcatctgtatgagcggctggaagaatacggaattccctatgtgtttattcaaggctgcttcgaccagatggaagacaagccccaggtgctgatggacgattgcaggggaggtcatctgatcacaaaatatctcctggataccgggcatcgcgatattgccggagtgttcaaggcagatgacatccagggacagaaccgtcaccggggctatgtacaggccctgcaggaagcaggtgtcctctacgatccggacaaggtgatctggttccataccgaggatcgtaaagtccacccacaggagggaatccggcgtctgatctccaagggaaccagactcgacagtgtggtctgttacaatgaccagatcgccatgcaggtcatcccgacgctgacggcccgggggattcgcgtcccggaggacatttccgtcaccggttatgacaattcctacatggccatcggcggaggttttcaactgaccactatcgttcatccccaggaaaaactgggagaaatggcggcacagctgttactgtcactgcttcatggggaatctctgggaccggaagagagaaagattctcatccagccggagcttgtcgtaggaaatacaacttgttagcagaagcatacaagttgtaatatggtaatatcgaaattgtattcaactacaggaggtattacttatgttacagacaaaaaaatatcaattctggttttgtacgggatcacaggacttgtatggggacgagtgcctggcaaaggtagcggagcactctcacaagatcgtggatgccctgaacgcttccggtgtgttaccttatgaggtggtatggaagccgaccctgatcactaacgaactgatccgccgtacttttaatgaagcaaatctggatgacacttgtgccggtgttatcacctggatgcatactttctctccggcaaaatcctggatcctgggattacaggagtatcgtaagcccctgctgcatttccatactcagttcaatgaggaactgccctatgacaccatcgacatggatttcatgaatgagaaccagtctgcccacggtgacagagagtacggtcatatcgtgacccgcatgcgcatggagcgtaaggttgtggtaggccactggtctgatcctgtggtacagggcaagatcgcatcctggatgcgtgctgcagtcggcgtggtggagagcagccatatccgtgtcatgcgtgtggctgacaacatgcgcaatgtagcggtaaccgaaggtgataaggtagaagcacagatcaagtttggctgggaagtagacgcttaccctgtaaacgagatcgcagagagtgtaaatgccgtatctgtatccgatgtcaatgcactggtagacgagtactacgagaaatataatattttattagagggaagagaccccgaagagtttaaaaaacatgtggctgtacaggcacagatcgaactgggatttgaacgtttcctggaagagaagaattatcaggccatcgttacccacttcggagatctgggtgcgttgaagcaactgcccggactggccattcagagactgatggagaagggctacggcttcggcgcagaaggtgactggaaggtagccgccatggtacgtctgatgaagatcatgaccgcaggcaaaaaggatgccaagggtacttccatgctggaggattacacctacaatctgatcaagggcaaggaaggtattctggaagcccatatgctggagatctgccccaccattgcggacggtcccatcagcatcaagtgccagcccctgtccatgggagacagagaagatcctgcaagactggtatttacttccaaggaaggtcatggtatcgctacttccctgatcgacatgggcaatcgtttccgtctgatcatcaacgatgtgaactgcaagaaagtggagaaacccatgccgaagcttcctaccgctaccaacttctggactcccgaaccggatctgtataccggcgcggaagcatggatcctggcaggaggtgcacatcataccgcatttacctacgatctgaccgcagagcagatgggtgactgggcagccatgatgggcatcgaggctgtatacatcgacaaggatacgaagatccgcgatctgaagagagacctgatgctgggagaagtattctaccgctaaaatatgctacccgaaaaatctgttttcgtatataatagaaaatagtattgcagagaacgaaataaaaatctgcaggcagaatctgcgggtagaagttacctgcagatagaagaagggtatcgtagaaatgttaaaagtgtttttggtggaggatgaatttgtcatccgtgaaggaatcaaaaataatattgactggaaggctcatggctatgagttctgtggggaggccggcgacggagagctggcctatcccatgatccagaaattgcgtccggatatcgtgatcaccgatatccggatgccgtttatggacggcctggaattgagccgtctgatccgcaaggagcttccggacacagaaatcattattctgtccggttaccaggaattcgaatatgccaaggaagctatcaagctgggagtggcccagtatctgtccaaacccatcaatggtgaggaactgctggcggaattggatgaattgtcggcgaagatcgaggagaagcgcagagccgttcagatcagagagcggtatttgcaggagatggaggaaaacaatctcagagagcggaaaaaactgttccaggaactggtcaccggagaaagcaccgtggcagaactgttggaatcggcagagattctggggatcgatctgtcggcaccctggtacaatattattctgttcaagacccagtctctgcgtcatgcgcaggatgagtattccggcagcctgatccggatcgaacaggaactgcggggactggaagacggcaggacggtgatcacctttgatcgtaatctggaaggaaaagcattcttactaaaagccgattccgaggaacagctattgctgttgcaacaggaatacatagaaaagatcaaggacattatggaaggctatgagcatgtgcggtatttcggtggtatcggcaagccggtgaaccgtctgcgggagcttccggcatcttttgaacaggccagtcatgcttttgcccacagatatctggtgcaggacagccggatcctggacagcggacatatgacggaggaagcgcagaaggaagataattttgacatcaaggaagtcaatccaaagcagatcgaccgcacaagaatccaggaattcttaaaacagggtgaccgggaggaagtggtctacttcgtggaagaatttttccgggatctcagcaacaaggcactgcagtccaatattttcaggcagtatattaccatggatgtctatttctgtgtggcagattttctggaaagcctgcagacggatacgcaggaactggaaacacccaatcaggacgagaagaccctgcaggacagcgatagtgcgatccattacattaccagaattctgcagaaagcactggcggtcagagataaggctgccagcagccggtatgatgatgtggtggaacaggtgatgaaatacattgatgagaattatgcagacgaggaactttccctgaatctgctggcatcccacgtgaatttctcaccaaaccatctgagcatgatcttcagccaacagaccggacagagctttatcaaatatctgacagactatcgtatgaacaaggcgaaggaactcttgcgctgcaccggcaagcgcagcagcctgatcagccaggaggtgggctacaaggatccacactatttctcctatctgttcaagaagacccaggggatgacccctacccagtaccggggcggcaccaattagccgtggccatggataagggggattcctatgagaaaaaagataaaagaattgtatgaacattcgacactggtggcaaagataagatattcctatctttgccttctggtgccttttgtattgttcctgatcttttgcttctataatttatggaacaataaccgcagatacgaggatatgatcaattcctccgtcatggccagccagttcagcctggatttccagaaggatttcgattatgagacttatctgctgattgtagggaacaagacactggaagagtccagtctgcatgatatgctggtggaggcagatggcatcgtggccggtctggaagaactgacggaatctcaggagaacctgaaacgactgaccagtgtcaaaaaatatctgaacaatctggagacctatatcggcaggattgaggacaatatccgggaaggcaaccgctacgaggacaacatggaaatctgggaaaatgatgtgcagattgtgacgtctctggtgggtgataccatttcccagtacatctattacgagatccgggggattcaggagagcaggcagcaatatcaggatttcttcgtgaatatgatccgtttctccatcattgcctttgcactgatactgattctgtttttattcttatcctattatataccgttaagtatcacgagccccataagacgccttacccaggtgacggatcaggtggcaaaaggtgacctgacggtgcgctccgacgtgacggggggcgtggaggcccaggtgctcagcgattcactgaatacaatgatcgacaagatcaacgaactgttagagcaggtgaagacggagcagatccggttgcgcaaggcggaatttgaactgctgcagtcccagatcaatccgcacttcttatataatacgctggatgccattgtatggctggcggaagcgggagaacagaaaaaggtcgtgagcatggtaggcagcctgtcggactttttccggatctcattgaatcagggacaggatattctggatgtaaaagaagaactgcagcacgtccgcagctacctggagatccagcagatgcgttatcaggacatccttcaatatgagatctgtgttccggaagaattaaaccattgccagattcccaagatcacgctgcagcctctggtggaaaatgcactgtaccacggaatcaagaacaaacgtggcaagggcatgatacggatcgaaggagaactggacggagaggattgcattctgttgatcacggacaacggcaaggggatgacgccggagcggctggagcaggtgaggaaaggcatccgcaaccggaaggcccgggagaccgatatctacggcctgtacaatgtgaacgaacgtatccgtctgaatttcggcgaaaactatggtatcaccattaccagtacctacggggagggcacctgtgtcacggtccggcttccgcagcattaaaaaaatgaaccactatcgtaaaaaaatcaactttttacgccggtggttttttttaccataaaaatttcaacttttccgtgaggtatcttcatggttttttccccggatccgctttacaataagatcatcaaagaaatagttctttggggaacaaaaacaaattgggaggttacacaatgaagaagaaaattttagcagcagtaatggcagcaaccatggtattcagccttgtagcatgcggctcctctgatgcaggcagcaacgcagcaaccggaagtgcaaacgcagcaaccggaagtgcaaacgcagcaaccgaaagtgcaagcgcaggaacgaccagctccagctcctccggagatatgatcaaagtcggcatcatcaataacgaccccaacgagtccggttaccgtaccgcaaacgataaggatatgaagaatacctttaccgaggctaacggctacgaagcatctttcgcatacagcttaaagaacgatgagcagatcactgcagcacagaagttcattcaggatggcgttgactatctgcttctgtccgcagcagataccgcaggttgggattccgtattgaaggatgcacaggatgcaggtatcagagttatcctcttcgaccgtaccattgatgcagatgagagcctgtatgaggcatccatcgtatccgatatggcaaaggaaggccagaccgcagttgactggttaaagagccagaacttaagtgaatacaacattatccacttacagggtgttatgggttccgcagcacagcagggacgtaccggtgctctggatgacgcagcagcaaacgacggattcaatctggtaacacagcagaccgctgagtggaacgcagagaaagcacagcagatcgtacagtccgtaatcgacgcaggtactcctttcaacgtaatctacgctgagaacgatgatatggctaagggtgctgtagcagctctggataaggctaatatctcccacggcgttggtaaagacgttatcgttatgggctttgactgcaacaagtgggctctggaagaactgaaggcaggcaactggaactacgatggacagtgcaatcctttccaggcttcctacatcgatgacatcatcaagaagctggagagcggcgagaccatctccgagaagaccatcatcatggatgaaaaaggcttcgatgcaaccaccattactcaggaagatgtagacaactacggtatctaatctgacgtaaacgaccagaagcgcggcgcatgctagctccgcgcttcttttatcaaaagagtaactattcagaaccccattcgcaaaaggctctttcagagcccactttattgcgaatgtggttacttcgccctataaatatcataaaatattcttacgaatgccagcattcgaagaacatttcatgatatttacatggctctgaatagttacagattaaggggtgaaacttttggacaataacacagtattggaaatgaaaaatattcacaaaagctttcccggtgtacgtgctctgaaaggtgtggacttccatctgaacaaaggtgagattcatgcgctgatgggagagaacggtgccggaaagtcaaccctgatcaaggtactgacaggtgtctacagcaaagatgaaggtcagatcttcatcgacggcaatgacaaagccgtatccattcactctccgcaggaggcacagaagctgggcatcagtacggtatatcaggagattacactctgcccgaatctgtccgtggcggagaacatgtacataggacgttccaataagatctatcagaactggaaaaaaatgaatgaggacgcagacaagatcttacagaatctggatatccctgcggaagcgtcccagcagctggcaagctgttccatcgccgtacagcagatggtagccattgccagagctgtagatatggattgtaaagtactgatcctggatgagccgacctcctctctggatgagcaggaagtgacaaagctcttcggcctgatgcgcgatctgaaggccagaggcgtgggtatcatcttcgtaacccatttcctggatcaggtatatgaagtgtgtgacaagatcactgttatgcgtgacggcagtctggtaggtgaatatgccatcaaggatctgcccagagtacaactggtatccaaaatgttgggtaaggaactggatgacctgtccgatatcaaaggcgagcagcccacggaacagaagacggagaacggagaacccttatttgagaccaaagatctgtgcagcgatgccggaatcaaaccctttgacttctatattaagaagggcgaggtcaatggatttacgggactgctgggatctggccgaagtgagtgcgtccgcgctattttcggtgctgaccgtgtcatcggcggtacggtgaaaaagaacggcaagcaggtcaagatcaataagcctctggatgctatgcgttgtggaatcggctatctgccggaggatcgtaagcgtgacggtatcgtaggtgacttgtccgtaagagagaatattatcctggcattacaggtacttcgtggattcttccaccctatttccaaggcggaagctaataaatttgcagacgaatacatcaaactgctggatatcaagacggcatcggccgagacacccatcaagtcgctgtccggcggtaatcagcagaaggtaatcttagccagatggcttctgacccatccggaatatctgattctggatgagcccaccagaggtatcgatgtcggtaccaaggtggatatccagaagctggtactgaagctggcaagtgaaggcatgagcgtgaccttcatctcttccgagaccgacgagatgctccgtacctgctcccgactggtagtcatgagagaccgcaaggtggtaggagaattgtccggagaagatctgacccagaccaagattatgagtacgattgccggaggtgaaagtaagcatgagtaatgaaaagaaagtagaaaaaggtaataaaaatttcctgagcggattgttccggcagcagattttcattcccattgcagccctgataatcctggcagtattcaatctgatcgtagaccccagtttcttcaagatcacactgggatataacagcgcaggagatccggtattgtccggttacctgatgacgatcctggactacggttccgaactggctattttagccattggcatgacactggtcactgcagcttccggcggacaggatatcagcgtgggcgctgccattgccatcgcaggcagcgtgatcttacgagtactgtgtggtacgaattccagacccgataccctgcaggcccccattatcgtagcatttctggtagcctgtgtggtagccatgctcttcggtgcctttaacggtgccctggtagcatatttcaagatccagcccatggtagcgaccctgatcctctatacggcaggacgttccattgcagcatggatcaacaacaacgagcttcctattgtaagtgatccgaccttcagctatttcggtggatttattccgggaattcccattcccacaccgttcttcattgcagcggtctgtgtactggtgatcttcctggtattgaagttcacaacactgggactttacacccagtctgttggtatcaatgagaattcctccaagttaaacggactgaatcccacatttatcaagttcctgacctttgtgatcctgggactgtgtgtagcggtagcagcactgatcaaagtaagccgtctgtcctccatcaactactccgttattgcaaaggatatcgagatggatgccatcctggcagtagctctgggaggtaactctttaagcggtggtaagttcaacatggcagcttccattctgggtgcttatgtcatccagttcctgaccaccaccttgtacaaattcgacgtacagtccgatgcacttcctgcttacaaggcggtagtggttatcctgttggtagtcttaagtactcccaaggtaagagaatggctgtccgctttcggcaagaagctgaagcagggcaaggctgtaaaggaggttggctgatatgggtaagaagttaaaaaatatgacagataccaatctgctgctgaccatcacgatcgtagtattcttcgtaatgtatatcggagccatcgtgttccagggaaaaggcttcttaaaacctcagacatttttcaacattctgaacgctaacgcagcactgatcattctgtcctgcggcatgagtttagtcatgattaccggtggaatcgatatttccgtcggcggtgtggtggcactggtcagcatgagctgcgccgtatatctggacttcggcggcggtaatgtatttgtatccatgttactggcagtagccattggccttgctttcggtatcgtacagggcttcctggtagcatacctggatatccagccctttatcgtgaccctggcgggtatgttcttcgccagaggtatgacaacgatcgtaaataccaaacctttcaacgtggccaacgaaagtttcactgctttgaaggaaacccgtgtgatcgttccaggaatgggctccgtgaacaaactgggcaattacgtcaatgcttatgtggagatcggtgtgattgtggcgcttttagtagtcattctgatgtttatcatgcttcgctggaccaagatgggccgcagcttctatgcggtaggcggtaacaatcagagcgcgctgatgttaggtatcaatgtgaagagaaccaagttcatgtcccatctgctctgcggactgttggcaggtatcggcggttatgtgtacttcctgcatgtaggaagcggatctgcttctcatgccagcggcatggagatgaacgccattgcatcctccatcatcggcggtacgatgctgactggtggtgtcggcaatatcatcggaactttcttcggtgtattgtccctgagcaccatccagaatatcgtatccagtgcaggtctggatcaggcatggtggaccggtatcaccattgcagctatgctgtgtctgttcctggtagtacagagtgtggtcatcgcaagaaaaaagaaaatgctgcagaacaaataaaagcagctgaaaatagggaggagcggaaagagcgtggctggtgtgcagtcacactctttttccgctagtaaaaggaatccaccgaatatcagggggtagaagttatgaaaaaaacgaaggtaaaaaagcagaaaactctgaaaaagcagggatgcagcctgttcctgttgttgatgctgctggcactggcaccggtagttttggcaacagtgatcctcagtaccacatctttacgtctgaccagaacgaatctggaaggcagtgtgcagaccacactgcatgtaactgcggataatctggcaaaatactgtaaggaaaatgagatcacggcaatgaatgccagcggttattatgagtacctggacagcctgaaggaagaaggcctggagatggccattcttgcagacggcattccggctaccacatccattaaaaatgaaaatgactatcgtatccgtgaaatccccatggatcaggatcttgggacggagggatattatgataaaaatgtagtgattgagggaaatacttattatggttattatatcccgattatgaataacggacagatcactgcagtggcttttgcggcggaacggaaaaatgagatcaccgatgccctgtgggagatcgaggttgtattcatggtctgcgcagtgggcatggtgatcctgtttggtgttatctgctttttcctgagcagagcactgtcgggcaagatgaaagagaccggcagcagggtggatgccctggcggaaggtgatctgagtgccagaaaagaatccgacagtattgtccgggagatccgtaatctgttacagaatacctcacagatgcagcggaatctggcacaggtcatcggcggtgtacaggaggtatccggagaacttctaaacagtgtatggcaggtggcagagggaagcgatgccaccacagaacaggctggacagatcagtcaggcgatggagcagctgtcttccgcagcggaggaaatggcggaaaatgtgcagaatatcagtgaccgtatggatgagatcggagaggcggtcaatgacatcagtgtcagtgccggacagctgcagaaggattcggaagaaatacaggacaacagcaaaaaggcgggggaaggcatggaaaagatcatgaccggcagcaatcgttctgtggaatccgtgaataccattacagcgaagattcatgagaccaacgattatatcgaaaagatcgatgaggcggtagctctgatcttctccatttccggacagaccaatctgttaagtctgaatgcctccatcgaggccgccagagccggagaggcgggcagaggctttgccgtggtggcggaagagatccgcaaactgtcggagcagagcgctgccggtgccgagcagatcaaaaatctggcccagggcattatggagaaatccggtgagactgtggaacaggcggatgtggtaaagaatatcatccgggaggaacaggatcacattattgcaaccagagagcagtatcagcagttagagcaaagtatcagacattctgcggaagagatccgcaagatcgccggagagaccggacgtctgtcacagcagaaagaggatattctgggcaatatcggcagcctcagtgctatcagtgaggaaaatgctgccaacaaccagcaggtgaatgcaaacattgaggaaatcctgacacagatacagacagtgggcgcaaactgtgataaaatgaaacaaatctccggggaactggagagctctgtggcgtattttcatacagagaaagaacctgccggaaaatgagagaatgacagagcgatttccgggcgggaagtatgacagaacaggatgacattacagatatgaagaaatgcagaacaggaagacgatggatggcgggtctgttgctggggctgggaatcctgcttgcaggatgcggcgacagacaaagcactgcggaggatattgcaacaccagaggatacacagacagaccgtattgtggtgggattttcccaggtgggagcggaatccgactggcgcagtgccaacacggagtccatgaaaagtacctttacaaaagaggccgggtacgacctgatcttcgaggatggtcagcagaagcaggccaaccagatccgggccatccgaacctttatccagcaggaggtggactacatcgtgctggcaccggtgacggagaccggatgggacacggtgctcagggaagcaaaggatgccgggatcccggtggtcatcgtggaccgtaaggtggatgtggaggatgacagtctgttcacctgcttcgtgggttcggactttgaactggaaggcctgaaaatgtcggagtggctgaattccttttccatcagcaagggaattgcaccggaggatcttcatattgtaaatattcagggaaatatcggagcttccgcccagatcggacgtaccagaggattggagcagggcgcggcaaaatacggttgggatctgttagaccaggtatcgggagaatttacccaggccaaggggaaggaagtcatggaagctttcctgaaaaaatacgacaatatcaatgtggtctattgcgaaaacgacaatgaggcctttggcgccatggaagcgatccgggcggcgggaaaaagggtcggcagcaatctggcggcaggagatattatgatattgtcttttgatggtgtcagcacagaatccatggactgcgtgctgaaggatgagatcacctgcatcggagaatgcaatccactgcatggccccagggtggaggctttgatccagatcctggaagagggaaggataccggaaaaattttcttatgtggaagaaggattgtatgcccacgacgatacggtgaccgccgtgacggtgggagacaagacctaccgggtacggcgggtagacgatgagatccgcaacgaaaatgcatattgacagattttgtgacgattcggacgttcccctgcaggcggtccggatcgttacttttttttccatgagggctaaagtaattgtaaatccgtccgatacatattgtgaaacatcaaaagacattcgggaaggaggagtcgatatgcgtattgaagcgtatacacaggtacagcagctgtatcagtcacagaaggtcagcaggactcagaagactcagacagcgtcacacacggacagactgcagatcagcagccagggcaaggatttccagaccgctaaggcagcagtggcagcagcacctgacatcagggaagagttaacggctcccattaaagcaagaatccagaacggtacttatggagtggataatgcaagctttgcggagaagctgcttcaaaagcaggaagaaatgaggtagttccttggctagtttaatggaaaacctgatagatgtactggacagagagagtacggagtacgaagctctgcttcagctatcacagcgcaagacaccgattattgcaggcggtgatcttgcagagttacaaaagatcacggacgaggagcaggagctggtcagcaggatccacaatctggacaagcagagagcgggagtgactgcggacatagccgatgtattgaacagggatgttaacgacttgaaattgccgaatctgatcactatgttatctgcacggcctgcggaacagcaggcactggcggattcccacgacagattacaggcagcggtccggggactgaagcgcgtgaacgagcagaacagtgaactgttaaacagcgcgctggagatggtggaattcgagatgaatctcctccaggcatccaaggctgcacccgagacagcgaattacaaccggggagcttacaatgcaggcaataccatgggggtcattgaccatggattcgatgccaagcagtaagaccggatcccggggatctgaggatcccctgatacagaggtgaaagtttatgccattaatgggtagtttatatataggttcgtccggattacagacaagtcagaatgcgctgaataccacagcgcataatctttctaatgtggacaccaccggctataccagacaacaggtacagcagtctaacagagcttatgtcacattatcgacagaccctaagtctatttccaacaaacagacaggtctgggtgtcacatattcccgcgtaaaacaggtcagagattatttcctggacaagacataccgcaaggaatccggacgtagtatgttctatgaagtgtccacagaagtcatggaagaggtagagagccagctgggagaattgaacggcgaggcattccagaccaccatgacagacttctggaccgctattcaggagctttccaaggatcccagcagttctgtaacacagggcatgctggtgcagagagcggcggaattcgtacagagagccggagcagtatacagcggattgagctcctaccagaacaacctgaacacacagattaagcagaatgtagataagatcaataaatacggcaaccagttattaacgctgaacgatcagatccgtgccattgagagtggcggcattgaacatgccaacgacctgagagatgcgagaaatcagattctggatgaactggcagagctgaccaacatgaccttttccgaagatcgatacggcagtgtatccgtacagatcgagggcgtggatttcgtaaaggacggaacctgttatgagatcgctctgaagacggatgaagccaccggcttctacactccgttctggccgcaggatgccacctacaccgtaagagctgatggcaccagagattataatattgacggcgcagaggtatttgatctctccgtggagatttcttccgacctgaacacagatatcggcggcctgaaggcaatgcttctggccagaggtgatcacagagccaattatacagatctggcggaaggaaaatacgacagtgtctcccagtccgttgtcatgaatattcagggtgagttcgaccagatgatccacaatgtggtgacgaaggtgaacgatattctggcgaaggctgcaggagtacagaccggagatctgaaacttgcagatggtactacacgccccaatgtccgctattgtgtctcggatccgaatggctatatgcgcatggaggatggcagtcccatccaactgtttaccaaggtcacaacggatggctatgagaaggtgatcggagaagacggtgtaacagagtattggattatgaaggatgaagatccggacagccctgagagcctgtataccatcggcaatcttcaggtaaatccggcgctgacgaaggagccttccaagcttggattccgtttggcagacggttccgaggataaggagaccgcagatgctttgaaagcggcatttaccgaggaagcctacacgctgaatcctaatgtacagaaaaagactacttttgtagattattataccgacctggtatcgcaggtatccaattccggctatgtattccggagtatttatgagaatcaggtcaccactgtggaggctacacagagtgccagagagcaggtcatcggtgtttccacagacgaggaattgtccaacatgatcaagttccagaacgcatacaacgcatccagccgttatatcaacgtgatcagtgaaatgctggatcacattctttccacgctgggtgtgtaatgtgtaagaaataggaggtaagttatgccctcacagttttttggattaaatattgcatatacgggacttctggccagcaatgctgccatgaataccacttccaataatatcgccaatgtacagacggaaggctacagcagacagcaggtaacacagcaggcatccaatgccctgcgtgtattccagacctacggctgtgccggtgccggtgtagagacactggccattgagcgtatccgggatgaattctatgacggaagattctgggacaacaacgcactgcttggcgaatatgacatgaaacagtattacatgcagcaattggagacgtattttgatgatgacggtaagagcaccgggttcaagacgaacttcgatcagctgatgatcaccggactgcaggcactcctgaaggatcccaacagtgccacagccaaatcccagttcgtgggatatgccggagcactgacagattatttcaatggtatggcgggtaatctggaaaaagtacagaaggatatcaatcaggagatcaaactgaaggtggatcagatcaattcccttgccggtgagatcgcctccctgaataaacagatcaacaccattgaactggctggaacaaaggccaatgagctgcgtgaccgcagaaccctgctgatcgatgaattatccaagatcgtggatgtggaagtcaaggagactccgatcatcgatgccaacaacgagaaccgtgagactggagccaacagatatatggtcaagatcgcaggcggacagatgctggtggacggcagtgattataacggtctggaatgcgtggcgagaacctcctatgagaaagtaaaccagaccgatattgacggtctctatgagatctattggtcagacggtcagaagttcaacctgtacaatgcttccatgggcggagatctggcaggactgatccagatgcgtgacggcaacaacggggagaacttcaccggacaggtgaccgccaccggcacgacgaccacggcagacggcaagacccacgataccgtaaccgtaaaagtaaccaaggcctatctgcaggacctgaataaatgtaatctgtcggatcagggcggtatcatcgatctgggcaatcaggaattctattatgattcctgggaatatacctgcgaatatgatgcgaacggcaacgccacttactcctatacatttactttatcggacagtgagaagaatccccggggaattaccaatgaccgtgtagggaaaaaggcggagatcggtaccgacctgtcctatcagggcatcccttattacatgaaccagatgaatgagtggatccgtaccttctctcagaaattcaacgatattctgacttccggttacagtggcaacggagatcccggcgtgaagatgttcaccggtaataaagctaccggtggtgagcagttcctgctggatgatgcggcgaagcgatatgacaagcaggagaagaaaaacagtaaagttacggtaaaagtcaacgatgacagctactatcgtctgacagcgaagaatttcgatattctggatgccatggagcaggatcccagcctgatggcaaaccgaaaaaatgcatctgacggcgtggaacagaatgacctgttgaacgatctgaagaatctggctacggataagagcaagatgagcttccgcggcaacagtgcctccgagtttttacagtgtattttgtcagatgtggcgttgaatgcatcccgggccaatactttttatgcaagctttaaggatatatccggtaccattgacaatcagagactctccatctccggcgtggacgaggatgaagaagccgtaaatcttgtaaaataccagaacggatacaatctggcttccaagatgatccagacactgacggagatttatgacagactgattctggagaccggagtctaaactagaaaggaggcagctattcggattcccacatatgttcgcaaaaacgcacgtatccgtgctttctcgctgctacacagctaattttgctcacgtgtgtggtgactctattcgagtcaccattcgaatcagaaaactgttacttatatgcaagcataacgtaccagttattctgatttttagaatcctgaatagttacggagaaaatgagaattacgaacaagatcatgcagcgtaataatctgtccaatatcaatacgaacaaagtatatcaggataagctgagcacccagatgtctacccagaagaaggtcagccgtccttccgatgatcctgtggtatccatccgtgccctgcgtttacgcagcaatgtgaccgaggtgacgcagtattacagcaagaacattccggatgcggagagctggctggacgtaaccgaggatgcactgaagaacctgacagagatcatcacgaatatgatcaaacagtgcaccaaggcatctaacggagatctgaaatccgcagaccgccagatcattctggaacagctgaaagccctgggagatgaagtgtacagcaccggcgatgcagactatgcgggccgttatgtgtttaccggatatcgtaccgatacttctctgagttttgataaagaatacaatacgaaatatgagatcaccgagcagctggacaacagctccatcacacagctgacgaagatcgacaccggaaaattgctggatattactgctgcaaattataataatgcaaataacagcaagatcacggaacaggatattaagtccaccgaggtgtaccgtatccagctggcttatgatgactgcagagacaagaatgcaaacccggctgcagccccgtctatttctttctatgagaaagaccctgtaaccggcgaagctgtaatgaaagaaccgacatgggattccactatgttcacaataaagtcctccacggaagacccttacaccgaggcagcaaaaaatgatgatgcactgatctatgtgccggataccggtgagatcctgctcggcaggaaccgttatgataaactgatggcctgcaaggatgatccttccacctcgggaaaaaatgaaggtgagatccgcgtaacttatcagaaggatcactgggtcaagggtgatctgagacccgagcattattttgcatgtaccagtaccgatgcagacggaaaagtaacggattataacaagtcctatcttgacggcaagagcgaaaaacaggtcatcgaatatgatgtaggcttcaaccagaccattcaggtgaattccactgcagatgagtgcttccagcacggtatcggacgtacggtggacgatctggtacaggccatgcaggatgtggtggatctggagaatgtgaagaccaagatcgagggactgcaggagactgctaccggtacggatgcagagaccctgacgaagcagatggaagcagtagaaaaagcactgactctggcaaaggacaaatgccagaagatgttcgaaagcggcattactacgttccagggatatctggatgatgccaacctgtgcgttaccaactgcggtaccagaagcagcaaactggaactgatcgataaccgcatgaagagccagaagaccacctttgagaccttaaagagtgaaaacgaggatatcgatgttaccgagaccgtcattgatctgaagagtgcggaaatgacctatgaagcggcactgatggctaccggtaaagtaatgcagaccacactgttgaatttcatctagaacaacaggttacggaaaggcgtaggtattttatgaagatcaatacaaaattttttggagaagttgagattgcggatgacaagatcatcacttttgacaaaggtattatcggattcccggaactgaagcattttaccatgctccacgatgaggagaagggcagcaacgtaggaatccgctatttacagtctctggaagaacccggattcgccatgccggtcatggatccgctgctggtcaaccctcagtatgatccggaagtggatgacgaactgctcactagtgtaggcaatctgactccggagaacattctggtcatggttactgtgactgtacctgctgacctgacgaagatgacggtgaacctgcagggtccctttgtgatcaacgtggaagaacgcaaggcctgccagatcatccttgagggagataaatacccggtaaaatatccggtatacgacatcctgaaatccggaaaggcgggtgagtaagatgctggcattgtcccgtaagaagaacgaagcaatcgtcatcaacaacgatatcgagatcaccgttctggaggtcaaaggtgatcaggtcaagatcggcattaccgcacccaaggaagtgcccatctaccgcaaggaagtctacctccagatccaggaggccaacaaggccgctgtggatgccgaaggtatggcagcactgaagaacctgttggggtaaaacaaagaaaataatggaaatgacacagactccggagtatgcaatccggagttttttctgaatacgcatattgaaaaaagagggcacaatttcccaaaattataaaaatacattgaaaggacttagatataatagtataatttgaaaaaagagggcacaatgttctcaaaatatcaaagtggagaaaaacatggaaataaaaagagacttatatctgcaaagaatagtagatagaatgcataatggaatgataaaggttattacgggaataagacgttccggcaaatcatatctgttgtttaccatatttaaaaactatcttatatcccaaaatgttccggaagatcatattattgcgatagaactggatatgttggaaaataaaaggtatagagatccctatgtaatattggattatattaaaagccggataacagatgaaaaagattactatattttccttgatgaagtccaactcctggaagagttcgaggaggttctgaattctcttcttcatataaaaaatgcagatatttatgtaacgggaagcaactctaaatttttgtcaaaagatattatcaccgagttcagagggcgtggagatgaaatacatgtttttccggtcagttttaaggaatatatggatgtattcgatggtgataaatatgaaggatggagttcttatgttaattttggtgggcttccgttaaccattacgatgaatacagatgagcagagaatggaatatcttaccggattgtttgaagagacatacattaaagatattattgaacgtaatcatatagaaaaaattcaggaaataaacgacttgattaatatactggcatcaggaatcggttcactgacaaatgcatcgaaaatagaagctacatttaaaagtgtgattcagtcagatatcagcctgaataccattcggagctacattgagtaccttaaggatgcctttattgtaagcgaggccaatcgatatgatgtaaaaggaagaaaatatattggaactccactgaaatattattttgaagacgtaggtctcagaaatgccagacttggattcagacagacagaagagactcatattatggagaacatcatttataatgaactccgggttcggggatttcatgtggatgttggtgtggttatgaaacggaacagaaccaaagagggagtgcaggaaaaaaaacaactggaaattgatttcgtagcaaataagggaagcaaacgatattatattcaatcagcattcagtcttccggatgatgagaagagaatgcaggaaaaggcatccctgataaatgtaggtgattcatttaaaaagattatcattgtaaaagatattattaaaccatggaatgatgatgacggaatattgacaatgagtatttttgattttctgttgaatgaaaatagtctggacttatagtttttaggacagtagattccatacaaagcataaataaagagggattacgtgtgtttcatattatagatgaacgtttttttgtaccgttggcatctccgaataaattagtatattgggaatgtatctgcaagttattttccgtcatggatcatcagctttcctttggagtggacagagatgttgtggtggaggaactgcaatattattttgaacagacccaggcagcggattttgatgaagaagaattccagggaaaaaatgcaagagataaggcaaactggatgttgcgaaaactggaaaattatggatggatagacatcgagacagataaaagttatgtacaaagagttaattttaaggaatatgccgtcaagattataaagacattgttggaaattgcagaaggtaagcaaatcgaatatcagggatatatttacactatatatagcctggtgcgaggtacaacggacaatccgggaatcgttcttttgtcaattgtggaaaatacagatatgttgattaccggtctgaaaaacctgagttccggaatcaagcattatattgatgaactgacaaagtataagactccggcggaaattatggatgttttattcaacgattacatagaaaatattgtagacaaagcatatcatcgattgctcacttcagataatgtctctaaattccgaccggagattatagagagactggaaagtaaaagccatagtaaggcttatgtggaaaaagcaggtgcggaactggcttccattcgggaaattgcgccggaagaagcagaagaactggtctatcattatattcatcaggtcatagatgcttttcagaatatggatgaaatcctggcagaaatcaatcgtaaaaatacgcaatatcagagggcagctatcaatcgtgccaagttttatctgattggcggcgaggatgtcagggggcagatcaaggatattctttctgaaatgaatgagaaaatcaatcgggaaaacatggatcttggtggaatttacaggattgaatttttggatgatctgatccggatatacagttcagcagttatagatgagaaatctttttatactccgattgaaggaaagaaaacatttgaaccggaaataatccaacaggaggaaccggacactgaactcaggaatgagaagaaaaggaaaatgcttgaaaagctggcaagagtcctgaacccggagaaaatagatggatatgtagaaaaacagcttggagaaagaccggaaatgttagcttcggagttaccgttagatactacggatgatttcgtgaagatgatttatgttcgattgtacggtcagagaaaaaacatgaagtatgtagtgagtgtaagagagaccatacagaaggaaggttaccaatttacggattttacaatacgaaagaaggtacaaaagtaggatggatattttaaacggaatgttgcagaaagacagggataatttctcacggatatgtaaccggctgctaagttcctgctttttatgtaaaagaaatgaaacaaccagattagattattattttgtaacaaaatacaaggaaaaatttgcggaatgttttgcactattgggctaccgtttggaaattaatgaagaatatggtgtggttcagttaaccaatccacaaaactataaccgctacaatatgaaactgtttgaatcggttctcttgttaattctcagaattttatatgatgaaaagagaagggaactttctactacagaggaagtaattgtaaatgtgggggatattcatgaaaaattcttaagcctgaagatcagagagaaaatgatagacaagacaacttttcgcaatgcaatcagtacattgaaaaggtttcagatcatagagatattggataccagccttacggaggaagaatcccggattattatctttgactctattctgatggctgttcgcgtggaagatattaaggcagcttatgaaaagctggaaatttacaaaagaggaggaaaaaacagtgaagaaactgacgagagtgaaattgattaactggcatcgctttgttaatgaaacaatagatcttgaaaaatctacactgatttccggagaaaacggagctggaaaatccactcttttggacgctattcagttcgtgattatttgttcaaccaattattttaataaggcagctcatgaaaacgggaaaagaaaactgaccgggtatattcgctgtaagaccggaagagaaaataaaccttatgaacggacaggagagatcagtgcacatgttgcactggaattttatgaagagaaaaaggataaatattttgtgatcggtgccgtggtagactctgcttcggagggacaggaaaaaacggcaagatatttgatggacggagtacgattcgaggactctatgttttttcaaggaaaagcgccaaagtctatcaatcagtttcggacaatgaatagttctaaaataaaacaatggtgtactacagataaagaagcaagatcaatgatcaaaaaccgctttggacgaatcgaagataaatttttccggctgattcccaaggctctggcttttcgaccgattgatgatattaaagattttgtgtattcctatgtattggatgagaaggaagtcaatattgatgtattacgtgaaaatgtccggacttatcaagatttacagcgtacactggaaaacgtaaaaattcgtatcgagaggttggaaaaaatcaattccttacatgcccaggcagcggatggattacagaaggataagcaatatggatattatcttgcgagagtagaagcggatcttatcctggaagaaatagaaaagatgcaggctgagatacagacggatactttgcggttggaagaacaaaacggtcagatccagactgtgaaaaaagaacagatggaaaaacaacagatcagagatgatttgcgtgcggaacttgcaacagataaagattttctggcaaaagacgaacaggagaagcgactgcagttattggagaacagaaagacagatttgctgaaggagcgggaaagccttcaggaaagcatggactctgccagaatgcagttgaaaaaattgctggaagtaaaggatgtggacacatctataaaactttattatcgaaacttgtgcatgccagacaatgatatgaatctggcgcagacaaaggacacacttttgcaggctatttcctacaaaaatctaatgcgaaataaagtgctacagaaaaaagcagagacgatagcaaaggaagccgaaatcagcgatgaaaagcaggaactggacaagaaaattgaacagttaatgaagaaaaaattttcgtattctgaagatgtagaacgtgtaagaatggaaattaaggaagagtttcaacgtatcggacggactccggaaccgcgtattttatgtgaaatgttggagattacagatggatcctggagaaatgctgtggaaggttatttaaacacgcagagattttatattctggtggagcctgaaaattttgatattgcattgggaatttatgacaggcttcgaaaagagaaaaaagcatatggagtaggccttattaacacacagaatctggaagaatatgataccgcaccggaaggatctctggctaccgtagtgtcttccaaaaataaatacgcaaaacgttatgtcaatatgattctcggaaaagttcatatgtgtgagcattatcgggaactaaaaacttataggatctcaatcacaagagagtgcatgaagtatcagaacaacgtagcgagtgctattaaaccatccgtttttgaaacaccatacattggacagaatgccataaaggtacaactggaacaggcaaaacagaagcgggaggaattgaagcaacagctggcggacttgaaaagcaggctgaaacaactggaatatgtactggagccactgaatacggatcaggatacagatattaagtaccgtttggacgttattggtgatttgcggcaggtttctctggaaattgacaaatgcaaagaaaacattgctacattgaagaaaaattccaatatgatcatgaaacagctgcaattgtctaccttggaaaaaatgttagaggaactgacggtaaaaaggagtaatttagacagaactgccggtaagacggaggaaagaatcagcctgacaaaacagaaaattgcagagaatcaggcaaatcatgtagaaaaagcactattttatgaaaaacttggggcagacgatgcagatttattgccaatatggagacaggaatatgagaaacagacagagggtaagtcttatgcacagttcagagataattatttgcgaaggagaaaagcaaaccagacactgattgataaggcaacggactctatgaaagaggtaatgagggaatataaaacagcgcatgattttggtgcacctgcttcgatggaaggatatcgggattttgaagcggagtatttgaaactgaaaaattcagaactgctgcagtatgaggataaggtggagacggccagaagcgcagcggaagaagaattcagagagcagtttttgtctaagctacaggaaaatatgaagacagcccagtctgaatttaaggaattaaacaaggcattgaatgatattacgttcagcaatgaaaagtatgaattcctgtatatgccgagtaagaaataccgtcaatattatgaaatgatcatggatgattttaatgcgatgcagggagagtctattttcagtggactgtttcatgagaatcataaggtagtgatagaagaactgttcgaacggctggcacttgataatgacaatagtacaaaaacactggatgaatttacggattatcgtacttatatggattatgatatacgcattatacacagcgatggaaactattccttatattcaaaggtgtgtgaggaaaagagcggtggtgagacacagacacctttttacgtcaccgtagcggcatcttttgtccagctgtataagaacaatattggcggagaggcagtgggacttgtgctttttgatgaagcgtttaataatatggatgatgaaagaataggcggagttctggaatttttgcggcggttgccgctacagatattgattgctgcaccaccggataaaatacagtatatcagtccctttgtggaggagacattacttgtaatgacagatgaaaaaatcagttatgcagagaggtatgtaaatggtacagtatgacagaatggttttaaatcatttgctggatacctatgaaaacagtctgttgtcaattggagagaacaggagaaaggtacagatagagtttcgttttacgagaacatctataccggcatattatgatgagagttcatcagaatatgaaaaaattcatattttgatgaatgcactggaaaataaaaatatgataactgtaatctggaaggaccataagcagggacatttcatacaaaaggttcggatgaatgcggatcaaattgatgaaatttaccggtatacaggaagaaaaccaaagcatggtctggaggaagaaaacagagtctttcttcaaaaatatctgaatgaagatgctccggtcacggtaaattttgtaggatatctgttggaacgactggaaaaccacaagtcggtaaaagaatacataacattggaaaatctgcaggaaacagaaaaatttcttcgtgcatgtgtatctgtagaacaaaataaaacaccttgttatatcagagagttctccattcaacattttcaggattctaaatattttgaacagatagaaagcaggattatcagagtgtttcggcagttcgatgaggaatataaggaaatggatgcagtggaactattggcggaatatggaatttatcaaacccctgattttgtgtattttaagggagatgtgcgcctgctggtggaaggggaggagatgaatttgtcccttttaaagcagggaattggaatttcgggagaggatattgaaaacattcgtttctcggatttcagcagaatacagaaggtaataactgttgaaaaccttacttcttttttcagataccatgaggaaaacagcctccttgtttacctgggaggataccataacagggtacgaagaaaactgctccaaaagatttatgatgcaattcctgctgcaaaatattatcattttggggacatagatgccggaggatttcttatttttctggatttacgtaaaaaaacagaaattccatttgaaagcttccgtatggatctggatacgctgaaacaatattcacaatatggaaaaaaattgacagaaacagataaaaaacgtctggagaaattaggagaagaaaaggaattcagcgaggttatccgatatatgctggagaaaaatataaaattagagcaggaatgcattattgaatagatggtgtcgtgaaatttttgcagcacctattaatttttcaggagaatttaccgatacaatccttagagaagcaaggtcgtgcgcccacggaaggcgctttttatcacacggaggtgaccattatgaccatagaaccgatttccagtctcatgacagtgcaggcacagaacacagccgctgccaggaacactgtgacaaaagtaactacagaggagaatccctcagaatacaatcctgccaatgtaaaagcagcagataaacttgaccagaccaccgcagttgttgaaaatgcgcagagcaaggatcagaataatacttctgccgatgctaatagcgaacagcaacagcaggtgaccaacgagcagatcaagaaagcagtagagaagctgaataagaacatgatgtcccattcagaagctgttttcggtattcatgaggcgacaaaccgcataacgatcaaaatcatagacaaggataccaagaaagtcatcaaagagcttccacctgagaagactttggacatgatcgccaaagtgtgggagttagccggtatcctggtagatgagaagagataagaagtaagaatcaggaggaacacattatggcaatgagaatgtctggtctgatgtccggtatggacacagagactatcattaaggaactggtatctgccaaacagaccaaggtggatgatgccaaaaaggcacagaccaaactgcagtggaagcaggatgcctggaaagaattaaatactaaactgaaaaatctgcaggcaaaatatatcgctaatatgcgttttacgtcttcttacagcaagaggaccacaaaagtatccaacagtaatgcagtcagcgtgatcaccggtgaaaatgccgtcaagggagtacagtccctgcagatcaacaagctggccaagaccggttatctcaccggcgcacagatcaaggctgccgatgggggaagtctgactgctgcatctaaattaagcgaactgggagtgaccggagaaggtaccttcaatatcactgcgggtggaaagagtgtggatattacggtaaatggtgacagtaccatttccgatgtgctgaataagatcaaggaagcaggtgtcaatgccagctttgatgcgaagaaccagagattcttcgtcagtgcctccgcatccgggcgagacaatgacttcagtattaccgcatcggacagcaccggtgacgcagcgctgtcagcattgggactgaaggcaagtctgatcggcgataagggggatcaggcaacactggacagatataaggagtatgcggctttctatgtaagcggagatgatgcagctactcttgcaaatattaacaaggatggccgtatcacaaaggatattgaatccaaagtaagcagttatctggagcagtataagtctctgctcagcactaagagtgatgcacagaagaagatcgatgagatcaatgaaaaatataaggattccagcctggatactgtagaaaactatacgaaacagttggaagcaaagcagaaagagaagacagagctggaagaaaagatcaagaatctgacagatggtgatgaaaaagatactgcacagaaggaactggatacgctgaatgaggagattaagacattgtctgaaaagaagacggatgcccagtctctgaaaagcgcacagaagagtatcaccgatgcagatacaaagatcgcagatatacagaagcatattactgtaacagaaggtaccgatgcggacggtaatgcaacttatactgcagaagccacacagacattgaaggaccaggtaaataacagctatctgtctcaggcaaaatacgcgtccgatgttgtaacatccatcaataacggaacctatacggctaccggagctactaaaatcagtggtcaggatgccaagattacattaaatggtgcggaattcaccggcaacagcaatgtcttcgaaatcaacggcttgactttcactgcgctcagtgagacgaaagacggtgaggatatcactgttactaccgaagatgatgtagatggcatctatgatatggtgaagaacttcctgaaggagtacaattccatcatcaatgagatggacaaactgtacaatgcggattctgccaaagggtatgaacccctgacagatgatgagaaagattctatgtctgactctgaggtagagaaatacgagaccaagatcaaggatgctctgcttcgcagagatagtaacttgtctaccatcagttctgcattgaagagtattatgtccggcagcgtggacgtgaacggcaagactatgtacctcagtgatttcggtgttgagaccctgggttactttgaggcaccggacaatgagaaaaatgcttatcacattgcaggtgatccggatgatgccaatacctccggtaaatcggatgtgctgaagagcatgatcagtaatgatcccgatacggtaatcgctttcttctcttctctgtctaaaaacttatataccaaaatgagtgatctgtccaaatctgtagacggatatcgttcttatggaagtttttatgatgacaaaaagatgacttcggactataatgattacaagacgaaaatatccgagctggaagagaagctgaacgattacgaggataaatggtattccaagttctccaagatggagacggctcttgcaaagctgcagagtaattccagtgcggtgacaagtttgctaggaggatcatgatatggcgttacctaatgcctatgcgcagtacaataacagtaaagtgttgacagcttcccccgcggaactgacactgatgctctatgaaggtgccattaagttctgcaatattgcagaagtggcaatagaagaaaaagatgttgagaaggcacataataatatccgcaaggtacagaatatcatcggatacctacagtctaccctggatacgaaatatcccgtagcacaggatttcatcaatatctatgattatctgtccaaaagattgctggaggccaacgtaaaaaaggataaggaaatcctggaggagatcaatatgcatcttcattccgtaagagataactggaaggaagtcatgcgcatcaaccgtgagaaaggggctatctgatggaaagtcagctgacgatattgtccgagagcctggatcggaagctggaggtattacagaagattcaggaatataataagcgccaggaggaagttttttccgcagagaaggtggatatccgtcagttcgatgctgccgtggaggagaaacagcacctgatcgatgaagtggtacgcctggatgacggctttgaaattctgtatgaaaagctggcaaaagagctggagggcaacagacagcgctacgcagcacagatcaaagaaatgcaggccaaggtagccaaagtgacagaactcagcgtgtccgtacaggcacaggaagcccggaacaagaaactggtcgagaattatttcgccagagaacgtgccggaatcggccagagacgcaagagtgccaagagcgcctttgactactacaagagcatgagcggcgccggatatgtaccgccccagatgtacgacaataaacaataaatacaacggataaagggaagcagatagagatatcggcttcccttttttatgacggaattaatgtgatagaataaaaatgtggtttcggctaaaatataatcagagtatagattagccgaaaaatgcttgatattttaaaataatccggctaaaatataatcataaaaaagatcagccgaaagagggacttttatgagttatatcaaaagaaatctggagaatgtagtaagacaggtaaccagggaatatccggtactcctggtaacgggaccgagacaggtaggaaagacgacaatgctccaaaaactgatggagggaacggagcggggatatgtaacactggatgatttaaacgaaagaaatattgcaaagaccgatccggaactgtttctgcaactgcataaaccacctgtattgattgatgaggttcaatatgcaccggaactgtttacttatatcaagataaatgtagataaaaaccatgagccgggagcattttggcttacgggatcacaggtgttcaaattgatgcagggagtacaggagtcactggcaggaagagtggcagtactttcacttacatccctgtcacaggcagagatatccggaggaacgatgaaaccgtttacggtagatctggaggatttaaacgagaggcagaaagagagagagcaagctgatacaagagagatctttgaacggatttatcaaggctccatgcctgcgatcgtaagcggtattaacagtaacagtcagcttttttacagcagttatctgtctacttatattgagcgggatgtaagagaattatcggatgcaatagattcgcttaagttccttcggtttattactgcggtggcagcaagatgtgggcagatggttaatgcaacagagattgccagagatgcagatatcaatcagacgcaggcgaaggattggctgacaattctggaaacgctgggaattattttttatcttcatccgtattctaataatttgttgaagcgccttgtgaaaacgcccaaactgtatttctacgatacgggtctggtgtgttacctgacgaaatggagtagtgcggaaacgttagaatgcggtgctatgaacggagccattttggaaaattacgtggtcgcggaaattcggaaaacctacctgaattgtggaaaagagccgtatttgtactattatcgtgataaagatgccagggagattgatattgtcctggaacatgatggaatattgaatccgattgagattaagaaaactgcaaatcccggaacagagctggtaaaggtatttgaattactcgacaaggcatcaacgcctcgtgcgaagggcgcagttatctgcatgaaaccgggacttagtgcgattgacagagacaattatatcgtaccagtctggataatctaaaataaagtccctgcctgaatatcagacagggacatatgtaacttccgcttgagaatttgccgaagtaacttcagctttggggatagatcgaccggaatttactttggcaattgaggggattaatgcccaggcaggacaatccatgctgacccaggccaatcagagtagtcagagcgtactgcacaaagtatgattgatttatcggtaacaatatgctattgtaaattcacagaatatcaattctggcagacagaccaaatcttaattcaaatcaaaaaatttttaggtgtatcaccattgatttcactggatgagaaggtaatagaatgataaaaatactttctgattggaaagagtaatactgaaaggaaaacatatgagtgaaataaaagtagtaagagatgaacaaggtaatgctattgttacaataccggatattatattttggaataaacaggacattgactgggatgcagtaaaagaatacctaaagaagtaccttggtgaaataattgagaataaacaaacgaaagaaaaaatagaaataggaactaaattcgcagatgagtatacgggctcaaagtattcagaacatataaggggagcacgggcaaaagccaaggcaaatgcagcacaaggaatccgagaactggtagaatcagctgccaataaaatacatagtgaaaataagaagagtaaacataagaaagacgcaaaaggtggctggaactattatacggtcagatttgcgctaccagtttatgataacaatagaaagacagaagaatataatgtttacatgggggaggctggtagtaaataggacacaagacggaaaattgtatttatatgatttggtggaaataaaaaggaagcaagtaccccactcaagaatacatagtaaacaagtggtaaaaaactgcttcctttttatataatatatcttagcaaaataaaaaagtcaacattttttgtaaaaaggggttaagtttctaaaatactctccgatatacttaacaagtaaagcaaataaaagcttacctaacaacttcttccaaatcaaaagtttcgcacgccggagatacggaagacaatggcgatgaaagtaaagggaagtgcgagcccggagcagacattgccaaagtaaacaacggagcgcagggaagcgctcgtcaattcaaggaggaatatattatggtagtacaacacaatcttacagctatgaactctaacagaatgttaggtctcaccaccaagactcaggctaagtctactgagaagttatcatctggttataaaatcaacagagcagcagatgatgcagcaggacttgcaatttctgagaaaatgcgtcgtcaggtaagaggtctgactcaggcttctgctaacgcacaggatggtatttctgcagtacagaccgcagaaggtgctctgaacgaagttcatgatatgctgcagagaatgaatgaactggcagttaagtccgcaaatggtaccaatcagtctgaggataagaattatatccagcaggaagtaagtaatctgattactgaaattgaccgtgtggctgctacgactactttcaatgagaaagctctgttaaatggaacatttacggatgtggatcttcaggtaggtgctgagtcagcgactgataatcagattaagcttactattgcttcaatggatgcttctggtttaggtattgatgctgtagacgttggttctacaggagatgctaaagatgcaatagacacgattaaaacggctgttaagaccttgaacaaccagcgttctaatttgggtgctattcagaacagattagagcatactatcaacaacttagacaacgttgttgagaatactcagtctgcagagtctcagattcgtgataccgatatggccactgagatggttaagtattctaacaacaacattctggctcaggcgggtcaggctatgttggctcagtctaatcaagctaatcagggagtgctgtccttactgcagtaatcgtaggctaagtgtaaatggttaccataaaagagtcggctatttgccggctctttttgcaaatgtttacgatacgcaaaaatgccgaagtatgtagctttttagctatatacttcggcatttgttttagaattaaaggattaaaggtggaaaggtgtttcaccattcatgattttttgtgtaagtgcatctgtcatggcagttgtttgctttttatagaatggataatcatgtccggcagagctctttactggagtcatatagtcgccatataatgtggtaagtacagcgtcataattttttggaacaggaagaataatattctcaaaaggtaaatattcacaggtttgataccaatctttttgtaaatgaatatgcttttgagtgttttcaggaacataggtaattatattactgtcagaatcattataggactgacataaagcatccgctatgcgaagaagctgattttttatgctttgctgaggttttatcttgataccacacaaagtttctaattctggaatcattttaatgatagtttccggtgaatcatcatagtgcccgaccgccgatatcaagatagcgacaagttgatttaaaagggcttcctcgttagaatccgcaggtaaggtgtctaatgggaaaatatcaatgcctacaatatagggacaatgatgaaagcggtataaacgagaagaatcataggaaatactatgtgcatttagtaccctggaaagtacataagaatattcttccttagtataaggactattaatatgatattcttcaggaagttctttgggagcaactttcaaaaaccggttataatctttacgaagcatacaaatatccatatcatcatcccagggaataaagcccttgtggcgaacagcaccaagtaacgtcccccagtcagcaaaatagggaatattatgcttttcacaaatttgttgaatgacacacatgacctctaactgtgctgcccatacacatttcatcatgggttcgatataaaaattatcccgggtttctcctaaaaaataggaatcattaaatgataacataagtgacacctctctttttgttgtttgtactatgaaaaataatattatacttaagtagttttacgaagtaattcttatctgagattattgtaacaaagacggaaaggtttgccaataggcaaagaagaaattgataaagtgtgttactttaaattagcagttaataattctgagatatttcaaatcttatttatttgaaatattttggtgaatcaccacagtttttagaaaaataaagaaagcaccgggatcctgtgttaggattaaagttgactagaccaaatccaggagggggctttcatgattactagtatacaacatttttgcgagaatgggataaaaaatttaacagatattttgagcatttagaaaatagaaaaaaattgcaaaacataagatttcatcttgaattttattcagaagaattttattaaaatcaatttgaataaagatgattttaatgaagacggaggtggattctatgtttattggcagagaaagagaactggcatctttaaaggaattctatgaaaaagatggaattggtatgacggtgatatatggtcgtagacgcattggaaagtctactcttattacggaattcgttaaggataagaaaactattttttatacagccacaaaagtaggaaaaaatagaaatctggaactgttttcaaagcaggtagttgatctgcttatgcccggggtggagaatatcagctttcatactacggaggctgtttttgattttattgataaaaatattggagacgagaagcttgtgcttgtgatagatgagctgccatattgggcggagagagatgaagcgcttttatctatcttgcagaaatacattgatacggtttggaatgataaaagccttaaagtgattttatgtggttctgcgcccagctttatggaacagaaagtactcagtgaaaagagtcccttgtttggaagacgggattcccagatcaaactggaggcatttaattacctggatgcagcaaaatttgttccggagtattctaatgaggataaggcaatctgttatggaattaccggtggtgttgcaaagtatctttcgctgattgatccgcggaagagcattgatgagaatattataagactgttcttcagaacggacggatatctatatgatgaaacaaggaatcttttgacccaggaattctcagatatagcggttgtaaacaatattgttgagcagattgcatctggtgagaataccctgaatacaattgcgggaaaaattggggaaaaagaaccaacggtattatattcactagagaaactgataaatgtgggtttggttgaaaagaagaaatgtatcacggaggagaagaacaaaaagaagacccagtatgttttaaaggactatatgttcaagttctggtatgagtttattccgaaagctaccagtgtaattgaaatgggacagggggaaatttattatgaaaaggcagtgaagccggtactacattcttttatgggttccgtgtttgaagaaatgtgcagatattatatactaatgaagggaataaccggcgagtatggttgctttattacttctgtagggacctggtggggtgtggagaacgttgcagacaaaaatggggatataagagcgcaatctgcagatattgatgttgttgcattgtctgatatagacaaaatggctgtgatcggagaatgtaaattcaagaatgaaaagattgataagggtatatatgatactttaattcgaagaggaaaacttattaccgctaaatataagatctcaaaatatattttcttttctctatccggatacacggattggtttgaaacattatcaggcgaggatgtattgctgcttacgctggattcgctttatgaataattttcccttgcatctcccccacaaatagtataaaataaactcagtgttgcaaacaaaatattacaataaaacgcacaacggggtgcatgccgggaggcatgcgcccttttttgcgtcagcatttatttttgtgtacagtggatgtagtgtgccaaagcttctaagtgtttatgctgccggattgatatccgctgtcggcatcttcgtaggttccgcggttttcccatccgtttccggtgaagtggctgcagaattctccggggaagctgccggggtggaggttgcttccggcgtggcactgggctttgctttttccagtgaagccttaacagcctccagcagcaccagggaagtatatctggtctccgcagaatacgtcacctgactcagatcctgcgtctcgcagatctgctcactcagggaatccatggtgggctccagcagtggatacatggtggtcagggtctcatcgggatctgccaggcttaaagatgtgatggcgtggtcgtttacgatgacctctacattcacggtctcgctgccgaggatcagctccgtggtgtagatccccgggatatatgtattatcagtaccgacaggcccggaagcattatccagaacagcatcggtatcggcaacggccccggtggagacatcctccgtctgtgcggattgcgggatacgtccgagatccgccacattgtccggcataacggtctcggcagtactgtcaggggaatccggtgccccggaggtatccgcagcttttccgggcagcaataacattaacagtaatatgacgaacagcactcccagcgcagcgaagattccggtatacagcagctcttttctgcgaaggacaacgatctttgtatttgcactcattcttaagtctccttggaatgatgggatgatctttataaatagtatgcggaggccggtactcatagtacagcaaataaggagaacttcacattgacaagacaaaacaggcattgctatagttaaaacaagtatttttcacggatgcgtccgccccgtggaaaaggagcagacaggcggcgcagaaacgagggtaacgatgaataattataccaaggaagacatcatccgtcttgtggaagaagaggatgtggaatttatccgtctgcagttcacggatctgttcggcaatctgaaaaatattgcggtgacagccagccagctggaccgcgtattgagcaataaatgtatgtttgacggttcggctattgacggttttgcacggattgaagaatccgacatgtatctgtatccggatctgtcgacactggagattttcccctggagaccccaacagggcaaagtggcccgtatgatctgcgatgtatatcgtcccaacggacagcctttcgagggagatcctcgttatgtgttaaagcgtgcggtgcagcaggcagaggacatgggatatacttttgaggtaggccccgagtgtgaatttttcttatttaatacggacgaaaataccatgcctaccaccaacacccatgagcaggcagggtattttgatatcggacctctggacttcggtgagaatgcccgccgtgacattgtcatgaatctggaggatatgggctttgtcatcgaggcatcccaccatgagatggctccggcccagcatgagattgatttcagatacgatgaggtattacataccgcagacaatatcatgaccttcaagatggccgtacgcaccattgcgagacgtcatggattgcacgctacttttatgccgaagcccaagttcggtgtcaacggttccggcatgcacatcaatatgtccttgcagaaggatggaaaaaacattttccaggatgcttccgatcccaatggtctgagcgaagaggcttactatttcatcggcggtatcatgagacatatcaaaggaatggcagccattacgaatccgctggtgaattcctacaagcgtctggtacccggtttcgaggcaccggtctacattgcatggagcacgacgaaccgcagccccttaatccgtattccggctgctgcagacggagagggcacccgtatcgagctgcgtagtcccgattctgctgctaacccttatctgacactggcagtctgcctgagtgcaggattagagggcatccgggagaaaatagagccgcctcagagcatcaatgccaatatttttgccctgtcagaaaaagaacgtgaggaattgcatatcgatcagctgcccggcacacttctggaggcagtggaggaactggagaaggatactttcattcagaaagtgcttggagatcatattgccggaaaatacatcgatgccaagcggaaagagtggcatgagtaccgttctcaggtatccgagtgggagattcaggagtatctgtacaagtattaaaatattcctttcttttgtaggatgatataaaaaacacagaagaaaggaggtgggccgatgacgaacattattgtcgtactgccgaagctggaggaagccaaaggcgtcaagaatattctggtgcgcagtggctttcaggtcacgggtatctgtaccacaggcactcaggctatcagtcaggcggacggtctgaacgacggtattgtgatctgcagctacaagctggcggacatgatatacacagaactacatgaagatctgccggaaggtttcgagatgctgctgatggcatcccagaatctgatcagtgaatgctatggcaatggcatcgtatgtctttccatgccgttaaaggtacaggacctgatcaataccgtgaacctgatggtggaaggtgtggaacgccgcagaagaaaacgccgtatgcagccgaaagtgcggaatgcaacggatgaaaaagcaatcaaggatgccaaggaattactgatggcacgaaatcatatgacggaagaagaagcccaccgctaccttcagaagaccagtatggacagtggtaccaatctggtggagacggcacagatggtattgtccatgatgacggagtaagcaggacggcccggaaatgattacagggatccgggcgttacagacaggatatgtgaaagagaacaacaggaggaacagcaatccatgaaatttacaaaaatgcagggctgcggcaacgattatgtatatgtcaacggctttacggagaagctttcaccggaagagaagccggagatcgtaagaagcttaagtgacagacatttcggaatcggcggcgacggtgtgatctttatcaatccggcggaagaagcggattttgagatggaaatgtacaatgcggacggcagccgttcggagatgtgcggcaacggcatccgctgcgtggcaaaatatgtctacgacaagggactgacggacaagaaggacattaccatcgtcagcgccggaaaaataaaatatctgaaactcaccgtggagggaaagaccgccacggacagaggacaggtgacgctggtacaggtgaacatgggaaatcccatccttgctccggcagaggtgccggtaacagtggaagccacacaggagacggcagacggaccggcggtagtgaatgctcccatcatggtagacgacacggaataccacatgacatgtgtatccatgggcaatccccatgccatcgtatttatggaaggggtaaaggatcttgacattgagaagatcggctcgaagtttgagcatcatacctgttttcctaaccggaccaataccgaattcgtagagattctggatcggaaaaatgtgtttatgcgcgtctgggagagaggcaccggggagacccttgcctgtggtaccggatgttgcgccacggcggtggcttgtgtactaaatggtttgacggacgaggaaataactgttaaactattaggcggtgaactgcacatcaaatgggaccgcaaggagaatctggtctacatgaccggtcctgcgaagatcgtatttgaaggtgaagtggacccgtactccatctgatagaataaacgcctccatagcaacacagattgactgcttgcaggcaaagatgtgttgctatgagaggagtaaacgaacataagtaagtagggcgatcagcccggattacgaatgttcgttgcaattttgagagcacgtagtgcggaaaaattgcttatttaagccagcaaggtgacagcaatactgcaccagggataatagagaggagaacgtactatgtttaaagtaaacgacaactatttaaaacttcccggaagctatttattttccaccatcggcaaaaaggtaagtgcgtattccgcagcacacccggacaagaagatcatccgtctgggcatcggtgacgtgacacagcctttggcgcccgctatcattgatgcgctgcatggtgcagtggatgagatgggaaaagcggagacttttcatggttacgctcccgaccttggttatgaattcctgcgcaatgccattgcagagaatgattataaggcaagaggctgtgacattgcaccggacgagatctttgtatcggacggagcaaaatgtgactgtggcaatattcaggagatcttcagtctggacaacaagattgcagtatgtgaccccgtttaccccgtatacgtagattctaatgttatggcgggcagaaccggcacttacgatccgaagtccgagacctggagtgatgtgatctatatgccctgtctggcagagaacggttttgcaccggagctgccgaaggagaccccggatctgatctatctgtgcttccccaataatcctaccggtgccaccattaccaaggcgcagttgcaggagtgggtggactatgccaataaggtaggcgctgtcattctctatgatgcggcatacgaagcatatatttccgaaccggatgtgcctcacagtatctatgaatgtgaaggagccagaacctgtgccatcgagttccgttccttctccaagaatgccggctttaccggagtgcgtctgggctttaccgtgatccccaaggatttaaagagcggggatgtgagcctccatgcactgtgggcaagaagacacggcaccaaatacaatggagcaccctatatcgtacagcgcgccggtgaggcagtatactctgcagcaggcaaggcacagctgaaggagcaggttgcttattacatgaacaacgcacagtatatcctgaagggcttgcaggaagcgggcttcacggtatccggcggtgtgaacgctccctatatctggctgaaagcgcctaacggcatgaccagctgggagttcttcgattaccttctggagaatgtcaacgtggtgggtacgcccggatccggtttcggacccagcggagagcattatttccgtctgacggctttcggaagctatgagaataccgtggaggcagtggatcgtctgaagaagattcagttataggcagccgttctttgccataaaaggaatggagcagattatgcaggaaaagcagaaaaaaatcatccggtggatcagtctggcactgatcgtactgacaggaatcattgtctggcgggtcaattatgagattgattttatgatggacgatgactggtattccacgttgctgtatgaggatacaccgatccggaatctcagtgacattatccgtgcgcagatctggcattatttcaactggggcggcagaagcatggcgcatgcactgctgcagctgatcctgctggccggagaacactgggcggatatcctgaatacaggaatgacactgctgttgggatggctggcctgcatgatagcagacagacgtaagctcccgtactggtttgcagcgttggggatgatcctggggctgaatgccaactggaaaatgagtatgttctgggaagccggagcagcgaattatctgtatatggcgggttttctgctggcatttttgttctgttacctgaaatatgaggagaaaaatctgccggggatcgtcatctggatccttccactgggactgatcgcaggctggagcaatgagaatatggggcctgcggtatggctcctgagtcttctggtgatcctgttaagacacagagagcacaaaaaagctccggtgtggatgtatctgggaaacatcagctgcctggcgggaactattctgatgatcgctgcaccgggcaattttgtccgcagcggggagacgggggaagaagcctacagcctgctgtggagaatgtatctgcgctgctacgcagaagcgaagggagttatggagtatctgttccctgccctgctgcttacggtatttgcactgatcgtctgcaaaggcattctgaaagaaaacctgggcagaaatacagtgctgttattgctgggggcactgttgtcctggggtgccatgatcctgtccccacactatccggatcgggcggctttcggaacgatggttttgttgatttgtgcgattttatccatggcagggaaaatcgcagacaggcagaaagaaaatgtctggatgttctatggctgtgccgtgctgatatggctgcgggggatgtattttctggtggaatatctgggattatgctggggctggatcaaataagtgaataaatgtccattataaaagacctcacagtcggcagatgcgccggcagtgaggtcttttatgagtgtacacattattttctggcataccggctccggtactggcgcggtgtcatgccggtctttttacggaagatctgcgagaaataagactgcgaagaaaagccgacgctggtggctacctgagctaccgacagattggaggacaccagaagccccttgcaggcttccagcctccggtctgtcaggtaattgatcggagactgtccgacacattcggtaaaggagtgtgccagatagaatttgttgatatgtgtgatctccgccagggaatccagtgtaatgttctgggaatagttggaatcgatataacgcttcgccagagcacattccttggacaactggaaggaggagtcagagatgacggacagattctgcttccgggaaatatataccagaagcacttggagcagtccgtggcacacctgttcaaagccgggaagtttgtcgcggaattcctgcatcatcagctgggcaaagttgatgaactgttttttatcagagccgtagctatagaagctgtatcccttcggattgtcctgccctgcaccggaaaaagaaaatgcaagtccgtccacaccgaatacgatatattccatgggatcgttgggaagtgttttttccgtgtgctctacatagggattgatgatgaccagatcatccgtcttcacaggcaccttttcgttctctatatagaaggcgccctcgccccgcaggacatagaacagttctgaaaagtggtgggtatgcggaagggactgccagtcaccttcgtatttggagatggagatataacgaagctggaaatgttccggggaactgtttgccgatccgatattgacaaattcattactcataaatagataccttctttatcttattttattgtgcactttttcaaattcacagcattttttataatgaatatataaaaagaacaatattttacaaacacattcgtaaaaaagacgaaaaaataaaaaactgtatgattgggataagcatattatacataatcatttcaaaaaatccactattttagtaacaaaatagcaataaacataacaaaacaagcaacaaagaaattgatatcaggtcaggaagccgatatactttagtcatcagctgcaagatagtacaaaagtgatgggaggaaaccatgcgatgacaggaagactgacgctgccgaccgatgcagacatcattgacgaaacgatacgcttaaaaaatcttctgggtgcagacgctttaagagactgtgacggaaccgaaatgccggaagcacttttgtcagagccggtgaagaaatacgcaacttattataccacgagaaaggataatgagtgggcgatgaagcatccggaggagatccagcaggaatacctgatcagcaaccgcatcaccgccagaggggaaacactccgcatccgtctgatggaaggcttccatacggagcagcttaaggtcaatacgctggacgatccgaagcgttggtgggaagtgatcgacagaacgaccggtgaggtagtgccggcggatgcatgggaatttgatgaggcatccggtgaagtggagatccgtacgatcccctatcatgagtatacggtaagctttctggcatttttgatctgggatccggtacacatgtacaatttcatcacgaatgactggaaggatacaccgcatcagctcacttacgatgtgagacagcccaagaccaaacagtatgtgaaagacaagctgagaaaatggtgtgaagacaatcctcatatcgatgtggtccgcttcactacctttttccatcagtttacactgaccttcgatgacaagaagcgggaaaaatttgtagagtggtttggatacagcgcaagtgtgagcccctatatcctggaacagtttgaaaaatgggcaggttacaaattccgcccggagtacattgtggatcagggatatcacaacagcatgttccgcgttcccagcaaacagttcctggatttcatagagttccagcagatcgaggtatgtgcgctggcgaaggagctggtagatattgtacattcttatggcaaggaagctatgatgttcctcggagatcattggatcggaacagagccctacggtaaatatttcgcgggcatcggactggatgcagtggtaggttctgtcggaagcggtgtgacgcttcgtatgatctctgatatcaagggagtggattataccgaaggacggctgctgccttacttttttccggatgtgttctgcgaaggcggtgacccgatcggagaggcaagggataactggcgtaaagcaaggcgtgcattactcaggtcccctctggacaggatcggatatggcggttatctgaagctggcaagtaattggcccggtttcattgatgaaatacaaaatgtagtaacacagtttcgggagatccatgaaaatatgcaggggacagcttcctatgtggcacctttcaaggtggcgatcctgaactgctggggcagtcagagaaggtggatgtccaatcaggtacatcatgcgatctggcacagggaaacctattccgcagagggagtactggaatgcttaagcggaatgccttttgaggtcgagttcatttcctttgatgatgtcaggaatggcatccctgaggagatcaaggtcatcattaatgtcggggatgcgtacaccgcattcagcggcgcggagaactggatcgacgaaaaggtcctgaccaatatcagacgctttgtggatcagggaggcggcttcatcggtgtgggtgagcctaccgcttatcagcatcagggaagatatttccaattgtccgatgtgctcggtgtagaccgcgagatgtgcttctctctcagcacggacaagtacaatgagaaaaatgcagatcactttatcttagaggatattgacggagccctggatttcggagagggaaccagtcgcgtctatgcacagggcggacattatcagatccttgcgatggatggggaatacagccagctggtggtcaatgaatatggcagaggacacagtgtgtattttgcaggtcttccgtattctcctcagaactgcagacttctgcttcgggcaatctattatgcagccggcatggagcaggagatgaagcgttactatgtaacgaatgtggataccgaagtaacggtattccagaagaccggcaagatcgcagtgatcaacaactcagcacaggcacagcacacagagctgtatatcaaaggaaaatgtgcgtatgtgctggatctgaaacccggcgaaatgcgttgggtggacgatatcgaagacaggtaacttatggaaggcaaaaagcgtttcatattttataaggaagtactttacaagtataaggaggttatttaagatgaaaaagaaagtattaagcgtgctcttagtagcggcaatggctatgtccatgctggccggatgtggcagcaagcctgccgaaaatgatgcgcagagcgcagcatccagcgaggcatccaaggaaacagaggcagcagcagaaacaactgcttccgcagaagacgagacactgaccgtatggtgctgggatcctaacttcaatgtctatgcaatgaagcaggcagagaaggcatatcaggtggatcatcctaacttcaagttagacattcaggagaaggtatatagcgatatcgagactgctctgatcacagcggctgaagccggtgattacagcactttacctgatatcttcctgatgcaggattattccttccacaaaaatgcaaccaattatcccggaatcttcacagcactggatgactgcggaattgatttctcccagttttccatgggtaagctggctgactccactgtagatggaacacattatggtattccttttgataatggtgctaccatcatggcgatccgttccgatatggtagaagcagcaggccttaaggtagaagatttcaaggataccacatggtctgagttcatggagctgtccaagaaggtaatggctgcgaatgatgttcccatgctgacctgctccggcggttctgagattgtgatcgagatgttacagtctgcaggcgcttctcccatggtggatggaaaggtgacactggttgacaacgcagcactgaagaaagcaatcgagacctataagcagctgatcgatgaaggaatcatggcagattataccgactgggatcagtatatcgcttccatgaacaagggtactgctgcaggcgttatccagggctgctggatcatgtcctccattcaggcagcagaggatcaggcaggtaaatgggcaatcgtgaatatgcctaagttagatgatgtagaaggcgcaaccaactacgctaactgcggtggtgcaagctgggcagtatcttctaactgcaaaaataccgatctggcatttgatttcctgaacgctacctttggtgcggatgtagatttatacgatgatctgctggtaaatgcaggagcgatcgcaagttacctgcccgcagcacagtctgagacctataatgagggcaatgagttctacggcggtcaggcagtgtacaaggatatcgtagagttcgccggacgtgttcccggaattgactacggtgcatactactctgatatcagaagtgcactgacagatgcgattaccaacgttgtacagaagaacgctgatatcgatacagagatcaaaaacgctcaggataccgtagagtttaatatcgccgaataatcaccagagtatggaaactggatagtaccgggggtgcagcagcgcgttcccggtactgttgtaggagagaaacatggaaaagaagaaagcaaaattaagtttggaaaaaaggcataatctgaccggatgggcattcctgctcccggcatcgattttaatatttgtattttgtttctatccgatgtcacaggccatccttctttctttccggaagacaggaggagtctttaatggtgtagcgaattatgccaggatcttcaaggataaaacattccagcaatgcttgttcaataccttcttttattttgtgattcaggtaccgatcatgcttgtgctcgcactgatgctggcgcagctgctgaataatcctaagataaaagggaaaggtattttccgcactttgatctttcttccgtgtgcaacgtcactggtatcttattccatgatatttaagtcattgtttgctccggatggagtggtcaacagagtgctgatggccatcggactgtcttccgtggactggttccagagcacatggccggcgcgatgggtcatcgtgatcgcactgatctggagatggaccggatataatatggtattctatctggcaggattacagaatatcgattattctgtatatgaggcaagctacatcgacggagcgacaccgttccagcagtttatgaagatcacgataccgttgttaaagccgaccattctgatgacggcgatcatgtctacttcgggaacactgcagctgttcgatgagtctatgaacctgacagcaggcggtcccggaaaatctacaatgacattggcgcattacatctacaatatctcctttgtggagacaccgaaatttaattatgcggcagcgttgtctgtatgcatacttgtgatggtagcggttctgtctgcaattcagatgaaggtgggtgacaaacgtgactaaattcaaacaaatcatttcctacacaatcttagtgatagcaagttttctgtcggcatttccactgtattatatgctgtgcggtgcgaccaaccagagtattgatgtggtaagagggcgtctgatcccgggtacctatctgatcgagaatttcaagaccctggttgacatgcagaatctgggacttgcaatgtttaattccttccgtaatgcgatcgtgatcacggttgtgacactgctgatctgttccattgccggttatggatttgagatctatcatgataagggcaaggatattctgatgagtattctgttgctggcaatgatgcttccgttcgtagcgatcatgatccccctgttcaagatgtttacctcctggaagttggtaaatacctggatcgcactggcactgccatccatctcaactccgtttatgatcatgcttttcagacaggcggcacgttctttccctcatgatattatcgaggctgccagactggaaggcctgagcgaaatacagattttcttccggatgttcattccggtgatgaaatctacctatggagcggcgatgacggttacatttatgaatgcgtggaacaattatctgtggccgacgatcattttacaggacagcaaggcgatcaccatgccgatgttagtagccaatctgaagagtggatacagtgtggattatggtatgctgatgctgggagtattgatctgtacacttcctacagcgatcatcttcctgtgtttacagaagagctttgcaaatggaattacgggagcagtgaaataatgcaacagaaaatgccaaaacaggaaactatgacacaggcgcatatcaggaaggctcagggagccttccttttggcgcatagaatgggtctgattgaggatccctccatggagggactgaaggccagacgacagaagcacaatgaagagctgcggagaatggaacaggaaggacagcggttctacggaccgcattatttttccgcaccggcgtatctgcaatatgagctgacccgcctgaagctggattttgtgcagccgtgtgagaaggtccgggaaggtggttattgcccggatttcacggagcaggagaagcgggatttttacgaacagaatagagatctgttcggacgctatcatggggattattttacctatgaggaggtgtcacagatcattgagaaacggttacgggaggatgcatatgacaagcttatctgcgacatattatgtgagtcagagaacaggcagtgatgaaaatgacggacgcacatgcagtacggcgtttgccagtctgtctgctgtcaatcgaagacacctgcagccgggcgaccgtgtcctgctggaacggggcagtgtattttacggacaatatctgcatgtgacagacagcggtacgaaagaggcaccgatcgtgatcggagcgtacggcacagcagatgcaccgccgcggatcgatgcctgcggacaggggatctggtatcaggattatgggaccccactggatgcacctacgcatgtgtatcacggctatgtatcttccgcagtgcttttgtacgatgcagagcatattgtggtcgaggatctggagatcacgaatgaaggcagcatgatcccgggagagcgttatagcttgggtgagaaaatgaaccgtaccggtgtggctgtggtggctaaggacaaaggggtgcggagcggcattacacttaggaatctgtggatccatgatgtccatgggaatgtctacgataaacacatgaacaacggtgggatctatatgacagcgctccgcccggaatgtgaggagctgacgggtgtggcacggtatcgggatatcgttattgaaggatgcttcgtgcaccgggtcagccgctggggaattgcagcaggctatacctatgcccatgataagttccggggggcagagcttacggaagccgtttttctgaactatggacatgaaaatatgcagatacggaataattatgtaaaagaggccggtggggatgggatcacgccgatgtatgccctgcgtcctctggtggagcataatatggcagactctgtggcctgcgagatcaatgaccggatctattgcgagccgggtgaccggatgggaaaagtggcagccgggatctggccctggaaatgcaaggatgccctgtttcgttataatgaagtcacggacaccagactcaatcaggacggcatggcatatgatgcggattccggggacggaacggtgtatgaatccaattacagcaggcagaatgaaggcggctgtgtgatgttctgtctgcaggaggcgatccataataccttccgcgataatatcagctatgatgatctcggtggtacgatcagcccgtcagagaatccggatgccctgcttcaggataatgtatactatgtgcgcaggggggttccctttgtacgtaaaaatatggacggaggcagctttacacaggtgaatgaccgggttgttgagttgtaaaatatggtgctgagcccaggatgaaaacctgtggcttggcattttttaatgcctgatattctggcggctctgaagccggcagcctgtttttagcgtttttattgcctggggataaaggattgactgagataaaaaaatacggtagaatctgtatcaaaaatgatatatgaaaatgaggaaaggagccggtgcatgggcgaaagtatattacaacttcggcagatccggaaatcatttgacaatacagaagtattaaaaggcattgatctggaggtggcacagggagaatttattaccctgttgggagcttctggctgcggcaagaccacgacgctgcgtattattgcggggttggaactgccggatgtcggacaggtgatcctggaaggacaggacattacgaaccgtgagccgaacaaacgggatgtcaatacggtgttccagaattatgccctgtttccgcatatgaatgtgtcggacaacgtaggatatggattgaagatccgaaaagttcccaaggcagagattgcagagagagtggagcaggcccttcgtctggtacagctggaagggtatggaaaacggatgccggatcagctgtccggtggacagaagcagcgtattgccattgccagagcggtgatcaatgagccgaaagtattgctgttagatgaaccgctgggagcactggatctgaagctgcgcaggcagatgcagctggaactgaaacgtctgcagaagcagctggggatcacgtttatttacatcactcacgatcaggaagaagccatcaatatgtcggaccgcatcggtgtcatgcacgaaggcatcctggaacagctggggacgcccaatgaggtgtactatcagccgcagaccagctatgtggcggattttgtgggaaatgcgaatattctgcataaaaatggggagacttttgccatccgctcggaaaacattctgatgaacggggaggcagcctgcacacaggaggctgtcgtggtggaaaaaagctttgccggagggcagctgcgcattctgtttggcctgccggacggacagactctgaccgccagccgctatggaatcgacaatgacttacagccgggacagaaggtgcagatcggctgggatgcgaaagacgcagtaaaggtaatagataatgacaaagacgaaaatcacaagtaacagccgcaggagaagcgggaatgtcggactgatgatccctatgtatgtgttcacgattctgttcgtggctctgccgatcctgtatctgttccttttgagctttttacagagagcacaggtctggggcgtggactttacattcaccctggacaattataagagaatattggaaccgctgtatctggatactttctggcagtctctgaagctggcatttaccgccacctttttcgtggcgctgatcggatatccgtacggctatttcatggcaaaaatgaacgctgtctggaagcgcaggatgctgttgctcattatgatccctttctggaccagtgcgctgatccgcctgtacggctggattattgtctttcgcagcaatggtgtactggataagatcctgatggggctgcacctgacgaagcagccgttaaagctgctttacacttatccggcagtggtagtgggaatggtttattcgctactgccttttatgatcctggcggtgtattccagtgcggagaagctggatgcctctctggtggaagcctccagagatctgggagcctcggcgtggaaagccttctggaccgtcagcttccggctgacgctgccgggacttttgtccggcgtggtgctgtcctttattccgtctatgggactgtttttcatagcggatatcctgggcggcaataagatcgtgctggtgggcagtgtgattcaggaacagatcaccaaggggcggaaccagccttttgcggcagcactgtctgcggtgttgatgatactgacttccgtgatgatccgcctgtaccgcaagatcaccggaacctcacagctggaagggatgatgtagcgtatgaaaaagaaaaaatggccctttgtatatgtagcgctgatcacagtgctgacctatatcccgatcctgttgacggtggtgtattccttcaatgcctccaagctgacttccgtgtgggagggcttttccctgaaatggtaccgggagttgttccgggacagagatctgggggaagcactgattaacagcctgatccttgcggtacttagctgtgcctttgcggtgttgatcggcacttcgggagcactggggatgagccgcagaaaacggaaactggacgatgccgtggcctatgtgtccacactccccatcatgatcccggagatcattctgggcatggtatttttgtccgtattttccctgatgggactgccctttggtatggtcacgctggtgattgcccataccacgttctgtgtgccctatgtgttcactatggtacgggcgagactggtgggaatggaccggtcgctggaagaggcggcgctggatctgggagctacgaagtggcaggtatttagggatgtgatcctgccacagattcttccggcgatcctgtcgggagtgctgcttgcatttgccatgtccttcgacgatgtggtgatcagtatttttgtcactggaccgaaggtcaataccctgccggtgaagatctacacgaaattaaagaccggtgtgacaccggagatcaatgcacttgccacggtcatgctgtttgtgatattgttgtgtctggcgggggcgtatgtgctgggacgtaagtcgcagacagctgtagagaaagctgccgggggaaaatgaggaaagaacgattccgcaaatgcaattgcggataagtaacaacataaaaatgtatagcagatgatgcaggagaactgtatcgaaggaggagattatgaagaaaaagctggcaatgctgttggcagcgaccatgctggccacgttgtttaccggctgtggagcaggcggtaaagaagataagggagaactgaatctctatacctgggacggcatgttcccccaggagattttagatggttttgaaaaagagaccggtatccgtatcaattattctaattttgactatgatgaggatatgctggcgaagctggaagaaaccaggggcagtgattacgatctggtcattgcggatgactatatcattgagctggccattcaggagagcctggctcagaagctggatacttccaggatcagtacttatgataacctgaatcctgtatttatgtctcagttctatgacccgaagaacgaatataccgtgccctacggagcgggcattcctctgatcgtatacgatccgggactgacggatgtgaagatcacaggctatgaggatctgtggaatccggcactggaaaataacgtggcactgacggcaaactatcgtgttatcgacggcatcaccttaaagaccatgggagaatccttcaacaccgaggatctggatgtgatccgggcagcaggagagaagcttctgagtctggctcccaatatccgtgtgatcaatgacaataatacgcaggattatctgatcagcggtgaggtggcagcagcattcctgtatacttcccaggtatctgcggcactgcaggcgagaccggatctggaagtggtatatcccaaggagggactgggcttcggcatcatggccggatttataccttcccaggcacccaatgcagatgcggcttatgcatttttggactatatcaacgatcctgagaatgcggcgaaatgctatgagtatatcggctactactgcaccaacaaagctgcggaagagtatatttccgacgacatgaagaaaatgatcgtattgccggaagatgcagcggagggcgagatcgtgcagaatatctcccaggaggcagaggatctgcatgcggagatctggaatcagttcaagagtgcatgcaactaaagttgcagcaactaaagttgcagcaactaatcttccgttcagcccgcgccattcgcaaagtcgcgttgacacgctttccgtcacttcttgactacctttgctcataaaccggcgctcatctcatgaacatattcgttcgaaaaatcatgcaagcatgatttttgcgctcggatatgtccatggctgaactgttacaataaaaaacgcttgacagatttgatttgtgcgaatattataaacctaagttgaaaaactattttgtaaatgctatgaaagagactcttgccaagggaaacgacaggaatacagcgtcaccgactgagagcgctgtttgcggaagctggcgaagggaacactccggagcaggtgatctgaactgcagaatatcacatgcagctaggatgacacgttgcacgcgttaagtgacaagagtggataggcaaaggcgcctgtcaattcgggtggtaccacggattagatgattcgtcccgggatatgttttaacatgtcccggggctttttgtattcaaaaataagctgtacagggagcgcacattcgggacactatataacaggaggtgcgatatgtacagagatttaacaatgaaagagatcagtgaacagcagatcggacagactttgcaggtggcaggctgggtggagaacatccgtgaccacggcggcgtatcctttatcgatctgcgggatatgtacggtgtgttacaggtggtcatccgtaagccggagcttttaaagggcatcaccaaggaaatgtgcctgtccattaccggtctcatggaacacagagacgaagagacctacaacccgaagattccttccggcaccatcgaactggaagcacacaggatcgatgtgttgggaagagtatataaacagcttcctttcgagatccagacgtctaaagagatccgggaagatgtgagattaaaatatcgttatcttgaccttagaaatgcaaaagtaaaggacaacattgtatttcgttccaaggtgatcagttatctgcgccagaagatgacggacatgggatttttggagatccagaccccgatcctgtgtgcttcttctcccgagggtgccagagactatattgttcccagcagaaaatttaaaggaaaattctatgcgctgccccaggcaccgcagcaatataagcagctgctcatggcttccggttttgataaatatttccagatcgctccctgcttccgtgatgaggatgccagagcagacagatctcccggagagttctatcagctggacttcgagatgagcttcgtaacccaggaggatgtcttcaaggttggtgaggaagtattgcatgatacctttgagaaatttgctcccgaaggcagcaggatcaccgagacaccgttccctatcatcagttacaaacaggccatgctggagttcggctgtgacaagccggatctgcgcaatcctttgagaattatggatgtgacggagttcttccagagatgtacgtttaagccgtttatcggcagaaccgtccgtgccatcaaggtacatgcggagatgtccaaaggcttccatgagaagctgctaagctttgcaacttctcttggtatgggtggacttggttatctcgaagtggcagaggatatgagctacaagggacccatcgataaatttattcccgaagagatgaagggagaactggcagaaatggcaggactttctgccggagataccatcttctttattgcggacaaagaggataaggcgaactactatgccggtcatatccgtactgagctgggcgagaaactgaatctgatcgagaaggatgcttaccgtttctgctatgtgaacgatttcccgatgtttgagctggatcccgagacgaagcagatcggattcacccacaatccgttctctatgccccagggcggtctggaagcactgaacaccatggatccgctggagatcctggcttatcagtacgacatcgtatgcaacggcgtggaactctcctccggcgcagtacgtaaccatgacatcgagatcatgaaaaaagctttcgccatcgcaggttatgacgaagagacattaaagaccaagtttggagcactgtatcaggcgttccagttcggagcaccccctcatgcgggaatggctcccggcgtggatcgtatgatcatgctgcttcggaacgaggataacatccgtgaggtgatcgctttccctatgaacggcaatgcacaggatctgatgtgcggggctcccggcgaagtgacggaacagcagctgcgtgaggtacacattaaagtgagagattagtgcggaaagaacaggaaaggaatggaaattagtatggcgaacgtgatcagtgacgagaccatagaatatgtaggcattctggcaaaacttgagctttctgatgaagagaaggaagcggcgaaaaaggatatgggcagaatgctggactatatcgacaaactaagcgaactggatacaacgggagtggaacctatgtctcatgtattcccggttcagaatgtcttccgtgaggatgtggtgaccaatggggatgagagtgaacagaccctggccaatgcacccggcgagaaggacaacatgtttgtggtaccaaagacttttgattagaagtcgggtagaataccgctttatcatctggttacagcatttaggcggtaatggttttccgtcagacattaaaaaaggagaatggatatggatattttatccctgacagcagtagagctggctaaggcgatccgggaaggtaagactacgtcggtggaagccacgcaggccgttctggataagatcgcagccggtgaagatacctaccactgctatgtgaccgtagaacgggaaaaggcattgcagcaggcagcggaagtacagaaaaaaatcgaagcgggcgaactgaccgggcctctggccggggttccctttgctatcaaagacaatatgtgcaccgagggaaccctgactacctgctcttctaaaatcttagagaattttgtgccgaccttcagtgcggaagcagtgctgaatctggaaaaggcaggcgcagtgattctgggcaagaccaatatggatgagtttgccatgggcagcaccacggagacttcttattacggagtgacaaagaatcccagaaacccggagcatgtgcccggcggttcctccggcggctctgcagcggcagtggcagcgcaggaatgctttgcagcattgggttccgataccggcggttccattcgacagcccgcatcttattgcggtgtcgtcggcatgaagcccacctatggaactgtatcccgttacggactgatcgcttatggttcctctcttgaccagatcggaccgctgaccaaggatgtgacagactgtgccactgtgttggaagccatcacttcccatgatcccaaagattccacttccatgaagcgggaggatacggattttacatccgcactggtagcggatgtgaaaggaatgaagatcggtattcccagagactattttggagaaggactggatcccgaggtcagggatgcggtactggcagcagcggaagtattgaaagcacagggggcagaagtggaggagttcgatttaagtctggtagactatgcgattcccacttactatacgatcgcagcagcagaggccagctccaatctggagcgtttcgacggtgtaaaatacggttaccgtgcacaggatgcggaggacctgcacaccatgtacaagagaagccgttcccagggctttggacccgaggtgaagcgtcgtatcatgctgggctcctttgtattaagctccggttattatgatgcttattacctgaaggcactccgcgtgaaagcattgatcaagaaggcttttgacgaagcttttgcaaaatacgatgtgatcttaggaccggtggcacccactaccgcaccgaagctgggcagcagtctggcggatcccatcaagatgtatttgggagacatctacaccatctccatcaacctggcgggactgcccggtatcagcgttccctgcggcacggattccaagggactgcctatcggcatgcagctgatcggtgactgcttcaaagagaagacactgatccgtgcagcctatacctatgagcagaggaggtaagcaacatggcaaaacaatatgaaacagtaattggtctggaagtgcatgtagagcttgccacgaagacgaaaatattctgcggctgttccacggcgttcggcggcagacccaacacccacacctgcccggtatgtaccggtatgccgggatctcttcccgtgctgaataagcaggtggtagaatatgcggtggcagtaggccttgcaacgaattgtaccatcacgcagtattgcaagtttgatagaaaaaattatttctatcctgataaccctcaaaactatcagatctctcaattatatctgcccatttgcaggaatggctcggttgaaatcgaggtagcgggagaggacggcaacacttacacgaagccggtgcgtatccacgagatccacatggaggaggatgccggtaaactggtgcatgacgactgggaagattgcacactggtggactacaaccgctccggtgtgcctctgatcgagatcgtatccgagccggatatgcgcagtgcagaggaggtcattgcgtatctggaaaaattacgtctgctgatccagtatctgggagcgtccgactgtaagcttcaggaaggctccatgcgtgccgatgtcaatctgtccgtgagagaagtgggagcggaaaagttcggaacccgtaccgagatgaagaacctgaattcctttaaggccatcgccagagccattcagggggagcgggaacgacagatcgatctgctggaggccggcaaagaggtcattcaggagaccagacgctgggatgataataaggaatattcctatgcgatgcgttccaaggaggatgcgcaggattatcgttacttcccggatcctgacctggtaccggtctatatcagtgatgagtggctggaaagcatccgcagcaaacagccggaattccgcaccgagaagatgaaacgttacaaggaagaatacgatattccggaatatgatatcgatatcattaccggctccaagcatctggcagatatctttgaagcttccgtggcactgggaagccagcccaagaaggtgtccaactggctgatggtggagactatgcgcctgttaaaagaaaaagagatggagccggaggacatccggttctcaccggagcatctgagcaggctgatcacgctggtagacggcaaagtcatcaactcttctgtagcaaaagaagtattccaggtgatgtttgaggaagatgtagatcccgaacagtatgtggaggagaagggactgaagaccgtcaatgacgaaggcgcattgcgtaaagtcgtggaggaagtcattgctgctaatccccagtccgtagaggattatcacaacggcaaggagaaagccatcggcttcctggtaggacagaccatgaaagccatgaaaggcaaggcagatcccgccagcgtcaaccagatgctgaaggaactgctgtaactggaaagttacgcgagcaatgagtcgcgcataggcatagtgaagacagcgatgggcgcttgcacacaattcgctgtctttacttatgccgagatgcggcgaacgccgcgatatgaaataagattggcagcgttctttgctgacaatcttatgaatagcgtggctcattgcggatggtagtttcaaatccacgaacgtccacagcaaacggaacatccttccgcggtgggcatcgcggcatttattatagcttacgttacgaaatgccctgtaatttacgttttttctctgttgagccccggaagtttccgacaagcggggcgtaatctacattttttctctgctgagccccggaagttcctgacaagcggggcgaaatccgtgttttttctctgctgagccccggaagttcctgacaagcggggcgaaatccatgttttttctctgctgaaccccggaagttcctgacaagcggggcaaaattcatgttttttctctgctgagccccggaagtttccgacaagcggggcgtaatctacatttttcttctactatgtcccgaagataaaaccctccgcaatg

SEQ ID NO: 5495 - DNA, 3888 bp, Unknown
  gut microbiota DNA sequence
cgtagctatgctaactttctatttattcaacagatactccgccagatccaccgcggtctgcacatgttccgcattggcatagatgcccatgacgatgccgtcaccacggaagtaataagtatcagtcagatccttgcagtctgtgaggcagatgcctaccggtacgggatcctgcatgtcctccgggtggaggggatcgggatagtctggggtataatcggtattcatatcatcgttggctgcttcgatggccagtaccacttctctgtctacataatagaaataaggttccagtgcctgtatctgctcatcagtgagaatatcccgcagatcatgaaacatgctgctgttggcatatttctggaaagaagtgaaatctgtgatcatacagtccaattcattggctgccacatacaccatcagcttctgggaagaagtgatagaagtttcatccatgctgtcttccatgatacggatggaagtatcaaaagtgatatcgctggtgttcagatcaatgccctctttttctgcaaaatccgtaacaaaatccggctgttccgaggtcatctgatctaagaggctggcattcagcatcacggcataaaaagcgggatccttccggtctgtaagctgttttacaaaactgacgatcataatgatcaccaccagggcaatgatcacatgccacttgtaataataccagaaatacgccagtttctgctttggcgtaccgtttttcaatgcctctcgttcttctttgaattcatccattactgccatggggagatccgcctttctgttgccgaaatatggcagaacgccacattccgggtaaatttcttcacaatatactaatgataaaggttcgctatctgaaagtcaatgaacgaagtgtgaggggaatctaaaaaaacaattaaatcgccgggaaaatccgggcatgccttgcaagttttgtgaagatgatatatcataaaagaaaacgattgtcaggagaaaacagaatccggacagccgtaaacagagatttcccaaagaaacagaagaacggcgcgggcaatttcagaaccggcccggaagagaaggctttccttaagagggaataggctctgcataaaataaacgaagagaaaaggaaacaaaaaatgagtgattcttacgtagaatgtctggtaaaagcaaaacagcccacctgggcaaaaattttaaaggtattattgatcgcactgacagtactgagctgtctggtaatgttcgtgtttatcattttcctgccggtggcactggcagcgggggtgggagcttatttcctgaatatgtataccgatctggaatatgaatacctctatctggacaaggaactgtccgtggacaagatcatggctaagagcaagagaaagcgtgtcggtacttacagccttgaccgcatggaggtatttgcaccggtttactcctatcatctggataacttcaaaaaccgtcaggtgaaggaaaaggattatagtatcggcgaggtattgcagccggacgggcgttatgctatgtactatgaaggtggcgagaagatcctcttaagccctaatgaggagctggtcaaggtgctcaaaaacatggcaccccgcaaagtgttcagcgaataatatttcgcaacagtccggtgcagggaacagcatcaaagcagttgaatgcctggcgagtcaaaaatataggtctggtgtacatgatacgccggaccttctttattgcagaaacagaaataaacgcggtaatatgattgctaaatgataaaaaatataagatatccggttgacagtcctacgaaactctgctaaactcatggaaatgttataagtacaacgaatatgtaatataatcacaacttataacacaacaagatatcattcacaaatcttatcaaatgaacacaggaggaaagaaaatgggacagattattggtgaaggcattacctttgatgacgtactgctcgtaccgtcttactctcaggtagtccctaatcaggtggatttgaccacatggctgacaaagaagatcaagctgaacattcctatgatgagcgcaggaatggatactgttaccgaacatcgtatggcgattgccatggctagacagggtggtatcggtatcattcacaagaatatgtctatcgaggcacaggcagaagaggtagataaggtaaagcgttccgagaatggtgtcatcaccgatccgttttctctgtctcctgaacatactctggcagatgcagatgctctgatggctaagtttcgtatctccggcgtgcctatcaccgagggcagaaaattagtcggcatcatcaccaaccgtgatctgaagttcgagaccgacttcaccaagaagatcaaagagtccatgaccagcgaaggcctgatcaccgctcccgaaggtatcactctggaagaggcaaagaagatcctggccaaggcaagaaaagagaagctgcctatcgtagataaggacttcaacttaaagggtctgatcaccatcaaagatattgagaagaccatcaaatatcctctggcagccaaggattcccagggcagactgctctgcggcgccggtgtaggtatcaccgccaacgtactggatcgtgtggcagctctggtagcagccaaggttgatgttattgtactggattccgcacatggtcattcccagaacgtattgaactgcctgaagatgatcaaggaaaaatatcccgatctgcaggtaatcgcaggtaacgtggctaccggtgatgctacccgtgccctgatcgaggccggcgcagatgcggttaaggtaggtatcggccccggttccatctgtaccacccgtgtcgttgcaggtatcggtgttcctcaggtatccgctatcatggattgctacagcgtggcaaaggaatatggtattcccatcattgctgatggtggtattaagtattccggagatatcaccaaggctattgcagccggtggtaacgtatgtatgatgggttccatgttcgcaggatgtgaggagagcccgggagaatacgagctgttccagggtagaaaatacaaggtataccgtggcatgggttccatcgcagccatggagaacggcagtaaggatcgttacttccaggagaatgcgaagaaactggttcccgaaggtgttgaaggccgtgtggcttacaagggcagcgtggaagataccgtattccagctgctgggcggtctccgctccggtatgggttactgtggtgcacaggatatcgagactctgaaggagaccggcagattcgtgaagatctctgcagcatccctgaaggagagccatcctcatgatatccatatcaccaaggaagctccgaactacagcgtggatgataaataagttgtgaaaataaggctataatgaaagaggcgattgtaagtctgacttgcaaccgcctctttttggaaaaagaaatcatttgaatctcaaaatatttgcaataattgacaaaaactttgcaatttttcaagcaatataacgaatatggcaaaaaatgtaaaataatatcttgtatgaatttcccgtcacatggtaaaatatatttgttcgggtgccgaggaagggcgtattccccgaatatttaaaagagaagcaggggagcaaaaaagtggctgaaatttcatttcgagaattgatcgatcccagacgtctgcagcatttgcagaatgaattctgcaaggtgacaggcgtggcagctgtctgcctggacaatgagaatcaggtgttgacggagccgtatgtggacaagacatggaagagaccggatggggaagatccgatcagtacggaatatcgcaggaaagcagcacaggcactggacagagtgcagg

SEQ ID NO: 5496 - DNA, 920 bp, Unknown
  gut microbiota DNA sequence
tggtatattaagattgctaaatcttgggtaaattttaaagtgatgtctccatacaacatactctaagacatcaaaagtggcagaatccaagtaaaatcaatggattctgccactatacttttctttaagtgtcaaagacgggattatagcatagcaaaaagtaaaaagcaaacatatattccaaaaatatgttcgatttttatcttgacagaagaatgcatgttcgatataatacaagcagaaagaacaaatgttcccgaacagattttcttatgtgaggtgtgttatgagagtacagaagagtgtataccatatgacgaacagagagttaagattatataagagacagttaagaaggaggatgcagatgcagcgcagaatccttaccatgattgctacggtctgtgtgattattttctgtgcggtatcctatcagggaatccgttctctggcaagctccggggaagaacagttaaagttcaaatactatactcaggtgacgctagcttacggagagaccttatgggatctgtccgaggattatattgattatgaagagtataaggataagaaggaatatatagatgaggtacagagcatcaaccatctggcggaagaggacagcatccgcgccggacagacgttgatcgtaccttattattcttatgagtttgtgaagtgataagaaagagtatgataaatggaaagttacgaaagcatagccgcgcataggcatagtgaagacagcgatgggcgcttgcgcacaattcgctgtctttacttatgccgagatgcggcgaacgccgcgatatgaaataagattggcagcgttctttgctgacaatcttatgaatagcgtggctcattgcggatggtagtttcaaatccacgaacgtccacagcaaacggaacatccttcc

SEQ ID NO: 5497 - DNA, 6830 bp, Unknown
  gut microbiota DNA sequence
cgtcctgaaaaatgtaataaattacagaaataagtccttaaaagtgtattatatatacgaatttaaggacttatttctgttgacaaggcaattttactgggatagagtagaagtagataactattgtgaatagtacaagggaggcagacatgcgacggtttgcattggaacgattaaaagaatggaaagaaaaaaagaaccggaagccgttgatcattcgcggagccaggcaggtaggaaagacctggcttatgaaggaattcggagcaagctgttttgagaaaacagcgtatgtcaattttgacagtaatccccgtatgcaacaggtgtttgatggagagatcaatgtagaaaggattcttctggcaatcagcgtggagacaggtgtttcggtcaaaagtgaagataccttacttatttttgatgaaatccaggaagtaccgaaggcactatcctctttaaagtatttttgcgaaaatgctccggaatatgccattgtagctgccggttccctgctgggtgtggcgatgcacaagggcacctctttcccggtaggcaaggtagacttcatggatctgtatccgctcaatttccaggaatttttgtgcgccttgggagaagaacgatttgcagagcttctgcagtccggggatacgcaaatgatcaataccttcgcttccaaatacaaggatcgtctgagagagtactattatgtcggtggtatgccggaagtggtccagtcctatgtgaatgataaagatttcgggcgggtcagagaaattcagaaagatctgctgaattattaccgccaggatttttccaagcatgcggagaattctctggttccccgattgaacctggtgtgggattccattccgatgcagctggcaaaagaaaataaaaaatatatctacggacaggtgagagagggcgccagggcaaaagattttgaactggcaatccagtggcttttggattgcggactgatccataaagtaaatcgtgtgagcaaaccggcgttaccattaaaagcttatctgaatctggatgcatttaaaatatacctgctggatatcggattgctgattgccatgacggatctggatgccagggtgattatcgacggaaaccggatatttacagaatttaagggagcattgacagaacagtatgtgctccagcagttgatctctgaagtgggagtgatcccctattattacagcacggaaaactcttccggagagattgatttcatggtgcaggggaaaacatccgtaattcccatagaggtaaaagcggaggaaaacctcagagcgaagagcctgaagatgttctgcgaaaaatatcagccgaaaattgcgatccggacgtcaatgtcggattacagagagcaggaatggatgacgaatattccgctttatcatattgaccgggtgaaaaaatatatggaagaataatagtaataattgagtgtgaataacatactgttttatattgaactattttgacaaaggaatatactaaaaataagagtattacttaaaaataacatctatatggtagtgcatagtatttagtaaaagaaggatatacgttgtataaatgacgtgattagagggggaaatacttatgggaagaccagaggattccagagtaaagataccggcacttgtgcattttacaagacttggatatacctatatgtcaattaaagataaagaacgtaacgtagactatgatggtgatactaatatcttttatagtcaatttttgtctgcgattaatcgaatcaatcataaaaatttcatacttgcagacgcaaaaaagattattggggaacttaagattaaattagggaatgatgatttgggcaaatcattttttcagattttgcaatcaggtattgacggaattaaactgattgattttgatgatgttggtggagcaaataatgactatacggttgtaactgaattaccatatgaaaatggagatgacagttttcgccctgatatagttgttttaattaatggaatacctttatcatttattgaagttaagcgtcataacaatcgagaggggattttgacagaacgaaatcgtatggagaaaagatttggcaataagatatatcgtcgctttgttggaattacacagtttatggtattttccaataataacgaatatgatgattcggatattgagccaattcagggggctttttatgcttctagcagttataggagaatgttttttagcaagtttcgtgagccagagagcgggaaaattaaattaagggcaaaaatgaaggcaattgttcccaagaatgaagcttttatattaagtgacaccaacctaatttctattaaagggactccagagtatatatcttctttatcggaagattcaccgacaaatcgtattattacatcgttatatacaaaagaaagattattgtttttattgaagtatggtatttgctacaaaacaacgaccaataaagacgggattacagaaattgaaaaacatatcatgcgttatccgcagttgtttgcaacattggcaatacgcgatagattgcgtgaagggattagaaaaggtgtcatttggcatacacaaggtagtggaaaaactgctcttgcatattcaaatgtgcgattcttgacagattattttagtaaagaagaggggaaaattgcaaaattttattttattgttgatcgtttagatttagcggaacaagcaaagaacgaatttgaagcaaggggactaaaagtaaaattgattaaagataaggacgaatttgttacagacattacgctccctggggaatctaatgccagtggtaaggtgacgatgaccgtaatcaacattcagaagttctcaaaagaatccgtgactaaaccatctgattataatgtggaggtgcaaagagtgtacttcctcgatgaggcacatcgaagttataatccagtaggttcatttttggctaatcttatggcatcagatagaaatgcagtacagattgcgctgacaggtacgcctcttataggtgaaggatataatacgaaagatgtatttggcaattatatacataaatattactataatcagtcaattgcggatggctatacattgaaactgattcgtgaggagattgagaccacatataagaatcaaatgaatgaaactcttgatcaaattgtaaagcagggaagcattaataagaaagatttgtatgcacatcctaaatttgtagagaaaatggtcgactacattgttcacgattttggcgaaggaagagcagcattagattcttcaattggagcaatgatagtatgcgattcttctgaacaggcaagagaagttgacagacagttgaaaaggttttctgcgtatacgcatgcgcttgttttgcatgatgaaggtacgaaacaggatcgaaaaaataatcaagaagattttaaaaaaggcaatatagatattttggtggtctataacatgcttttgaccggctttgatgctcctcgattaaaaaagcagtatttggcacgaatgattaaagcacataatctgcttcaaacgttaactagagtaaatcgcccgtataaaggttatcattatggatatgttgttgattttgcaaatatcaaagatgagtttgataaaacaaataaagcatattttgatgaacttcaatctgaacttggagatgaggtacaaaactatagtaatattttcaagagcaaagaagatattgaaaaagatctgaatgttgtaaaaaatcagctttttctatatgatacaagcaatgtggtaagttttattaatcaaattagcgagattgatgataagaagcagttacttgatttacgacaagcattagaaaattacaaggcgatgtataatctgatccgtttgtatgggtatgaggatttatacgaacatttcaatgtcgagaatgcaattaagtgtctgaatgaggtcaataatcgaattagcattattaacttaaaaaatagcattgattcatcagaggatatgtcacaggtactcaatatggcattggatcagatagatttccagtttcgcaagataaaagaagaagaacttatcattgctgattcatttagagatagcctggaaaaaacaagaagagaaatcgtagacagatgccttgatccaaaagatccagaatacattgcacttcttgatgaattaaagcgggtattcaagaagaaaaatattgaggaacttacagcagatgaaatgaagcagatgatgggggaactggatactttgaaaaagaaggcagaaaaaagaaatctggcagatcgtatgcttgcggcaaagtattcaggtgatgttaaatacatgagaactcataagagaattatgggtagtccaccacccattgcagatgcaattactgtacatagaattttaatgagtgttaagtctaaggcagatgatcagattgctcataatgagaatatccttgataatgaggattattttattaaatcgttacagccaattattttgagagcatgtatgggagaaaatgttagaatagacaaacctcaacttatgtttatagataattgtctgtcgaaagaatatatattagaaagggattgggtttcctgatgacaacagaagcaataatagcaaatacaaaacagatgatagatgatcttaagacagtatgtgccaattttggacttggtaatgctagtagtgaatataagattataacagagatttttttgtataagtttttaaatgataagtttatctatgaggtacagcaggcggatgaagagcaaaaaaattccgagaatgtggagcaggcattaaataatatgtcagaagatgactatgaaatgcttatgatgcttctaccaccggctactgcaaaactcaagagagagcattttatatcttatcttttcaatcataagaatgatgagaagtttaacgaattatttgattcaaccttatgggatatttctaacactaatctagatgtgttctctgtaagtactggctccggtgataagattcgtctatttgatcagaatttatctcaaaatgtaacagagtcaaatcggaggtctgatttctgcaaagctatgattgataaattagttacattcagttttgcagaggctttttcacagaagtatgactttttcgcgactatttttgagtatctgattaaggattataacaaggattttggcaagtatgcagaatattatacaccacattctattgcaagtattattgcaagaattatggtgccggaaggtgtgcagaatgtaaccgtatatgatccggcagcaggttctggaactctggtacttgcacttgcacatgaaattggcgaaagtaattgtacgatttatacacaggatatttctcaaaagtctaatgaatttttgagactcaatcttattttaaataacttggtacattcacttggtcatgtagtgcatggagatacacttctttctccacagcatttgaaccgtcagaaaaatggtttgatgaaatttgattatattgttagcaatcctccatttaatgtggatttttctgataacagagatactcttgcgggagatatttataaagaaagattttgggctggagtgcctaatgtaccaaataagaaaaaggatagcatggcaatctatcagatgttcttacagcacattattttttccatgaaagagaatggtggcagagcagccgtagtagttccaacaggatttctaacagcaggaaccggaatccctaagaaaatacgagaacgcattattgaagacagaatgctcagaggtgttgtctcaatgccaagcaatatttttgctacgacaggaacaaatgtatctgtgttatttttagacaattcaaagaagtatgatcaggcaatcttaatggatgcatctaaacttggaacaaagattagggtagatggaaaaaaccaaagaacggttttatcaccagaagaaatagagaatattatcaatacctttaataactttgaaacaaaggatgatttttctgtggttgtagattatgacaagatagagcagaaaaaatgttcattcagcgcaggacagtattttaaagtaaagattgaatatgttgagctgacacaagaagagtttcagaaaaaaatggatggatatacagaaaaattaacggaattgtttgctgagggaaatgcactgcagacagaaattttggtacagttaaagaaggtgaaatatgagtaggattacaaaatatgctttatctgatttatatgagatgagttccggaatttcatctacaaaagaacaggctggacatggtgcaccatttgtatcttttagcacagtctttaataattattttttgccagatgagttacctgatttgatggatacaaatgagaaagaacaggagatatattcgataaaagcaggagatgtccttattacacgaacaagtgaaacaatagacgaactagctatgagttgtgtagcagtaaaggattatccaaaagcaacttatagtggatttacaaaacgccttagacctaagaaagaaggaatagcatatcccaagtacatggcattttattttagaagtgaattgtttcgtaaagctgtaactaataatgcctttatgactttgagagcaagttttaatgaggatatttttacgtttttggatgtttacttgccaatttatgaagaacaggtaagaattggggatatgctttatgctgttgagtgcaaaattcaaaaaaataaggagataaatgattatttagc

SEQ ID NO: 5498 - DNA, 76793 bp, Unknown
  gut microbiota DNA sequence
aaataagaactctcagctcatccgtggtcaggctttccgtattgtagcggtcatagagaagctcgcttttcattctggcccacatgctttcacatcgagcattatcgtggcacctgccaccatcactgttcatgctttgtataatgccatatttagaaagcgcctgacggtaggtttcactggtatattgtcttcctctgtcggagtgcacaatggcacctcgcagatcaggatgcgccagataggcattatccagtgtatgctcacacagagttgccttcatgtttgtttccattgccagtcccagaacgctggaatcaaagcagtcgaagatggctgaaacatacagttttccatcttttgccttgatttctgtgatatcagttacgcatttttcaagtggcttatcagccttgaactctctcttcagaagatcatctgacttacgtgcttcccgatcagccttggtaatgccatttggcttgcgctttggccgatggacaagtcctatttcatccataaccctgtaaacggttcgttcactggggatcttgattcccgtcggattcttaaggagcagtgcttggtacatgcgaatacgtccataggtatcattgcattcatcctcagcatggatcactctcatggcatcagcaagatcctgatatttccaagggcgatctttaatagcaagatatttgtagaaaccctggcggctgacgccaagcatccggcaatagaatgagagttttcccttaatcacgccgtctttcgtttttatggcaatgaacatcattctttggttcttgctgacttccgacggctggctgcgaaaaaagcgcttgcttcctcgagaaattcattttcctctttcagacgccggatttctttgtcctgatctttaacgcgtttgcggagcatggcaagctcctcagcaagactcatcgcgctttccggagtatgtgcaccgtcgccaatatccaatgtgcctgctctaactgctttcagccatgtgtggatggttccttctgggatacctaattctttggctgccttagcaccgccgatttctttggcaagtttgacagcctggatcttatattcctggtcgtatttacgttgggttcgtgacattgagagttcctccttattctcttttattatacatgaattccttgagaataaggtgtcaactttatttatacaacatcataattataccgagtcactatttgaatctattcgtcatgtaaataaatacgggcaagaattttggtatgccagagatttacaaatcgctctggaatatactgagtggagaaacttttgcaaggttattgaaaaggcaaaagaagcctgccgaggtagtaataacgcggtatctgaccattttgttgacgtcaacaaaatcgtaaatgctggtgccaccagtaaggatatcggagatattcaactttcacgatatgcttgttatcttattgtgcaaaatggtgatcctcgaaaaaaggttattgcacttggacaaacctactttgcagtaaaaaccagacagcaagaactaattgaaaattatgaaaatctttccgaagatcaaaaacgtatcgccatccggcaggaaatgaaagagcataataaaatgttagtagctgctgccaaggatgctggtgttgaaactaccctggattatgctatatttcaaaattacggatatatgggactatatggtggtttaaaggctagcgatataaaggagcgtaaaggcttaaagaaatcacaagacatactcgattacatgggatatgaagaattagctgccaacctcttccgtgctactcagacggaagcaaaactccgccgtgaaaatattcaaggcaaacaggaagcgaataaaacccactttgaggttggtaaaaaggtgcgtgacaccattaaagatcttggtggcacaatgccggaagatttgcctacaccggaaaaaagtattcagcaattagagagagagcaaaagaaaaaattgaaataaaaaatcagcccagtgcaccaacaccagcgctgattaccgggcaaaccgataaatcaccttgaacaagtttttaattatgaaaaatataatgcctggagacttttgtttgataaaaaggatactaaagagaatcgacgtacctttttggaatggatgcaacatgaaaattaaaaacccttgaaaaatcaagggtttttagagcgggtgatgggaatcgaacccacgtatccagcttggaaggctggtgttctaccattgaactacacccgcatgtttatatatgaagcagggcggccattttaagaaatggtgtcctgcgaaaatgcccagaaccggaatcgaaccagtgacacgaggattttcagtcctctgctctaccaactgagctatctgggcccgcgacttaatcctacttgcaatcttgtttcatgactgctctgcgtcacaacaatcgtagtctacacaaatttcgtccaaatgtcaagtaccttatcaaaaaaattttaaatttttgcaattattcctctatctcctacaaatgatacggttaaaactcctctttttccccgtaccattgcagtaaaagctccaccacccggttgtagctgatcatgccatccgaaacaccattcaatttcagtgaagcattggtcagggtatctgaaacactgtccaccgtctccgtattcaccacagcttttccgttgattctctcccattgctcttctgtgacaaagatattgtcctcctgcacctgctgtaatacctgtaacggatgtaccgcctctctggccgccgcatagctgtccggatccgccagtctagtcttatacagatcgtttgccacataattcagcacacttaagtaacccgcatattgaaaagtactgtcatccgactctacgcaggccagaaatgcaataaaattcgcctcatcctcatagatatacccccggatgtgagccagctcatgacacatggttgccggtttttccatgatgtacatgacatcattgtaatttgcctccatggaaaacgggaaataatagccacacatatacatctgacacatgaaatccgagaaaaacatagccttcggccggggataataaccatccagctggtcataccttttccccaggctctgcatcacatcgatggctttatcctccatatccaccgcattaccccggctgtccacaccacccgagtacaccacggcaccactgtcatcccgttccatgacctcactgagctcattacagtgccggacgatatcattgtagatccgaagcagttcctccgttcgttcctgtgttgtctgctcctgcgcttcctcttcaccgaaatatttctccgaaaatgtagacccatgatagatcatggtacaattcagcgtcataatggcaaatacggcaagcaacgtccatgcaaaaaaaccaaaatatcccttcactccccggcagtacttttccgaatgtctgcacgccggaatcagcaaactgcatcccagcacaaccgcagcaagcaccaccagaatccctgccacaatcaaccattcgcccacggaaaagggaaacaaccctgtaatccttccgtaggtattgacccagattgggaaaatataatcaatataagcatcgctgaggcttctgctgctccaggcaacgacctgaagcagtaaaagaactgcaacgatgcttaaataaattcgaaaacttttcttatgggatttcttattctccatagtactccttaagtggcttcctcttttcccaccttgatcctggtcttcttccagatgccacagcggtacaaaacatacaggatcaacgcagaaatgccattactgatcaccacggaataccagacactgcgcacgcccatatgcaggacgctctcgcagaaccacagtgtcaggaaacggaatacccacaatctggtcacatcgatggccatggtcacctccgtatggccggttccctggaacaaaccggaggtcgtattgtatacgccattggtaaagcaccagaatgccataacacttaaaaagtctgccgccatgcccacaacttccgcatccttggaaaagattccgacaattgccgtggaaatcatatctcttgataagatcataccacctatgaacaaaaatacaaccgatatccacatggaaaaccgatatcccttctccgcacggtcctgctgctttgctcccatattctgccccacgatagtggccgttgccgaaccaatggcattggagggtagcgtgatcagtccattcaccttgttgccaataccgtaagccgccatggcttccgtcccgtagacaaacacgtttttactcatcagcagaaatcccagctgcatggtacttccgccgatagcggtaggcagaccgatcttaaggatcattcccagtttttccctctgtaatcgcatgtacgcacggttcaggcagatatcattttcctgtctgcacagaagtccgaaagccaccatggccggaatcgctttcgccaatagcgtagccagtgctgcaccggcagttcccagatccaggatgatcatgaaaaacggatccaggaacagattcagcgtaatacctcccagattaaggaacatggggcgcaccgtatctccctgtgcctgatgtactgcggaaaaaatgttgaccatatataaaaagggcatatcccagatgaccacccgcagataaactcttgcataatatgcagttcctccgtcagctcccagccagttgatgatagcgggtgttcccagaaaacacagtgtggcacagaccacggcaaatcccatggcacaggcaaatatctgatttgccatggatctggcatcctctttttccccggcaccgatatactgcgcaatgaggactgcaccggccacagtgatgccgctgccgaaattcgtaataatattctgcatcggtgtcacaagattgattgccgccagctgctctgttccaatttttcccagccagtaagtatccgtcaggttatacatcgtctgcaggaagctgttaatcactacgggaattgccagagacaggatcgctctgatcagatttccgtgcaatatcagatccggattatattttttagccgttttcatcgccatcactcctaagttgttcttatctatgtctttccaaatctaagtcgtattatacgtcaatttttcagtggtttccacggagattttagggttatatgtattaaaacacttttttattatcttttttatttacatcatggaaaggcgcatcgccagacggcaatgcagattcttgtgcaggcacaaatcagtacttggctcatcgtatacgcaaaaaaaacctcccacagcatctgcctgcggaagggatctttttcttaattctgaagtcatggtcagacttatttgattacaaggctgctccaaccatcgctggggatcagagagatataggtcttaccggtattgatctggatctcctcaccggtcttcgcatcatagtaatgtgtgatagcattctcggaagacttggtccaggtaacttcgatagccttaccctgagtaatgtagtaaccggagcgtccggagtcgatggcattgtagatcaggtagccttcacccagttctgcaaaagtggtatcctgcagaataacgttctcgaaagtgagctgtgcattgctgtcagcatccttgtgtgcagaaccatactcatagtaatcataggttccggtctcttcgttgtacttcagagtagaaccgttgtgcttgaaaggaagctcaatggtagtagcgctgatagcatcacttctatcatcaaaggtaacttctccgtctgcaaatttgaagtgaggtccctgatagtaatcattgtaagtagtggtatacttggaatttgcaaaacgctgcttcagaccgtcataggtcttgcccttctggctgttggtataggtatcataagtaatatactcggtaaactcagttgccttaccattgttgaaacgggcgaaaccaccactgaagttagcggaataatcttttgctacccagtcattgatgaagtaagggccaccatcatggcagagaactgcgttccactcagctgccagcatgaagttggtaggacgtgcactacgaatactacccagctgctcgatcttctcccagtcctttacgactaccatgaaacgtgtaattctgtcgttcagagtactgttcatgatctcatatacaacatctgcatctgcggtgccgaaatgaggcagtgcggttctctcgttatctaccattaccgcgataggacgctgatccttcagatcctcatcgatccactcgttggtaagttcgctgcgataggagtgctccggtgcaacttcatccgcggaagactcagttgtggcaggctgctctacctccttggtatcggtagcaataggctctgcttctacggtctggatcggagaagagatcggctcactgtttccacagccggtcagaacgcctactgcaattaaaattgctgcaagtactttctttttcatgaatgcttcctttcatctgtttgttctatccggtctctcgaccggcactctaaaatacattgtatccctaaagtcctatgtttgtccaccgaaaattcttaagattttcttgagattttatttcgcaaaaaatgacatctggcagttgtatgctgatgtcatttttgctttctataattattacttattattcttttacagccccgatatttactccctgtacaaaatatttctggcagaatggataaatgatcataaacggcagaattgctacgatgactgctgcattttttactgtattttccgtagctccttctaccgcagacggcagatcacttcccatgatcaatgcccgcagtttcatctggaagttatataaatttgaattcgtgatatacagcttatagttcgtgtaatcattccagtatcccacggcatacatcagtccgatggaagccagtgcagccttcgacaacggcaatacgattttatacaaaattttaaaatgagagcaaccatcaatctctgcggattccatcaggctgaccggaattccctcaaagaaattcttcatcagcaccagattatatacattgattgccggcagcaggatcactccccacaagttgtttgtcagatggaagtccttcattaccagataagtcgggatcatacctccgttaaatatcatggtaaacaacagcacattggcaataaatgcccgccccggcatcttccactgaatcagcacatacgccccaagtactgagatcagcaatcccatgatcgttcccataaccgttgtgtaacaggaaatcaggaatggtctgagcatcgtcggattggtaaaaattgatttataccctgcgaacccgaactgctcaggaaacaacttcatgccataagccgtcttcagatcaaaagagtccaccagtactttatataccgggatgatcatcaccagcgaaaatactgtaaatattacgatcaatacgatatcaaaaattttcactttctttttcatcatacaatacctcttcctctcgtcttatggcttaccctgttacataccagtaccagaatacagcttataatagaggaaaacataccgaccgctgtcgtatacccataatccggaattgcaccggagttaaatgtctgcgtatagatataagtctgcaatacatccgataccttgataacggcatcattctgtaatacgaaaactgactcaaacaaattcataactttcgccagattcaatacaagtaccgtcacgattgtattattcaacgcaggcagggtaatatagatcatcttctggaaacggtttgccccatccatcgacgctgcttcatacaattccggactgattcccgccagcgttgccatgaaaataatcgttccccagcctgtatctttccagacattaattatgtaatacgaaaatctccaccatttctggtctccgaggaaatatatattatccgtgatcaagtgtaatttcatcaggacatcattgaccaatcccgcagatgtcggagacaggatcatggaaaatatggatgctgccactacccaggacataaaatgcggaatgtatacaattgtctgaaatacctttttcaactttaaaaaaatcaattcattcaataataccgaaataataactgccgcaccggtattcaaaatcagctttgtaatactcagcaccagcgtattgctgaacgccttccaaaaccccggcatactgaacatttttacaaaatgcttcattcctacaaagatcggatcattgattcctttatatgtaaaaaaggcataacggataccaaacataggaagataataaaatatcaatgctgccaccaataccggtgtcgccatcagatagactccccgatatgcacgggcgtgcttgaacgcggttcccccaggtgtcctcttaggcaaagtttttcctttctctttcacaacgtttaccctccgttccggctactctatatcagctattcaaaaatcccatatattcgttgtactttgtctcttctgttttattcatatgtatggtcagtccatcctctgagaaatagagacggatgcggatggatgcaacactttctccgatcagccagcagaagataaacagcgtattttgatccatccaggctccggatgaagcacatttctccttgtatatagggaactctccctcttccagatgtccgattccaaagggaagctgacattctcttccttctatttcatacgagagtactcctttttgatccgcatcggaaaaagtcacaccacaccatgtaaatccatacttatttcggagcagcggatattttttcccgaaatctgcacaaggttttccttcaaataccgtacgcagcacaggcaacgttgttttctccacatcgttttccgggaaacaatccttcagcagcacttctctcactgcggcaagtatcatctgctcggctccgcccataccctgtgtatctgctgtcgttacaacgacgagatccatttccggaactgccagcattatctgaccgcccagccccagcattgcaaaagtcccctccatcgggatccagaactgatatccataccagcgatcatcgccatcaagctgtgttgccgttctcggttctgtcgctctcgctgcataggatcccttttcctgctttaacagcatacagccggtacgcagcagatcctcgggagtagccatcaggccactccctcccatagaggttccaaagggatcctctatgatataagactcctcgctgaagccattctggcgcagcaacttttctttcaggtaatccagcatcttttcaccggtcagtttttctaccagcgcacagagcacatgggaggatgaggtatcatacataaagagagttccgggtctgtgggtgggttctgtctggaaaaagctcctcacccagttttccgttgtgctggtcttgttataagttgtcatattgtaacatgtctgcattttcaacatattttctatcgtcatctctgccagccaaggatgcactctcccgggcagatattccgggaaataatcacagataggatcctgcagggaaattttcccttcctgctccagcaatccgattgccagtgaagtaaaacttttagtcacagaaaacattctctgcaacttattacggcaatagggtgcataatatttttcaaacaataggttcccatgttgtgcgatcagcacactgtgtaaaggaatttttcttttttccacttcttttacaaattcctgcatattctgttccgtcagttctctcattttagctgccataccataacctcccatgctgtcgcctttttatttattattcagggaatctacgattgcctgagaccattcggctccgccttcctgttcaaaccgcttgtatccctcttccacagaaacaccctgtaccacgcagtccgcaataatagagttcttcaggctggtcagatcgccgttatactggctcatcatatctgttgttaccggcaaaggtgccgtcttgttattggcattaaagatttccatcgattcctctgtatatttctttacgggaaccagtctctcggtcaacggacagatattggtatctcccataatgatggtcgtatactgtactccgggctgggaacgcatctccatcatatggaactctccatcctgatacgtattgccacatactgtttctgcctgtctggaccaatgaacgccttctactccatagatccacaatgtttccatgtctccatcatcaaaaatgctttccagaaaatatttgaatacgccttccggattcttacaggaagaagtaatcgcatacaccggtgcacatctctgccagtattttccaacctctgcgataggcggcataaataccagttcgctgtcctgtccattcgcagccagtccatccgacagctgatcagaccatccgcctgcccagtaagtaaatgctccgaactccccttccatgaatttggtacggcagttgctggtcgcattcgtcagagattccttatcgatataacccttgttgtaagcatcctgtaatctcttgatcgcttccttcatggaatcctcggtaaatccatctctccatacgccatcctctccctgatagaaagaaggatatgcatcctgatagaattccggcagataattggtataaggagcttcatttcctacaaatccggctgcggatacaccaatggtatttccattgataccgtctccatccggatcaccgttgctgaaagcatccaacatttccagatactcttcatacgtcgtcggaatgtccagtccacagttatccagccactgttttctgaggaaagtcatacatccgccacctccgccaagtgccagtccgtacagatgtccatccaacatattgccttctacgacactcacatccgtgttgggattcttcttcagctctgaattgttccaggcatccgtcatatcccagagagctccctctcccgcatatccggaataataggaagatccaaggataacgacatctggccagttctccggtccgctggcaaaggtctgtcccaacacatcatagtaggcattgtgatccggttggatgacttccagttcgattcctgtcagttcttcccatttattgacccattcttcctgaccgtctgccaatgtcgcctggaaagttccgtctaccataatcgtaatcttttccggtttctctacatcatctgcaacatctgcaacatccccggcagtatttcctgcctgtgcatcgctatctgtctttcctgtatcatttcccgtattttccgcagagctcccacaccctgtaaatatcatggaacatacggtaaccgcaaccagtgcgactgataataactttttctttaccataaataacctccgtccatattctgttatcttctctgttgtttcttgtttcttattttgttttgtttctttgctgcttgatttgttgattattgtcacttcggcgccggaagtatcaatgtgctttcattatatctgtcattttgcacaatttaaagtcacatatttcaagatttagtgtatatattttttgttattagaggctcattttttatgtcaatgatacacattttattttattacattccatttcattgcctttttcacctattatgatactataataatatctctcaggagggtttttgttatgaattccagaaaaaataaatacttcataaaattgataacatcctacagtctgctcttggtcattgtgctcattctgggaattgttttccattttattctttcgcataatgcaaagcaggaactattgaatgaaaatatgctttctcttaaaaatgtatccgagcaatacagcaactgctatgcgaatatttatctgatttccaagcgaatggcaaataattccagcctttcccgcctggcggaagccgatcagggggaacgagcgttttattataatgcctatattaccaaacaggctctggtagatatgtattctgactattcactccagccaattcagacctattatatccatctgcgtcatacagactacataatcagctataatgattttgagaatctctattccttttataaaaacaatcaaatgctggatccctcaaaatatgaggaatggaaggagactctggaatcctcagacaattataaccattttctttctcttgaccattttgcgaccgaatatacaccacacagaaaaaactattgttatgctgtctctctgcagaattataccttcaaaaatatcaatgctgacatcatttttgagctgaatgctgattatatgcagcaaatggtggattctgtcgatctgatgaagaatggctgtctcatcatccaggatagcagcagtgacactatgcttactttcagtaacaatgaagcgctgttaaaaaaaatagatgtttctctgctttcctcgttagattattccgaacggggatattccagcacagtatttcagggtgctcccgtcacagtactctatacctccgcacagacaccgaatctgaactattatctgattgttcccacgtcctacctgaaagcaccgggaaacggactgcagttactgtctctattcgttatctttctcggtgtcgtaggaagctttttgattattgttctgttgtccaaggccaattataaaccctatgaagcaatggaatatcgcctgcgggaagtgaatttcaaccacgaagagctcatgcggttaaatgagtcccaaaagatcaccctccgcaattattattttgatcaattgattcatggtacgattctgagtgaggaagaagctgcgtatgcccaaaattatctttccatttccgctaatgccaattcctttgctatcttatactgtaatgtctacctggatactttggagctaaataatgaccctcagggaatgatcaacatcctctcccctgattatgcggatgttatttccgatatcctttccagttattttatacattcctatatcatgcagggttcccgaaatagtgtttatactattttattatatgacagggaagaactggacaaggtcgaagatttattttcacatgttcatactacactattgcaagaatacaatatctggatttatggtggattaggctgtacaaccgacaccatctcctccgtctggaaatcgtatcgccaatccaaagaggctgtaaaacgtatctccagcccagtgtacctgtgtctgtatcgtgagattttggaatttcaggattccttcttttatcctaatgaggttgcggatcagctatataattttgtaaaatccggtaacttcaaacagacaaaaacaatttttaattttataaaggacgaaaattttaagaaacgaaaacttaattccagacaagtgaaatggcttttagaaaatatagaaattacgttattgaaagtaatcagggataacgacatttcctatgatgactcaagcttagccggtctgtccgaagattctaccctgaaaaattacgagcagattgctctggaattatgtgaaaaaaacaagcaaccggaaaacgacaaccagctgattgtgcgcattcaggcttatattgatgagaattatggggatccatccttatgtttaagcagaatatcggacctgttccacatctccgagagttacttttccttccttttcaaaaaaacagtaggggtaaacttctctacgtatctggaacaggtccgcatgacgcaggcaaaacatctgctggaaacaacgaatattaaaataacagatttatacgtggcggtcggttacaacaatctgaccagcttccgccgtgcatttaagaaaaaatacggtgtagcacccaatgcccttcgagaataactacttattctttttcggttgctttctcgcgcagcacttcctcaaactgttcgatgggtaccggtttggaatagtaatatccctgctgccaggtagatccaaatttctcgatatagtcgctgacttccttatcctcaataccctcaatacaggtttcggtgtttgtcctcctggcataatccacgatagactgcaccatggcctgattctgaggtttttgcttaatatcacggatgaagctcatatctaccttcagttcgtcaaaaggaagctccagcgccagacttaaggaactgttgcctgttccgaagtcatccagtgcgatcttgatcccctgggaatggaaaaattctacctctccgcgcaggaaatgaatatccagatctctgcatcgttctgtcaattcgaggcaaagctcctccggcttcgcaccggtctcttttaaaatattcataacagcactgcggaactctctgcgctccagctgtgccgccgccacattgacattgacgaaaaagccttccgtctcctcgcgcagcttctgtacatccgtaagtgctgtccgaaggatccagttccccagatcaaaaatacagggatcctgttccagccactccatgaacacaccgggggacaccatcccgtaaggctccagttcccatcggagcagcgcttccattccccggatcttgccggtcttcgtatcggcaatcggctgatagaacatccggaagccttcaaagttatgcgtagcacactgatggatcacaccgatcagttcaaactggttctcgtcactgccacagacctcatcattaaaaatcaccagctctccgtgatgctcaagccgggaatggttcaacgcataagtcagacggctgcggaccgcgttcgtctccttcatataaggttccataaatattgcgccggcagataccttcagagggatctttttcccctctacctctgtattttcaaaagcttctacgatctcatcgtatatctgctgtagttcctctttggatacatttttaaagctgatcacaaatttcgcaccggagagccggtatacatatccttttccccttaacaggcgcaacagctcctgtgccgcacagttcagaatcttatccgaaaaagcggcaccgtacataacattgatatgactaaactgatccagtccgatcttcagcagagtcccctgtccgctttcctccaggaattccctgatttcccgatccagcgccggttccgtatgcaatccggtagtcgcatccacctcgtcggaaataccgtagttgttatatcgtattacgatcacaaaaggctttccatccttatcattcagcattttcgccctggcactgatccggttgtaggtgcttccgtcacgcacccggtattcccagggctcgtccatatttttcccggcaactctctcctggaatcccctccggaaatcctccagatcatccggatgaatcgatctttttgatttttcttgtccgcggatggtatagttctcctgcataccaaaatattccatcgtcttctcggaccaccatgtcacgccgttccgcagattggttatggatatgtaggactttttcgccagagaagtaatggcttttacaatatccgggaacaggatatccatttcctcccagaatttctgttcatcatatgtattgatactcatgtctcctcccgacactttcttctgtatgcccacagtctctgaatgcaccctagcatcaaataaattataacataccaaaatgatgtttacgataggataattaatataaattttttatgaaataaaatatcttatgattgacttcgaaaactatctgtaatactatgcaatatagcaattatttcaaatttgaaatattcacttttgtaatttcagtaattacactttgtataatactaagtaaggaggccttcggatgaatactgatatcgaattcgtacaaaaattcaatctggcttacaacgccatgtgcaaacctctgtgccagcagttaaagctgccacagacagcttttgatattctcatgttcttcggcaataatccggaataccacactgccagtgatgtcgtggagatccgccggatcaaggcgaatctggtgtccgtcaatgtggacaagctggtgtgcgaggggtacctggaacgcagagaggctccggatgaccgtcggaagactctgctgttctgcacggagaaagcacaggatgtcatcgaaaaaggccgcatgatacagagcattttcaaagatactctgctagatggcaccgatgagacaagcaaagagatcttttaccacatgcttcatgtcatggagagaaatatggacaatatcctgaaaggagataaataaatgcagattttaatcacgattcttgtcacttttttcgccggcatgggagccggcctgggcaccggatttgccggaatgagcgctgctgccgtcatcagtcccatgctgatcactttcctcggcatggatccgtatctggccgtcggcattgcgctgtcctcggacgttctggccagtgccgtatccgcttatacctatgcgaaaaataaaaatattgatgtcaaaaacggcctgatcatgatgggaagtgtgctggtattcaccgtcgtaggcagctacgtatccagcctggtgccttccgctaccatggggaatttctccgtgttcatgactttcctgttaggtatcaaattcatcgtccggcccgtaatgaccaccaaagaagccatgcagggcgtctccgcgaaaaaaagagccattcagtctctggtatgcggtatgctgatcggctttatctgcggtttcgtcggtgccggcggcggcatgatgatgctgttgatcctgacttctgttctgggctatgagctgaaaactgctgtgggaaccagcgtctttattatggcttttaccgctctgaccggtgcagtttcccattttgccattgggggcatgcccgactggaccgtatggatcctgtgcgtcatctttaccctgatctgggcccggattgccgcactgttcgccaacaaggccacacccaagactctgaaccgtgtcaccggtgtgatcctggtggtgctgggcattgcagttatgtgttttcacctgttagcctagctgatttcctataccgtgtgtattttccggcggagtgatcgttgcattgctccgctgattttctatgatcttgcggatttccgacagatccctggcaaaataaatgccttcctgtctctccggggaggacaatcccatctccgtcatatgtgataacagtgctttcaggctgtcataatagccgttaaggttatagagaatgcaaggtgcctccaggtgctttaatgacactttggacatcacttcagcgatctcttccagtgttccggttccgccgggaaaagcaataaatacatctcccagttcgatcattttcgtcttgcgttctgtcatgtcctttgtgacgatcagctccgtaatggcatcatactggtattccatatcaatgaaaaactgcggttccacgccggtcacctcgccgcctgcctgtaatacgctctccgcgatctctcccataagaccggatttggatccaccgtacaccaggcggttaccgctttcaccgatccaggttcccagctcacgcaccgcttttctaagagaaggatcatttccttcatttgctcccagatatactgtaatgttcatcgtattttcctcctgcttccaagtataagggctttcctttcttttgacaaggcaggagctaccggcacaaatgtgaatgacgtatcggttgcgttaattcaggcatagtacacctgctgtccggattcttcttttacataagcaataaattcttccgccacatgggacagggtatgatttttattccagatcaaagcataatccgcatgggcattcggatgctccaccggccgcacgcagacgtccttgtctcggatcagggaggaaatcgatgccggatagatcgagatgccgacgccgtggaggctcagttcgtaggcattcatcatatgtgcgatccttccccggatcaccggagcatgccctgtgccatcgaaccatttatcgatttcaccttttctggattctctggagggaatcaacagatcatagggcaacagctccgagggcttcaccggatcattttcccaggaatacaatgcatgtcccttggggatcactgccacccagggttcttcatacaccggcagcacgtggaattcctctgtgttataaggggccgtgatcatggcaatctcacacaatcccttcgttacgcggttattcacatcatctgtgttgccgttccacagattgtactgtacatgaggatgtctctgctgaaatccagcgatccactccgcgaaaagtctgggtccgcagccctctaccgacgcaatgtataatgtcccctgcagtccttccttgcgttctctgacatcctcctccgaccggttcaccaggtccaggatctgattcgcatactgcaggaacagctctccctcttctgtcagggacactttatggggtgtgcgaaggaacaatgtcgtccccagctccgcctccagatcctggatctgacggctcaggggcggctgcgcgatcgccagctgctccgcggctttcgtgaagcttttctcctccgccactgccttgaaataccggatatgccgcaattccatctttccagcatcctccttccatgctttttccaaaaaccagcttaatctttctattttgtaacatgttgtattttcttttattataccttttaggtattattatacttctattatatgtatttcacattataagcgcaatatggtaaattataatcatcaaaaggaagtcaggcctgaccccttaagcgtaacaacaaagtcaacagttcatttgtcttggaaaggttaagggtgaatattatgaagaagatcatggaaaaggttaacgagttttttgacgagtattacaagagcttcgctgaaaaattctgatagaagtgtgtttttcacgctcatatacacagaaaaagcagcagatctggcgggatctgctgtttttttgttcaggtatgaaaataatatccgtctccatcactcccgtcatcccattcctcattgtcgtcagatcctatatattctccgcaattagggcagtccccttcatagattgggttcacaaattctccacaatgtggacaaaatacatcaataaatggattattcatttttcttatccccttttcaagattttatccgcatccagcccataggcttcgatgcactttctcaaatacgccggattcgcctgttcggtcttatacctctcgtacttatgcttctcgtaatactcccgctcgaatttctcaggcggtgttccgtagcgtttattatatcccttatactttgctatggtatttggcggattcaggatctctattttcctgtcatggacatatatccccacggcaacctctttgcagaattcctcctccgataccgtttcgtcaccccagggtccttcgttccaccccgtaaccgcaatgatcagattcagataaggaaatgcatagagcagtttataccattcttcgataaattccctgaccgtggggtatttttgcgtagtcgcattcgccccaatcgttccatccgcacggatccagccatatcccgtgggataatgattcttctgaatgagacagttctcaaaattcacacatccgatataatcttcatggctgcgaacagcactcacgtaaaaatttaaaaatctgtccgtccttcggataatatcaaatgcctgctctgccgttacgggtactcctctcatccggtaatagggcctgcggacatttcgaacgggattgactgactcatccccggcaatagcgatctcaatttccgaatgcttttcataaacttctttcggtatcagccagacaatagcatcgtctgctttattgctgatttctatggctccggaaataattttttcatactcccattccttcgtctccatataggtattcccgtattcatccgtatatatcgccacttcacaattctttttcagataatcaaatattgtcattttctattccctcatctgatgtaactgtatgtgttttctgcctccttccttatgctgcaatcatagcataagaaatcatgtaatcattcactatatctagggctgcgctttctggccgcaaaaagcccatcgattattattcatcgacgggcttttccttctcttattctcttatttctttatcaggattcctttaggatctcctgcaggcttctcggttcgtaatccatccagggtttcatacagccgacattgcaggcccgtatggggctgtcaccaatatggcggcagtcgttatccttcatccctgccagacatttctgaaaatattcgtcctccgggctgttgtgggtgtgtccgtagagcagaatggtgccgcggctcatgtgcttccagctaaagatcgggtaatggcataataccagctcatagcttttaccggctatggagtcccgaatctccttataatcacagacttccgaaaaaagctgtcggtatctgaggtcggacacgtcatcgtgattgccacggatcaggaccttttttcccttcaggattgccaccagagcgattagatcctcgttcttaccgcgcatgctcacatcccccaggatatacacggtatcgccgttattcaccttttcattccaccgttttacgatctcggtgtgcatttcctccagatcccggaacggacggtcatcgaaacgtattgccgcttcatgaaacaaatgcagatcactgatataataattcatattgttccctcccgttccacattcgctacagataaaacatctcaatagttgagcgttctcattatcgtttcaaattctaattccgcattttcatccaacagttttgcgcaaaacaaaactttattcttagaaaatccaaaataccatatttcatcctttggaagagctgctccattttcagtctcagcagcacttaattcccatgcaaccgcaagttttcggattttttcttctttcctacctaattgtagctcactactgctctttagttctgcatgctgacctaaatatacttgcacaaattcatctgctgttgtctcccgatcaatccatgatggttctgcaaattttgaaatttccacatttgctatttcccggtcttgatataatagtgtgaagttggcataatcatctctaatatcaatttcatttattgtccaaccatcatctggcgtccatgatgcaatattattaattggctctgttttacttttacagcttactaagctcaaacataaaattgcaataacgaatatcagtttttgtttatatctattcttcataacttagcagtacagcctccttttattgggaatatcgttaatattcctttttccgttgcatgcttttcccagtcattttccgtcaatatctctagcggtaataatctctgtggaccgttttcatcctcttcatatccccaggagtatccgcccaggaatttcagtttattgctattcatgcgggagggcagatctactagataggtataagctgtccatttcaaatgtctacacccagccaaattacaacagggagcatcaaatatttctgccggataaccatacgcaaaatatggattcccttttcccagattttcatcactgacatctatggaaagctctctgttttccccataattttcaattctttccacgaattgaataaatccacaggatctccgataaccggtcgcattcatatgttcaaagtaaccatgcattaccggataacctgtgcaacatattttatctatcggaaatccctgaagggcatcatagccaatttccctgggatctgtaccttgcgtgtattctacggtgagattttcttctattccatgaagtgtaaaaggaattgttattctgctttccaaagaattatcccctccttctatatattctgataaaacggcaaaacatttccccatttctccatgttttcttcctgaatatcaatgatagaaaatactctgtcatatcgaagatctaattccgctgaccaatgaatgaactgttcctttgttgcatcatccatttcattttttatgataattacaatatcaatatcactctcatccgtattatcatttctggcgacagatccgtacaatatgattgccaaaatactatccgaaaaaagatctactaccccttgggtcaaatcctctttcattgtatttgtcagcatactgtcaccccttcgtcttgagaatatattactgttatttgtatacaattatattccttctttttatcattcacaataaaaaataagagaaacacggcatttctaccgtgttcctctcactaattaagtatgctggtggccggacttgaaccggcacggggttgcccccgagggattttaagtcccttgcgtctgcctattccgccacaccagcggacgcatcgcaacgcgcaaaccgcgacgtgcgaatggatggaggtggattcgaaccaccgaagcaaattgcagcagatttacagtctgtcccctttggccactcgggaatccatccatgtcaggcaagagtgccttaacaatgtgaaattgtagcatatgttcacacaaattgcaagatgtttttattattttagtgtaaaagttcagccataggatgacagaagcgacgattgggtgctcgcacacaaagcgtcaattctgtcatcctatgagcagagcgccaatctatgagcaaaagtagtcacgaagtgacgaaaaagcgtgctaacgcaactttgcgaatgacgcaggctgaactgcttcaatataatataaatagaaaggatactgcgacagttgcatcagtccgtaatcggttacctgatatccatcctgctgcaatccggcgatggcatctgcgccaagttcggtcggtgtaaaataccagaacctgtcggaatccgcctggttgtaatctccgttcacgatttcattatccggatagtaataatacagcacggtccaacccagatgttttacaccattcgtgaccatatttacatcctcatcgggggtaccgatcagatccagtgtcttttcggtctccaccttctgctgttcatagctgtcatagcattcccgatagttctgaattcccaggccgaataatactaccagcaataccgccagcacaattctgcttacagcctccagacccttccaggacttcttctccagctctgcagccagttccagcacacggctgctgcccaccgccagcatgacgattgccaccgcacttaacggatacagatatctctgtgccagcatcggtgccataacaacacttaacaaataagcaaatgccaaagttccaaggattgtgcaggctcccactgccatggcatatgtcttgtcagaccagtttctcgcagaaggcttctgcatatgtactccgtctttttccacagagaatacagaagaatccactgccagggtcaccaccagaaacagaatcaccaacgggaatacgataccattcatccctctgccgcccataacaatctccaggctctgatccagtcccaggatctctgtcatccaccagcctctgctgacatttttcaagccggcatagaagaaatatagccagggtgcataacctatgaaaaatgctacgatggccagaacaccctttatccatgttttcccacggtatttgatccatacggccactccggtgaaaaacatcataatgcctacagccaccagtgcataatagtgggaatacgctgctgccaatgcccacagcaccatgcctgcccaggtcttcctgctgccgtcagcaatgactctgtaggaacaatagaagcaacccattacacacaggaaagccagcgcatacatgcggacttccagattgtactccagacatgcctgtcccagaccggagatcatcacaaaaaatgttgccggaagcagtccgaaatgtttccgcacaacggtcagtgccagtacgatcccaatcacgaagggcaccagagaggccagatggaataccggtaccttatatccgaacagggtcccgaataatttcagccagtaataatacagtggcggatgattgtcccagtaatacaatacctgcaaaatgccatccacatccttgtgggccgtattcgcagaaaacgcctcatccccccacagtacgcggtcggacatcatgctgaaattcagacacaccaccagcactgtcaatgccagtactgccaccggtcctatgtatttgcgaaatacgctccacgccttgctgtcggtaatcttgctcaggacgctccggatcttctcatgctttccggctttcgcttcttccacgaacaattccgcaatggcatagaccagcatcatgctgatctccagacatagaactttcactgcatattctctggattccaacagctttctcaagatcgtattgccgtcattgccggtcagcgacaacaggatccagggaatgaccagcatacagagcaggcaggtgagatagcgaaggacatattctcccttcccgatcgtgacagactgtccgctttttttgttattttttaaaatagattgccgccagattccaatggataccagcggcaacagcagggtaataatgatggtgaacatcgaatatcctctctgtcttttgtatttgtaactattcagagccatgtaaatagtatcgaatgagcgtcgaatccttgcattcgtaagagcatttgatactatttatagggcgaagtaaccaccatgagcaaaaaggaagcctcgcagaggcggttttgcgaatggtgttctgaatagttacatatatttattcttctacgtatttcaggatcgttgccgaggtctgtggcatctcgatcagaaccttgcctgccctgatctcatattccgcaccttccatgcaatacccgtcatccctggactgcaggatcactttcatcttacctgtcttaggggttccgatctcccacacatgaatctctttggtgatgggatgataattattgttgatcaggatcgcacactgccccttgcggttaaaacgtccgtaagaaataaagttgtagtcattctccagcattttcaaggaaccggtccgcagctcctcgttctcccggcgcagacggataatgtccttatgaaatgccagcagcacctgatcctcatgtccccagggatacgttctgcggttgtcaggatctgtgaaaccacagacaccggcctcatctccgtaatagattgtaggagcacccgtccatgtcatctgaatcacaacgccttcccggaagactgccttattgataccctgttccgcagcctgcggtcccagtgtattggtacgtcccaccttatgatttgttctcgtcagaaaacgggaatgatcatggttggacagttcattcatagccacctgccagctgggcatggagaaactggaggtatgatgccgcatggctccccagaagctctctgcattgccgagcagatcctcccggtagtcatcgctgtgcttctccataccggtgaggaaccaggtcacgggctccatgaacgcatcgtagttcatgacagtatcccattcgttgccctgcagccagtctctggtattgccgtagtgctctgccagaataatggcttccggattggcctcttttaccgctttccggaattcctgccagaaatgatggttgaattcctgactgtgacccagatcagctgccacatccagtctccatccatccacattgtagggcggagatacccattttttcgctacatgaaggacatagtccatcagttcctgggatccctcgtagttcagcttcggcagtgtgtcatgtccccaccatccgtcataggaattgttatagggccatgctgcctgattgtggaaatcaaagtaattccgataagggctgtcagcactgacataggcacccttgtcatatccttccgcattctcatagatgcgctctctgtccatccatttattaaaggaaccacagtgattgaacacgccatccagaatgactctcatacctctgcggtgtgcctctgccaccacctgagcaaacagctcgttgctggcttccagattcgctttgttagtcacacggtcgatgtaacgggaagcgaaacggttctcccgctgtccgtcgggaagcagatccccttcatcactgacaatctttccaatatgaggatcaatataatcataatcctgaatatcgtatttgtggttggaaggggagacaaacagaggattaaaataaatcacctcaactcccagatcctgcaggtagtccatcttatccagcacaccctgcaggtctccgccgtagaactcacggacatccatctgtgcgggataacgtccccagtcctctacgcggtgtaccggttctccgatgtagcaatattcattggtcaacacatcattggaagaatctccattgcagaaacgatccgtatagatctggtacataaccgctcccttggcccagtcgggggtgtggaaaccgggaatgataatgaaatcataatattcattaacttcctgcaccagaccccgcatatcaaagatgccggtaattctgccggtctgcacctcaaaataataagataccttctgatcatccagacgcattacgtaggcataatagtcaaaatcatttttgctctccacacgtaccataagatgcttctgtccgccgcataccaggaacactctgtccacattatttctggcggtccggaagcggatcgtcacttcggaaaaacaggccggctcttccggaatcacatattccgcactggtatctgtaaaaagtgctctcctgttaaatacaggtctcatggccgcaatgtattgctgattatattctgttcgacgtaatcgctccagatccatcgtatctaccctttctgagactaatgtcttactatctatattatgacactgcttctgccaaagtgctttgttgtcttgtgcgctccggcagtatgacatgtcccaagctcaaaagctctatttattataccctttttccttacatctgacaactgcccgcctctttattcagcgatttttagacagtaaaaaggacagtcttgggaggactgccctttttagagaaggtatttctttcttatggggtatagcaaaaaactatataatgtattgggggggttacgagtattataatagcatgcactcctatttttgactattctcaaaattcacaaatatcacaaaagtgaatattcatttttgtatatttttcacaaaatcggtttgtacaatactaccaattccacgaaactcccgcgaaaaccttttcctatacgaaaagaccctcgaattcttctctggtgatcttctccttctccaacagcagctgtgcacagctatgcagcacatcctcatgctgtaagataatatccttggctttggtatagcagtcatctatgatgtgcttgacttccttatcgatctcaccggaaatctcctcactgtgcgccttggcatgtgccagatccttaccgatgaagacttcatcatcgtcatcgtcatagcagatgacaccgatattatcagacattccgtaacgggtcaccatacggcgggctgtcttggtggctttcttaatatcactggaagctcctgtggtgatatcaccgaagatgatctcctccgcaatacgtcctcccagagataccatgatatcctggagcatacggctcttggtggcgaacatctcatccttttccggcaggggcatggtataaccggcagctcccactccggtcgggataatggatacggtatagaccggtcccacatccggaagtacatggaacaggatcgcatggcctgcttcatggtatgcagtgatcttcttctccttgtcggaaatgatacggctcttcttctccgcaccgattcccactttgataaaggctctcttgatatccttctgtgcgataaaggagcggttctccttcgccgcgataatggccgcttcgttcagcaggttctccagatccgctccggtgaatcctgcagtagtctgagcgatctgctgcagattcacatcatcccccagaggtttgttcttcgcatgtactttcaaaatctcttctctgccaccgatatccggggttcccaccgctaccttacggtcgaaacgaccgggacgcaggattgcaggatccagaatatccacacggttggtggccgccataacgataatgccctcattgacgccgaaaccgtccatttctaccagtaactggttcagggtctgctctctctcatcgtgtccgccgcccataccggtaccacgccgtcttgccacggcatcgatctcatcgataaatacgatacaaggtgcattatgctttgcttcttcaaacaggtcacgcacacgggaagcgcccacaccgacgaacatttccacgaaatcagatccggagatgctgaaaaaaggtactccggcttcgcctgccacggctttcgccaacagggtcttacctgttccgggagggccctccaacaggacacccttggggattctggctccgacaccggtgtattttcccggctccttcaggaaatcaacgatctcctccagttcttccttttcctctttcagaccggctacctgagcgaatgtgacactcttgtcacccagtgtcatcttggcgcggcttttgccgaagttcatcatcttgccgttaccaccgcctgcctgttgggcattcatcatcatgaacaggaaaattcccaccgccagcacgaccagcatcggcagcatataggtcaggaaccagttctccctttcaatgtcattgaccaccggatcaaacccatactcacgtaccagggtctccagttctgtaatgtccgttgcgtacagcttatgagatacaccgttcttcatctggatctccagatatccggtaggtgcttctccgttgggctgcaccacgacttccgatacattgccggcatccagatccgtaatgaactctgccttggtgtattcatctgtacggttgttcaacaggttgaggccgaagatcaccagaagcagaagtatgataaatataaaatatgaattgattgttttgccgttttgtttcaacttcacgggcctcctacatctttgtatcgcttaatcgaattctaccacaccgatgtaaggcagattacgatatctctgatcataatccagaccatagcccactacaaactcatcgggaatattaaatccggtataatccacatggacatcgatcactcttctctcgggtttgtccaacagggtgcacagacgtaaagaagccggacctctgtccttcagcatctccagcagatagctcagggttcttccgctgtccacgatatcctctactacaataacttccttatctttcagagattcgtccagatccttcacgatcttgactacaccgctggacttggtatcgctgccatagctggatacggacataaagtccagagatacgggaacagtgatacgctttgccagttcacacatgaaaaagctgccacccttcagtacacatacaaggtgtacctgcttacccgcataatccttgctgatctgctcaccgatctcctggattctcttatctacttcctcttctgtcaacagtactctgatatgctctgccattttcttttgtcctttcgcttttaagcgaactcctttcttattaattgtacctttaaaatacgttttgtattctccgttactttataatattcgctgatacggtatcccacgacccacagtacatgctctccctctgccaggatcggcagtctgtcgcgttccgcctgtgggatcttttgatcgaccagataacttttcagcgatttatggatcatcccgcctctgccgtcagcaatggtcagataatcacccggctttcttgtccgtatcaccggacatttttttattttatcataatcaaaccatttcgtatactgatttgtgggaacttcttggtttttttcatgggcagcggccaggtcacacacacagtattccaccgttcccacttcacattccactgtccctgtctgtccgggagaaagctgcagagttggttgatatttctcagccacttccgtcttctccaaaagctccctgtctgtcctctctactgtcagcaggacttcctcatattgccgtctaccccggatgccgaacggaagacagatctgccggttgccttccctggtaaacaaggtcagcagctcctgaatatgctggtaagtgatgtctttctgcccgggagacaattgcttcacttcttcatacaagaggcgcttacggatcacaggatgcaacgacagaaaagactccacagcaatacagatcaccgcgttccggctgtcccccgtctctgcggactctccgtcaccgtccgttgcccggatacatcggccagctgcttcttttgtctgcagttccagatagtcctccgtctccgccagcagctccgccgtctgattcatatgcgctacacagccctttacaatattctcctccgcataaggcaaaatatgatgccgaatacgatttcttgtgtagtcatcctcctcattggtggcatccttgcaatagacaattcctcgctgttgtaaaaacttctcgatctcccaccgttccagacataggagcggtcgtataatccgatctctcacaggcataatgctggccagtccccggattccactgccccggaacaaatggaacagctgggtctcgctgcggtcattgctgttgtgggccactgcgatcttcgtggctccccactcctttgccgccttttcaaacgcctcatatctcgttctgcgcccggcttcttcctcagagattttctccatgcgggctctgttccttacctctgccctggtcaggaaaaaagggattcctctctcctcgcagagctgctccacataccgcgcatcttctccggcctccgcgcgaatgccgtgatccacatgcactacggcaatgtctgtaggtacttccttctgccattccagcaacaaaaataagaggcaaaccgagtctgcccctccagaaacaccggctaccacacggtcgccggcctgcagcatgtgatgctctctgatatatgcaaatactttttcttgcgtatccatccatgtattcatgtttttactctatcctaattatgaggaaaaatcaaggcggcatcacgtgttttcccacaggcagagcacaaataccgtcatatcgtcccgaatccgtccctctgaggcacagatggcataggacaatattttctctgcgatctcttgcgggttctgttcctgcaacccttccagcacctgtgccatgcgctcttccccgtcttccatcatatccagaaccccgtccgtcatcatgaccagcagatctcccggccggatctgacacatctgtcgttctatctgcactttttgaaaaatacctaacggcaggctttcgccgccgacacagagaacccttccggaggtcttccagaacgtggcaacaccgcccaccttgcagatctcacattcgccggtatacagatccaggctgcaaaggtctatcgtaggatgatcgtcctcttcattttgcgcatacaacgcggaattcaggagattcacagatgcctcggtcccgaagcccgcctccagcattttttccatgagatccatgactctgccgctgccccggctggcatcctccccggagcctgtcccatcagacaacagcaggatcagcttccctttttccgattccatggtggcatactgatcccccgagactttctccccttcttttaccgcccggctcacccccgtcagtgctatgtatttcggttcctctgtgaacagaaaacaatgcggctcctgctccacgagataagggcttcctgaagagacctgcagcttttttcccaataataccgtcagcatgtccgccacctgtgccgccttatagtgccttttttcggtggacagtgtcatactgatccctgcttctgtcccggagctgctgccgtccttctccacatagcagaggtctctggcgatgatcccttcactcttgagcgcctgtaccaggcttttcctctttttctcttccagcggacaataccccagttcctctcctgccacccgttccatgatccgggccacttcctgcagatggtctcccatgatctgtctgctctgccacagcatacatttttccagaatattctgcctgtcctctcctgtaatctgtatctcctgccgaaagctcttccccagttcctcaaaactctccgcatatcccatcagtttctgtctgcacagcagtgagatctgtgcacactgttctctctccagccgttcctgctcctttttccctatgatcatggcatcctcccctttctgttttcacgattatagggcagttttcctcttccttttgtcaaatcgagggagggaaagacttcattttttgcgacaaaaaaagcaggttcactgttgagaaacagtttccctgcttaattgtcttcctgaaaaaggatctcaccttcgtataccagtcccagcttatccttcgccacctcttccacataagctttcgtctgagtgtacttaccgaattcctcgatctgttccgctctggtctgctctgcttcgatctgcgcgccaaggcttgcgatctgggtatcatagcccgcaatcttctgttgtaattccacgctccgcaccgcaacgaccaccatgatcatcaacacgaccagggtcaccaggaacatactgaaccggttctggtgtctcttgcggtaggctgcttttcttcttgccatacgcacatctccttttaatgaacattttaagcattttcctaagtatagtcaactgctttttcagccaatttcccgttatccgcaaggctttccggattgggtgcagaagagtattcaggcccagtgccacatactttacaaaaaagggactgattgtcctgtgatacaggtacattcccgccaatgcccccagcacagcaaaccatcgcaggttcccgttactttcatgaaacatcagcagaaagacctttcccgcacagtagatccagaatgccagatcttccagagataccatgctggtactgtgagcaaacactcttcgcaggatccgcagaatatcatacagaaaagtgatccccacacccagcagaaaggaatgcagcagaaaaacattttcatccatcagcggaacagcctgcccaggaaggattcctgtttttctccggatgctgcggtatccgaatatacaaggctgtcgatccggccgtcaatatccacttcccccttgtctaatgtcaggcggttcacatggagctcgttgccacggatcatcagcatcccctgttccgtctccagcaggatctcccgcagatcaaaggaaaggacgtcatttaccccattcacggtacatgtccgtctgttggtcatggtcactttatgcatacgtcctgtcgcgtttaaatcttccattctctccatagcctcccatcctccgctccttccggaaccggacttacaatgtattgtatgggaaaatgtggaaatttatacatagagaacctgatattatatataacggaaaagttctttggcttcttcttttttcacggtctcctgtacatccaggacctcgacttttacttccttgttgccgaaagagatggaaatgatatctccctctttgacattggcggatgcctttgccggcttatcattgatcagcactctgccgctgtcgcaggcttcattagccacagtacggcgcttgatcagtcgggataccttcaaatatttgtctaatctcatgcttttaacctcacgatcatccgtttctgaaaaacaaaagagacccgaaaggttgtcctatcgagtctctgaaaattcagcttctattatgcgttcagcatatcctttaatgccttaccagccttgaacttaggagccttggaagcagcgatcttcataggtgcgccgctctgaggatttctaccctctctagctgctctgctggatacttcgaaagtaccgaagccaactaactgaaccttaccatccttctttaactcttcagcaacaacatcggtgaatgcctttaatgccttctctgcgtccttcttggaaagacctgcctgatcagccatagctgcaactaattctgttttgttcatattgaactcctcctgtaatgagttttcgttattaattttacgctcgaaaatagttcttttgaaacgtctatacatatatatatctgtttttatcccttttgtcaaggtttttccgcatatttacggcatttcttcccctcccggaaaggatcattctgtcgatgaagaactggccgtcaggtctacaaatgagtaggatacatccttttcttcttcatccacctgtaccgtataacttctggtttcataaccggattttcgcagggtgatcacatgacttcctgcggtcttcttaaaactgcagggggaaattcccacatagttgccgtccagatatacctccacattttccggagcatcaatatgcacgcggtaataggtcgtagtcgtatctgcggtggaggtagattccgttgcggaagagctggaagaactgctgctttccgtactgtcttcactgtcagagtccgccttatccagctggacatccactcccgcggattcctgtcccaccctgagatactgtgtaagcgacttatagccgtccgcctttgctataatctggtgaataccgtattccaacgtgatcggctgggaagcatccacctgacttccatcgatatacaattctgcatcggaaggattcagcgaaaacagcaccataccgtactgtgcctctgccacttccagatcaccgatatccagtgttgtttcctcgttgcggttgattacgacatttttcgtgccaccaccgccgttatagctgatatctacctgatagcttccctctgacaccgtcaccagcatgtcctctgtgatccgcacgatctgtgtctggccgatttccagccagccacccacaaagttctcatcgttgaccagtctgaggtatccatggcctttttccactgttacgctgagcactgtgctgtcaatgccgtgaaatgtcaggatatccgccggattcagatccattttttcaatgctgtgtccctgggaaaaatactgggtatccctggacaactggaacacctcttccccgatggccacctcattccgtacggtattcatctcgtagtgctctacatcgtcatactgccatgctgtctgcgccagctgcatggaggtcagatgcttctgacttttcaaaaaagtcacatccacgatgtccccctcctgcagctgactcagggaaattgcctttccatatttatctgcgaaccgcgttgttccgtccatggacagcgtgtaacgtttgcctaaatccaaatttaacagtgtgacagtgttgtcaacattattgatatccaccagtaccgccgtatctgcggaatcatagctgtccggattggtgacaacaaagccggtatctatccgctctgcctgtgccgttggcgcaggtgttgccgccgtcccggaggattctgtctgcccgcatccagcaaatgacattgctgtcacaagcaaaaggattaccactgtctgtttcgttttcgaatactttttgtcttcgaatcttttcaacgttttgcttctcctttgtcttctgacgctgcgatcctgccgcaacgtctcttccgttgtctgccgttcattgcccggcttttatctttgcagcagtttcaggaatttctttctggccgcttcctgttccaacaggcggtccagtttctcctgattcttctccgggatccaggccttgccggaattataataaaagtttacgatcttccacaatttctcaggataggacaggcggtagaccagatcctgtctctcatagggctttaacggtctgacactttcataagccgccagaagcactctgccccattcggcatcccattcacttttttccaaaagctttcgcaacagcagatacaggtctctcaccggcccgtctgcctgacatttttcgaagtttaccaggaaaaatccacggtcctgccgcagaatattatgatattggtaatctccgtggcagaaacacagcggtacttcctctccgctgtcggaggcagccagctcgatctctttccattcttcacacagttgtcttgcttcctctaaaaaaggatcaatcactgcagacaaccggatctcgaaccaggtcttctggctgcgctgtttcaagaacctgcgggctctcttgagctctcggttatgcttctcatagtcccggctggggagatatctctctatgaccggtgccgaagtctcctccgtctccggaaatacaggtgtaaattccagatcaccgtgcagtctcgccagaagccgcatggcttccatacattcttccctgtcacggatattacattctcggccttcccaccaggtcttcagaatatatctgacaccgtcccggtctgtcaccgataacgcgccttcctttgtggcaagcaatcgctccgcaggaacggttccccgttcctccaggtgcttcaggacctgctcctgcagacgcagctgttcctcgcgtcctgtatattccttgaagatcaggcagccctgctgtgtatcgcacagaatcgctccccttccttttcgggtacgcaatacttctatctcatactgctccagcagtgccactgctctgtcattcacttacaatccctcctaagatacgtccttaaccgttttccggttcctacgctatcttatgaggaaagcctgtaaagtatgctcaatctttgtctgccgacagttcctttaccttttccagcagctgttctctggtattctgctcgggatgttccaataccagttccagcagctgttgcagcatctctcccagctctctgcccggtttcataccggtgtcgatcagatccctgccggtgaccgccagtgttttcagggagacgcactgcttcttttccagcatttcctgatacagtttcttccagagttcgagattctccagtttttctgttctcaggtaatcgctctgtgccagaatatctgcccgtttcaccgggaacaacagtgggaaaatatcttccccgatcttattcaccgcccggcggacaatccgcagatccggtatcacatcattgccataatcatggtatctcaccagacgggtgaccaccgcaacggtatcattatcaaatcgcagtctccgcagaatcttccgcgccatctcttctcccaccgccggatgtccgtagaaatgagtgattccgtcttcatccacagtaagtgtggccggcttgccgatgtcatggagcagcatggcataacgcagattcttgtccggcccgatctccataagtgcatgtaatgtatgctcccctacgttgtatttatggtgcttatgcttctgcggtgtctccatcatggcatcgaattccggtaggatcaccttggtgacacccatgtcataagcttctctgagggtgtcgggatgaggggacaccaacagtttagtcagttccacctgaatccgctccgcactgatcttctgcagggtcggtgccagcttccggattgccgcctcagtatcttcgtggatctcgtagcccagctgggctgaaaaacgaattgcccgcatgatccgcagcgcatcttctccaaaacgttcctccgggttgcctacgcatcggatcagcttcgcctcgatgtcttttaatccgccgaaaatgtcgatcaggccttccgtttcattataagccatggcattgatggtaaaatcccggcgtttcaggtcctcctccaggttcggagtaaacgtcacttctttgggatgtcggctgtcttcgtattttccatctacacggtaggtcgtaacctcaaagccttccttgtccagcatgacggttacggtgccatgctggattccggtgtcgatggtgcgacgaaacagctgctttacctgctccggtctcgccgaggtggtgatatcccagtcctccggggttctccccagaatggaatcccgcacgcagccgcctaccacataggcttcaaatccggcattctgtatggtttctatgatatatttcgctttttcaggtatttgtatctgaatcatatatatcctcttttgcaaaaatcacacacgctcattgctctgtgagttttcgcttgtgactgctttgtgtctattgtttgtttctaagaaaggctatgcctgctccgggttcatgatgaacttatcgatgacttccaccagtccgtcttcatcgttggtgccggtgatatagtccgccgcatccttgaccgccggctgggcattccccattgctacgccggttcccgcatattcgatcatggagatgtcgttgtaaccgtccccgcagcagatcgcattctctctggtcagtcccatgccttccagcatatgatccaaagaagtggctttgttcacatctttcggcatgatctcgatgaaatagggttcggaacggtagatgcttgccacatcgctgtatttttcctgcagctgtttctccagctccggtgcgatctcttccggtgctgtcatcaggcatttattaatatcgaaattcacatattcgacgaaattgtcaacgacctttataggaattccgttgattctggcttccagctgcacatagtcatccggctcgaacgcagagatgacgccgggaccctgataagtgatcagtccgcagccattcgctttgccgaattcgtacaatccgggcacaatggacaggggcagtgttctctgatagaccacttctcctgtcttacactccacgatacgggctccgttaaatgacagtaggtatccgccgtattttttcagttccagctcctcttcgcatttccgcatgccgggggtgggacgacccgaagccaggatcaccttgtgaccatgctgtaaaatattccagattccctgtttggtagcttccgtgatctctttttttgaattggtcaatgttccgtcaatatccagtaccagaactttttcctgcatgtttattcatacctttctcaaagttattctctgttcagctcacgtaactggcagagtcacattatcatgtttcccgcccttttgcgactatttttgctcataacctaacagtacctgtctcttctgcttgtgcagtgaaacaggtacttgtctgttgtctatgttctgttcctgagcaagctttactgtgcctgtgttgcggtctcttcggtagcagcagtctgctcctcggtgatctcctgggtctctgcggtcgcggtctcagcggctgcggattcctctgcctgcaccttcaggtaattcagtttacccttgggatcctctactgttacatctgcggtaatatcctgcatatgctgactcattgtatcggataccagcgtattcttgatgttgatcttccactcgggctgatcctgtccgatgtagtaaagtacataggtggtgtcactgacagtgatggctacggtatctcctgcctgacggctgttgtcgaagatccagttgctcagctcctctgtcataccggtcttggtcacctgctcgaacagaccgccgttctctactgcagaagtatcctgtgtatacttcttgcacaattctgcgaagctgtcctcggtagctgcaccgctcttccactcctccaggatctcttcaccggtcttatcctcggtgggaatgatcacacgtacatctgcggaaggagtctcatccagatatctcttctcaaatgccacggcatagtagcaatggctgttgtcgttagtaatgacggtggtgtctcctgcctttctggcatcatcgaacagccagtcggagatcaggtagttcacggaagacttcttctcattctcgtgtgcttcgccgtcttttgccacggtcttctccgcatcatctgccagtaccttggcatcttccatggcctttgcgatctcagcatcggaaggctggtaagcggtatcggtgctgtcggaagctgttgcatctgtagctgccgttccgtctgttgcagtggtatcggtggttgcagcagtctcctctacgggatctgccagttcggtaggttctgtaggcaattctgcctcaatggtcgtcaggcgatagtctacggaatcgtaggttgccttattttcctcataatagctctggatctcatcatcactgggagcattatcctcctgcagcttctgataataagcgttcattaccatgtcgttcttcacatattcttcgatacggcccatggttgcatagcttccgtagatggaacgtacatattccttctcggagatgcctgcggatgcagcggaggttttgatggtctccttgaaagtgttgtactcatccgtggtatcgtaggtgaagccggctgctttggcttctgccatcagcgccttattctgcttcaggctctctacagcattctgctcaaaatagtcctgccaggtcagagtatcggaatacatctgggtggacagatccttgctggtatccagtccgaagtatgtcagatagctgccgtactgggtgatataattgttcttggtcaggttgtattggtaatcgaactctaccttgtttacagcttctccattgaccaccacataggtctcatgagttgccagataggtacggatggggaaagatgctaccagacataccagagccacaagcactacgatgccgatggccgtgctgatgcgctcttcctttttctccttttccttctcctctttacgcttctgtaccttacggtcatatttggtcatgaccttctgttctgtttgttctttattttctgtaactttttcattcttagacattgcttacatgtctccttcctggtgtcttaagtcccaatgactccttattttaccgtatttctgcggaaaaagaaagctatttcacatatttttcaagtttttccacgatatttttcacacatccgggctcaaaaggactgtccagtccgacttctttgatcatattagtgtaaaaatcactggcggacagcctgcacagcttcagatagctcttccacgcctctgtaaaatcggcatccatcttcaccttgtactgtagtgcgcaggtctgtgccagacaataatcgatataatacagagggtagtcgtaaatgtgcagctgcttctgccagaagcctccctgtccgaagaaaggatctccctcgtaatccaggtggggcttgtactcccgctccagacggctccatgcctgctttctctcggccggggtcagctccgggtgctcatagacgatatgctggaactcatccaccatacagccgtaaggaataaacgcagccgcatcctccagatgcatttccacgtaatcctgcgctctgttgccgaagaacaggttcatccacttttccgtgaaaaattccatggacatggaatggatctctgcagtctccatgccgatatccgcatgctctctgataggatcctgtgcagcgagatacccctgaaacgcatgaccacactcatgcgtgatgacgtccacatcaccgctggtaccgttaaagttagcgaagataaacggtgcatggtacagaggcagataagtcatgtaaccgccagctttcttggtcttgcggcccaatacgtcaaacagttggttctccatcatgaaatcaaagaattccgcagtctccggggacagttcccggtacatcttctggcctgctgccatgatctcttccggggtgccggtgggcgccgggttgccgtccttgaaatatacctgctcgtcgatatagctgagcttctccaaacccagacgttgtcttctgagggcatgcaacttctctgcaaagggtacgaaatactccttgatctgcctgcggaaagcctctacctcgtccttgccgtagcagttgcggttcatccggtaataccccagttccagataattctcgtaacccatggctctggcctgtgcggtacggtttttcaccagtttatcgtagatggtatccagctgttcctcattttccaggaaaaagtcactcatcttctcccaggcctgtctgcggacattgcggtcggaattcaccagatagggccgtaacagggacagattcagttccctgccgtcgaagtcgatcttcgcaccggcgatgagcttatcatactccatagtcagggaattttcctcctgcatcaacgggatcaacgcctcgctcatggacttctgtgccagttccatgttcttgaaggctaccgggccgatcttttcttccagataagctctgtaaggggatgcaaataacttcttctgataagccagcaccaggttgctgaataccggaccctgctcgtcgtagtatttatgctcctcctcataaaacttgtcggaggtatcaatgtcaaagcggatgttcgcaatggtcatcagcgtcataacacgatccgtcagcgcataatatttcttatgcacctcgaactgttcctccccgctcttcgccgcatccagctcccggatcagttctcccatctcttcctgcactttggcaaaatctattctctcgtaaggcatgtcctgaaatctcataattatagtaatcctctctttctgtgtccttaggaacctatactgcttatcttaccccaaaatgccgggaaagtaaaactttagaagcgttctggaacatttttctggattttttgtagcctttttgtaacatttttcagacttgccaataaggaatccctatggtatggtggtattagaagtaatttttcttctttcaaaaattcttatagacccgtcagtggtcaaagtttcccttattatttattttatatggaaaatatttgttttatttttacatttattttgcaacagaaaggagatttatggagttaaaacaaaataatataaccggcaactatttctcggaggagtatttgatgaatactgtgtcgagattctggaaaaattttgttgcggaagaaatttcgtatgggaatgcgatagctgctgcgccggggaatgtggctgtgtcaataccggcttccggaaagcggaattataaggatctggtgttccggaaaatatttcatgacaaggagaagctgctctcgctgtacaatgcgctgaatcactcgcattatgaagatccggagctactgcatattacaactttggaaaatgcggtttacctaagcttgcagaacgacctgtcatttgtggtggattttgatctatggttttttgagcaccagtccaccctgaatcccaatatgccgtatcgctttttgctgtatctggcaagtgaatattcaaagatgaactcagatgacctgctttattccaacaagttacagatgctggatactccgcatttcgtagtgttttataacgggacggatcctctcccggaatacagcaccctgaagctgtccagcgcctaccggaataaggaagagactcctcagcttgaattacaggtacaggtaatcaatatcaatctcgggttcaactccgagctgatggatgcctgccagattttaaaagagtatgcccagtttgtcgcagaagtccgtgagcaggcaaaggtgtatccaaaccggcaggccatcgttcaggccgtggacgtatgtatcaggagggatattttgaaggaatttttgcttgagaataagaaggaggttattgatatggtgtttttcgaatatgatgccgaggcggaaaagagagttatttataaggatggcgtagaggaaggcagagcaaaagaaattgttcggtcatgtaaggactttaacttgtcaaaagaggatgcaatccacaagttagagactctactatcaatccctacacaatctgccattgactattacgaaaaattttcaaaggaatttgaaaatgaattctcaaaagcacaaaaaattatgtaaaaggggcacattgatatgaactttttcgaatatgatgctgagctttctatttctacacaggcagccatggattactatgataatttttcgaaggaattggaaaggaaatctttggatgatcaaaaggtcttataagaacccaaaaagggcagcccgtcatggactgccctttggttcttacataactcttacagatatggttcgttcctcttaggaaacaacctgatctcagcttaagcttactgtaacagagacagtacgccctggttagcctgattggactgagccagcatagcctgacctgcctgagccaggatgttgttgttggagtacttaaccatctcagtagccatattggtatcacggatctggctctctgcgctggtggtattctctacaacgttatccaggttgttgatggtgtgctccagacggttctgaacagcaccaagtgcggaacgctgagtggataccttctggattgcagttgcgatagtcttaacagccgcatcagcattcgtggaatctgtgccatttacctgcagtccgtttacaccaatgcccttagcgctcatagactctaaggatacttcaatcttgttctcagcggtggtatcagcgcctacctggaagcttaagatcaaagctttctcagaagaactcagtgcagtgcttccggatgctccaattgccagtttcactttaacttcagcctccggatcaagatcattcaaatttccggtataattacccgttaccgctgcattagtattctcgttctctaattgtttgctaattgtagcagatcctttgaaattagcttttgcttctataccataggtggttgtaatgttagcaattgtatctgtaacttctgtaccatcttttaaagttactgtagcattggttccatcagatgtaattttagtgacatctttagcctttttctgtgctgcaacatctgcaattttaaaattagtattatcacttgatactacttttacttttccaatagtaatttcagcaccatccgtcaatgtagcctccgtgttaccctttgctgctacagttactccatcaaccgttcctaatacggcgcctgccgcaaaagtcttctgattgccatttgcggttgcgtcaccctttaacagataagtctcgttgaatttcgtggtttcagatacacggtcgatttcatttacaagctgatcgatctcattctgtacatagtttctgtcatcagcagacatagtaccatttccagccttaactgccagttcgttcattctctgtagcatatcgtgtacttcggtcagagcgccttcagcggtctgtactgcggagataccgtcctgtgcgttcagggatgcctgtgtcagacctctgatctgctttctcatcttttcactgatggacaggcctgctgcgtcatcagctgcacggttgatcttgtaaccggaagacagtttctcggtggattttgcctgagaagcggtggtcagacctaacattctgttagagttcatagctgtaagattgtgttgtactaccataataatttacctccttgtattactgcccaattccttttgcggcagtgtgcgtatctgtattgttattgagaaatccttttctcccagatacttgttgttagtttttatagtaaccggagtaggagcttccctgtcgggccctgacagagccgctcttcctccggttattaccatatgaaattatttgtccgcatttccctttgtgatgatcacatttgacttcttgcggtacttctccgggtgctcttcttccgcataatatttaggaagcttcgctctctcctccggatctgtgatctggttttctaataccgtgcttcgcacgatgttcacctctctcggtgcatcgatcatgatacggagatgattcttggttcctcccaggaagacgatcttaatattgtcattgatcatcaggtattcttccggactaacggtcagacgcagcatattgataacctccttgttttaattcagccttccttgcctgctggtttgcactgatgcaacattttattatggaatgttgcattatcctaattcatttattctttcaaggaggccattatgagcacgacacaacctatccgcagcaaacagcttttacacgatttcaaagattactaccttaccaaacagcccaactcccggaattacactctcatcctgatcggtctgaacactgctctccgcatcaacgacatccttcatctcacctggggagatgtctattgcacaggacacagccgcttttacacccatctcctcatcacggagaaaaaaacggaaaaagaaaccagaatcctggtcaacagagaacttcagaaaacattactgtcctaccggaaaacacagccttccatagccgacacagactacctcttccccagccccagaaaagccgaatccccactctcccgatatcaggcctaccgcattgtccgcaaagctgccgaggccgtcgggatcgaagatgtgatccggtgtcactctctgcggaagaccttcggctatcatgcgtggaaaatgggaacacctcccgccctgctgatggagatttacaatcattcttcttttcagatcacaaaacattatctgggaattgaacaggatgacaaagatgccgtattccgcaatatacagctatgatatgtgttactttaaaccagtatgacgatatgaataatacgatatgacgatttttataaaaaagactaaagttttcacatggtcagccgaaatatgtagtgcaagacaaaatgcaacattccataatagaatgttgcatttttctattttaatcctttcatttctgtggtattctttttaaagactgcatatcgctatttttcgacaaatattttcttttattgaagcatatacagtcagaatcaggagtacacatgaaaagctttatatgtcaaatgttctataagcagcgggcggcattcgagcaaagctgcgcttccaggggcaaagagtatcctcttccggaagacgttttcctacaatcggatattttctatgacgagaagcatgttccggcccatcgtcttgatgtctaccgtcccaggggacgggacggagagattcttccggtcatcgtcaacgtacatggcggaggcctcctcatgggaaataaagagttcaaccgtcccttttgtgcctccctttgtgaggcggggtatctggtattcagcattgagtaccggctgataccggactgtctcttctatgatcagctggctgacctgcatctggcactggattttatccgggatcatctgacggaatacggcggtgacatttctcacatatatgcctgcggcgacagcggcggtgcctgtctgctgacttatggaagcgccatgcagcgaagcactgcactggcacaggctgccggagtaaccccttctgacctgccagtccgggcacttggcctggtcagcggtatgttctatacgaaccgcctggatcagatcggacttttcctccccagatatctctacggccggcattataaaaaaagtgcttttgccccctatgtatctccggagcacccggacatcgtgaccagcctgccacccagtctcctgatcaccagtgacaacgataatcttcagagctatactctgaattttgaaaaggctctgcgcagacatcagatgccccataaactgatcaactacccgaaggatccccgcctgacccatgcgttcagcgctttttacccggagcttccggaaagcagggaagtgatccaccatttgattcatttttttgaacataccggagatgactgtaaaggaggatatgtatcatgacatacgacgaaaatgttttcaaagaaaaagctaatcggaaagcccgtaagatctggatcgtttttgctgttttactgagtgccaactatggctccgatgcgtccgggggattatatcccaccacttcttaccttatttttctggcattgtgctggctgcctctgatcttcggcgaagtgctgttacgtgtaaagggctgggcaacggaactctaccgctacgatctggtcatcggttacggcatcttctatacctttgtcatatgcaccacagagtcaccgatcgcattcacttacatccttccggtgacaagcttactggtcctgtataagaaccggaaattcatgatcaactgcggtatcgtcaactctctgatcattgtgggcgctgccgtctaccgctacatgctgggctttaacagtgcttccgatatgaagaattaccaactgcagctgtcctgtatcatcctgtgttacatctgctatgtcatgtccatccgccatctgaacgagtccgacggtgccatgaccgacagtatcaaagccgaccttcacagagtggtgaccaccgtagaacaggtcaagacatccagcaataccattctggacggcattaccgttgtcagagaactggcttccgagaataagcacggttccgatatggtcatgctgggtatgaatgaattgacggataataaccatatgctgcaggatcggacaacctcttccacacagatgacttccgacatccgtgcccaggtggaaaatgttgtggcactcatcagcgaaatggtatctctggtagggaaaaccgaatcccattccagtgtcagtgcaaaagatctgcaaagtttggtaagcactgccaccacgatgtcagagctttctacggagctggaaaatgtcctgcagaatttccagcaggaatttggcatggtgaagcaggagaccggtaccatcgaaaaaattacaaatcagacgaacctgctggccttaaacgcttccattgaagctgccagagccggtgaagcaggcaagggcttcgcagtggtagctgatcagatccgtaccttaagtactgaaacccacgcttcctccggacagatcagagaagctctgtcccgtctggatgctacttccgctaagatgaccgcttccattgaagagaccttgaagctgatccaggttaccctggaaaaggtaacacataccggtgaaaatgtaaatcagatcgcatctgattccgcacagctcggcagacatattcaggtagttgataacgcaattaaagaagtcgaaagctccaatacccagctggtatccaatatggaacaggtatccaacatcgtggagactatcaccggctgtattgcacactccagccagaccagtgagcgtatgctcagtaaatacgaagaaaccgcttccaatatcaacaccatcgaggatgtcatggagaacatgatgtgtgatctgggtatcggcggcttcatgggtatcgaagatattcagccaggtatgaagatcgatctgaaagtagccggccagggagatacggaataccttggagaactgatcgaacagattccggagggtctgctggtatcctgtcagaaggagctagcactcacagataccgcttcctgtaccttacagatcaccgcaggcaacatcctgtattgttgggacaaggcagtcatctctcccgctcctgaaaagggtgctcatgccttcaaaatcatcattaataccagacccaggatcaataaccgccgtaaatacccccgtatggatctgaacaatgcctgcaccatcaagttcaaaaattctgatacggaatatgcggccaccatggataatatcagtgccaacggctttgctttcctggcgacagacaatatcttcacccagagcaagaatgcctcgatcactgtcactatccatgatttcgccctcccggatcacaatgtgctggaaggacgtatcatccgctgctccgatgataacggtctgttcatcgtaggctgccagatgccggaggataatttctatattctggagtatgtagagaaaaatctggaaagtaagaaatagtcaaatacaaaagggtgccgctgtgcgacaccctttcttgtttggttttatagtttcatctatggcttcaggagccgggcgatcaggccctcgacctcctggagctgttcttttgtgctctccttgtggctttccttgcggtacttcgaaggggacattcccttcatagcgtgaaaggccttggtaaataccagggcatcgctgtatccgcaggacaatgcaatactctcgataggataattcgtggagtccagaagctctctcgccttggtaatacggaaggtagtaaggaactgctggggagacatccccagatagttctggaacagcgtatataaatagctgcggttgatacacacatagtccgccacatccgtgaccttgatggggttacagtagttgctctggataaaggaaaccgcttttttcacatactggttccccttatcctcttcctctcttgccaccacaccggcgctgtcggcgatcaccgacagaaatactcccagcagtccgttccgccgcagatcatccgcaatgccaaaggtattatgctccatcatatcccggacaatggaatatagttcctctgatttatcacatgaaaaaataggatgtctgtctgacagtcccatgctgtgtaaatattcttctgcccggcttccggcaaatcccacccacagataactccagggatccttcgcatccgcctgataaaaagccagttcattgggctggatcaaaaaaccgtagcccgcctccagccggtattccttgtcgtgaaaccggaaatgtcccttgccgctcaggacatagtggatcaggtaatgtggcttggaggccggtccgaagctgtgcagcggtgccgtctgggagcatccgcagcagttcacatacagacttcctgttttatcattgacaaaatccagtttaaatgctttttccatgatcggaccgtttcccttctgcgttgccgctctctcatctaattcacgagaatcccgccgttttcatcaaattcgacaccgaaatcccggctgtattcattcatacgctgcaaaattctcttcttatcctcacctgctgccggagtaggcttaaaatcattccgggtggacacagaactcaccatgcagggaatgatcctggcattccggtcctccaccttctgtccgttttcgaatgtaaaggtctgctggaagatcatggtatccttatctgccgggttccggttcgctccgaagcagaaattcgccaggctatagatgatatatctgcccttatattcttcgattccctgaaggacgtggggatgatgaccaatgaccagatccacaccccagtcaatgcattttctgccaagtacctgttggtaattctccggataagtatctttctcgatcccccagtgacaacaggccaggatcagatccacattctgttcccgcagggtctcgatattgttctggatcagcttttctgcctgtgcgccccactctacctcattgacagagattattcctattttcaggttccgctctccgccgtgggctgccgcactgtccgggatctcatagatacccacatttttatcataagcataaatgatcccttcctgctctaatgccaccacagtatcccggcttccctgttcgccataatccaggcggtgattgttggcgaagctgacggcctcaatgctccccagcgtcagcagatgagcataggctggatcccctttgatgcagtaggtctgtccctcccgcatctgttccgatgtagtcagaggcccttccagattcacgatggtcatatcgtccgccgcaaagatgtctctcacattttcaaagaaataaccttcgtcctccgcctgatcataggcctgacggaaggaggcactgtagtcttgttcctgatgatttcccaacgttacatcccctgctgcggagatggtgatcgtataacgttcacccgtcaaatcaccggagtcatggcaagatcccgatgttgttgcgttctctccaccggaagccgtccctgtctgtgcccccgtagcagaatcttctgccgtctgcccagcctgcgtagttgcattgtaaccgccgataggctgcgccagatcttcccttcccggaatgtagacctgctgggtcagatcatcgccacatccaccaagcattatgactgccgctgcacagaacagtgctgcaaacctttgttttcgataccccataagctgctccctcattatcgtagcatgatccgcatctttggtgcttaccgttgcttcgcaactatcatgatcccattcgccgttcgtcaatcctgcaagcacattgactctcatacgtcaattataatatcattccgcagaagcctccgatgtggaagtaatgtctccgtctccgtacagattctcctgcaggaatttcttgttggcttcgaaatccacttccagcactgccatcttacggatggtcgcatccttataggtgccctccagtggaatgctgttctggataatatcgtaagtcacggccttaggtgccataaggctcagccgatagcattctgtctgggtcagattcgtggtcagattcggcatcagaccatcgatcagctcctggggattggtcagcattccctgcggaagcttgtggatcacctctgccaatacctttctctgcctctcggttctgccgaaatccgtaccgatataacggtttctgcaatacgccagtgcctgcggtccgttcaggtgtaccataccgccggaagtatcttcaaaatagtcggtaccttccggtcttcccagcagaatgttgtattccaccagataaccattgacatattccacttccttgctggtcagctcaagatccacaccgcccactgcatccaccagattggcaaatgcttcaaagttcaccagtacatagcggctgatatgaatatcgaaattctgctcaatagtctccatcagcagttctgcgccgccataggaatatgccgcattcagacgattccccttatgtcccggaatgtccacatacatatcacggagcagggatgtcatgtagatcttcttcgtcttgttgctgatggacagcaggatcatggcatctgatctgccgtcttcaccgttttcacgggaatcgttaccgatcagcagaatattggtcacgccttcttccttcatgggagaggacgctaccgactcgatcttctcatagttcatctctccgtagacctttcctaccagcacatacaatcctgctgccaggaatacaaggatcagcgccactgcgatcaggaaacgcttgagtcctgactttttcttctttctgccgctcccggctccctttttatttccttttctgttccttttatccgctttcgtgtctatctcctcacgcttcccggatcttcttccggagcgttttctatcgttataatcgtcctcatagtcctctacatagtcatcccgtctgctgcggcgggttctgcctgaggtctcctgtctgcggtgatcagcgttactgctacggccgccaccgttacgactctctgaagtcttacgtgccgtctctctgcgggctgcctgtctcctgcggtatgtgggatcatcccagtcctctgcatagtcctcacgggatcctgctcttctgtcggatccgatcacatccagttcctcctcttcctcgtcatcttccctcatatcatacatctgcggagccgggcgggctgcctcacgctccgcagagtgtgtccccgcattcgccgccgggcgccccgtactgcggcgggctcccgctccggatgcctgcatttcctgcatctcctgttgtaaaaaggcttccagacccttttgtatatcttccatctcctgaatggagtctctttccttatcgctcatcctgtacctcacttccacatacctgattttgcactcttttattcctattcatcttctaggataataccataatctgctgtattcgtcacgacagaaatccttaaaatttgtttaaatgttatccggtatttcttaagaaacgccaacaagaaagaccatctgcggcagctacacgattttctttcgtatgctttcctcagatggtctctgcatttttgttgacttatgtctgctttatttatgagcaagccttgcgtctatgtaatttttcagagattccaccgtctcttctacacccagcttgctgctgttgatagacagatcgtaattacgggaatcgccccattttaccttacaatgactattgtggtaagactttctgcgacggtccttctcgatcatacgctcttccgcatgacgggcatccaactcatagatccgcataacacgttcgatcttggcctctctgtctcccaatacgaagatagagatcaggtgcggattgtccttcagcacgatttcggaacaacgtcctacgatcacgaaggattctcctgcctctgcttttttcttaatgtaatcgaactgcattctggccacattgtctgccggagagctgttcattcccattacactgcggtacaggaatttattacgtctcttttcgtcgaactcagccagctccttgctgcttacattcatgcttgcagccacctcatctaacaggttgtgatcgtacatcggcagtttgtaatactctgccagcttctgtgcgatctcatgtccgccgctgccgtattcacggctgacggagataatcagttgttcactcatgggtctgccctccttatggctggatgtatttccaaaattttttaaactcgtattctgcaaatacatcttacagatatcttgcatagatcatcagcatagagatccctactactattatagtcgcaggtgccataactttgcaatattttccccacttaatcatatgaccggctttcgctgcggtggcgatacctactacgttggcagaagctccgatgggagttgcgcttcctccaatatcggttcccatagccagtgcccatgccagaatggacaggtccacaccctgggtagcggacagactgctgataatagggatcatggtagccgcaaaaggaatattatccacgaaggcgctggcaatcgcagagatccacaggataatagcgatcatcagcatcagattgccgttgctgatgtctccgatgaaattcgccataactttcaggatgccggtctgctccaggccgcccactaccatgaacagtccgatgaagaacaacagggtcttgtaatcgatctgtttgatcagtttcagtgcgtccttgcctgctgcaattaaagtcacgatagaaatgaatacaccaatacaggatacggtcagaccggtttgtgcgtgggtcaccagcagaactaccgcacacaggaaaataatagtgctgataataaatccttttttatcggtaatggcttcggaaggatctgggtaggtctggttgctgcctgctgcagctgcctcactggcacgcagttccttgtggaataccagatagaaatacagtacgaccacaaccagggaaacgcctgcgatcacaccggtattggtcaggaaatccgtgaaggaatatcccagggaagtaccgatgatgatattggggggatctccgcacatggtagcggatcctcccagattcgcacagaacacttctgccagaatcataggcaccggattgaatttcaacagttgtgacaattcaatggtaacggctgccaggaacaggattacggtaatactgtcaatgaacattgccagaataccggataataccataaaggtgacaaacagcggtacaaccttatacttgaccatcttggcaaggcgcatgcacagccagcggaagaatcccacccgggccattccctctaccatgatcatcattcctgctacgaacacgatggtctcccagttgataccactggaagcctctgcggactgtcccgccgtgtaccagaaatgacttgtgaaaaagctgcctaagttcaaagtctccaacactgcgctcatactgtgcattcccagtccgaataccagtaccagtgtcagcaggccgcagcctaatgtgataatgtgtctctcccatacttccaggacgatcagtacaaacatcgccagaaatatgattactgcaagtatttgtgctaccactttccctgcctccttgctaatttttctttagaacatacaagagtagattctatccgaaatatcggcataagtcaattcttcttttggtttctatgcataaatattccgttaaggttttttacaaattgcgacgcataaaaaactccggaagatcctgcctgcataccgatctttcggagcctttttattgcttatattgttttattcatttcgaaagctttcgatatcgttctttcccacataacgtaagaacatccggttcatgtcaatgccgctttctccgaaatacaacttcatgtacttctcgccgtcctgtcggattgcaagagtcacggactgttccacagccttgccctctgtgccgttgatggtcacggtctgctgtaatgtattattcaggaacacggaaataggcagctgcgccagcgggcccaacgtggaactcatccggaataccagttcgtaccgtccgatcttcgtgaaacgcagctggtataccgcaccggtacctttctttgtggacagcttctccagcggaagttcaatctcctctccggtcttcggctccggcagttccatccgggccagcacctgtccactgtctcctgctccctctgtgcttatcggactgtgaagctccgtacactcctcttcctctctgccaagcagcctctccatggcaacagaacgtaacaggaagcagcagatgtttgcagcattccgcataagctgcgctctggtcagcctgccgtctgccagtccttccgcagtgttgtccttattagaattagatgctgcgtctgcggtcaccatgtaaatatcattctgcgcccgtaccatgggaatcgtctgtttcccggagcctggctcaccttcctcattgatctttgcccaccagtcggtcatgacaataccctgatagccccattccttacggagaatggttgtcagaagatcatagctgcctgcggtccacagtccgttcaccgggccataggtggacatgatgctgtaggctccgccctgttttacggcgatctcaaatcctttcagatagatctcccgcaacgccctctcggatacaatagcattggcatcatgccgtttgaattcctgattattacatgcaaaatgcttgatggttccggtaactccatattttcccatgcctttcagctgtgccgccgccatggtaccggtgaggtacggatcctcggaaaaatactcaaagttacgtccgttcaacggatttctgtgaatattgatgccggggcctaagagggaatcaatcttgttcttgcgaagctccatgccctccatctcatacagttcttccaccaactccggatcaaaggtacatgccagcaacgtaccgttcggcagtgcataggccatggtaccgcagtccatacggatgccggaaggaccatcggaacagcaggccaccggaataccgaattgctgcagtccatccgtcacaccgccgaaagctgctgctgttccgggggtaactttcggggaacacatgccttctccgcgggtcatacagatcagatcttcgtctgacagctgtgtcagaaactgctccggcgtgatttttttgtcgtaaacatccgccagtttccagccctgatctcccacatattcgctctgggtgggtctttcccgcaaaatacgttccgccagatctatggtccgtaagggcacatcctcccagttggcgatggcatggtcattctctccgaagaaaaacggtctcaggcgcttaaatgcctgcaccggagccagtgcttccgtaacggtttgtacgacctgcagctccgctaatgtcactcttccgacttctcttgcactccgcacatcggtaccgacatagaagatatagtctcctgcttccaatacatagcaggatttatgtccagtgacaccactgtcatcataggacgcaagctccgtcagttctgctttcaggatcagttcttcacttgctccgggcttcagttcttccgtcttggcataggctgccagctgacgcagcggctttcccagctttccctgaggagcctccacatagacctgtatggtctctctgccggacataccgccaacatttgtcactttctcaatgacagttgcctcggtaccctgcactgccagtcccatgctctctgtctggaaccgggtataggacagtccaaagccaaagggatattttaccttgtctctggcaaaggtctcaaaatagcgataacctacatagatgtcctcggtataaaaattctccaccggatccccgaaattctccgtggaaggataatcctcaatatcttccgcaatagtatcgctgagcttaccaccgggattcacttttcctgtcaggacatctaccgtagctctgccgccctcctggccgccctgccatacatagagcacagcctgtggctgataccggtcgacccacttcatatccatgatattacccacattcagcacaacgatcgtcctggcaaatgcattgcagacattacgaagaatttcttcctccgcagctgtcagcagataactgccttccgcagcactattatccttgtcttctcctgcggttcggccgagaaccacaatcgccagatccgactgttccgccgcctgtctcgccagttcttcgctgacgggcatttcttcctggttccagggctccatggcccatccctctcctatatcaaaaggatgatccttcagccattcccggtactgtgcctccagtacctcattcacctgtacggtgccgtcttccttgagactgtctgtaatattggtcacatatggagcattgaccatacctccggaacccgtaccgctcttataatgctcgaactgggttctgccgaagatcgacaccctctgccctttttgcagaggcagcacaccgtcttcatttcgaagcagtacgcttccctccgccgccacacgtcttgccagttccgcatatttctcataatccaatgtatatttcatatatctgtttgctcccttcctgttatatctatatttctgtatcttttatcctaataatagcattaatttcccaatacatccacaagaaaagctctttctctgacagaaagagcctcaaaaacattttattgattttacaagatgatccgaaccacaaaatccccatcctccataaaaaactgatattgtccgctaagtttttctacataatatacgatgcttctggctcccagcccgtgtcccgaacgttctgtcaccggaacgccatccgcaaatgtgggaacactacgcactgtatttttctccatcagaagaagatgccccgccttttccgacagagacaattctatgtatcgtttatcctccggcagctcctgtacggcatgcatggcattttccagtacgtttgacaggatcgcacagaacatcatttcagagcagggaagtttctctccaatgctgacctgtatctcccatcggatcctctgctcctcaaaccgcatattatagatggacagtacggaattcaccatctcatttctacaataggtcttgatcactgtatcatcataagtctggctgacctcattcagatattccagcgccttgtcggtttctccctgttggatcagtgttcgcagcaccgacagatgatgcctcgtatcatgccgcaaaatggacatctttttctcgctttttctcgtattggtcatttctgtctggaatgaattcagctgcatctggatcagttcattgtactgctctgccttgttcttcatctcgtactcccggaaatataccagtaaaaagagcagatacgtcaggcacatggcaaagcccaggaactccggcaccgccttattgccggaatacaacagactggaaaatttggtcgtggcatagtcaaaaatgtaataaatgatcggcaggcttccaatgatcagaagttcccgatccgttttggcaaacagcatggctgtggtctggcatacataccggcataaaaggatgaaagctcccaccgtcaccagaatacgacagacataatagcaccattcctgtcctgtcagagccaaagcaaacagtcccatccagttactgcactgacaacatagatatgccgtgaaaatagaaatcagggaaggaagaatacggaatttataatgcaaaaccagtacaaataacaatggggcatgcacgatcagtggataaatctgatctactgtttctgttccaaagagaagtacacacagaacatatagaattcctgaaacaaccgccaatgacaacaattgcaatatatttttcttatcctgcttcactcccagaaaaaatgccgacaggaagattccaaacagcattgtcgttgtatgatgtgtatatgttaatatctgtagtaccattttcttctctctttcgtattcttaccatacattttttacggtataaaccatttctgttatatgacccaccccgatatgcgaatagagggtaggattgtgggagtgcgtagcacgtaggcatcaaagccgggggcctttgacctcgactttattatataagactctcaacgagaaatcaatttgtggatgatttgactttttgcgtcacaaatgtcagcatgtctcgcctgtgggatttagtagcttctacgcctttcgccggcgtctggtatcactgggactgacaccataagcattgcggtaggttctggaaaaatgcaccaatgacgcaaatccggtcttctgcgcgatctcctggatcgccagagaagactccaccagaagtcttccggctctggtcagccggacattggtaaggtattccagaacggtggctccggtcacctcgcggaaaatacggcaaaaatagtatttacttaaatggatctgggatgcgatggtctccagatctattttttccgcataatgggcattgatataggcgatggcatccagaatctcctgtctgggagctgcggagagctccggcatctgtgtccgctcctgcctcgtatagtagtctctgcacagtagcagcagttccagacaatagttttgctttaatttctcggccacagcatcgtggcggttataatatttccgcaatcgttcgaagacctctgccagttctccggattgttccggtgtcagatgcagaatatcattctgcaggacctccaaaaaccgctgtttttccgcaggctttaacatttcatccagataatccggtgcaaagttcagaacataccgggcatagaaatccgaggacaggctctgcatataatgggtctggtaaggcttgatcaggatgatgtcacccggattcagcacatgacagacaccatccagaaagatgtatcgcactcctttcaccacaaaaaacaattcgtaggtatcgtggtaatgattggtctgcatgtcatttttcttagaggtctctatgtattccaaaaacagatccgaatagggatcaaaaatcgtacgaagcatctgtttcctttcccggaaaagattccggcaagattcatattattacttttcactatcgcaagatatgttaaacattatccaaaataaacgattataatgtaattatataataaatcttgtgctatgtgaagtatatgggaaggagaacttatggagaaaagacctttagattacgcaaaagcatccatggataccatgatgcgcaaatgggaagcccccaagcttccgcccgaaggaagattccactatcatcagggcgtattcctgtccggaatgtacaaaagctatgaactttgcaaggaggaaaaatatttcgattacatcaagtcctggatcgatgctgtgatcaccggaggtggagtgatcaagcaggctgatatggggcagtttgatgatatgcagccgggtattctgttataccctctctatcatcgtaccggtgatgccagatataagaaagccctgaattctctgatggctgccattgatcattatcccaccactcccgaaggcggctatttccacaaggctgatctgccggaagaaatgtggctggatggtctgtacatggaaggtcccctgcgggcacagtatggtgcagaatttgatcaccccgaatattttaatgaggttatcttccaggctctgaccatgcagaaacatacccgtgaccccaaaaccggtctgctgtatcatgcctggtcctatgacaggaaagtagaatgggctgataaggagaccggctgctcccccgagttctggggcagagctatgggatgggtgcctgtagccctcctggacgaactggatttcattcccgccgatcatccggacagagcaaaactggaaaaaatggcagtggatctgttaaagtctctgctcgcattccagtctgaagacggcagatggtatcaggtggtcaaccgtggcgatgatcccgccaactggctggagaattcctgcagctgcctgtatgtagcggctctgtgcaaagcgatccgcaaaggtctgctggatgcatcttatctggaatatgcccgcaagggttatgagggtgtgatccgctccctgacctgggaaggtgatgacctcattatcggtaatgtctgcatcggaaccggtgtcggtgattatgaccactatatccaccgtcccgtatccgccaacgacctgcacggggtcggcgccttccttctgatgtgtgaagagtgcgaacaggtattttaatatcttgtaactattcagagccatgcaaaatcaggcttacagatcctcgctgccgggattccggcggcgggcagatctgcttatattattactttttacagctttacttttacaaaatcatgtcccatggcgggaagcaccttttcgatcagatccgccgtccgcatgcggaggctggaggtattgatgcaggggtggcatccgaaatattcgctgtccagcacctcttcatcgatcaacagcttcacctgatgttccttatcgttcatcagaccgagtacactgacagagccgggggtgatatccaggaatttctccatgtattccggcttggcaaaagaaagcctcgccgagccgatctgtgccgacagatccttggtatggaacaccttggtatccgggatcatcagcagataaaaggcggtctcctgacggttgcacagaaacagattcttacagactatggactccaggatctcatccacttccttacagtcctccatggtcatcgccggagcgtgatccacacggtcatattccacacctaagctatccagcaggtcataggtgcgtatctctttgtccagtctgcctgtggtatcgacaggtcttcctttttgtaatactaatgtcattgtcttttcccctttattgtctaataaccaatggtgtcgtttacgaggatcacatggatcctgtccgtatgtctggaatatctcgtgatcaggaactgacagcagatggtatccggagacttgcagtcgaagcattttccggtttctttgcagggagtcttgatgtcgaatctctgggcgttgataggtgcagccacgtttctcgcacgcttcatggcgctgtctaagtctgcgcagaccttgttcatgccgacgatgaagattactttcctcggtccctgggctatgcaggagacacggttggaattgccgtcgatattgaccatgacaccgtcgctggtgatggcattggcactggagaggaagatatccgcatcgtatgctgccatcagtcctgctctggcatccatcttagagcgatcgatatagtggtaattgcctgcttccagagcggaggtcagtccgatctctccggcgctcatgcatccacccatagcgatggtgcttccctccgggatcagctccagtgcctgtttcagcgcggcttctttatcctctgcgtagtagcccgacatgttgcgggactgtaatcccttgatcactgtcttggccagctgttcatttctttttctgatcatttcgttcatctcttaaccttcctgcctttccgtaatctgcaaactttattcctgtgggacgatttcttattggtcctattttatcaaaaaaacaatttcgtgtatagcaaccaatagaaatatttgacaatacttttcgcatatgctaggatatttccaatattagggagtagttcacatcgggtaaccggtgttgtgttggtcgtcatcacgttagtgaagccacaggcagtcgctaaccgggcagtacacgtctacagaaatggaacgagacttttattgtatgtttatcatgcagtaaaagtctttttttgcgtgataaacaaaggatccgggtacattatttaagaaggaggatttgtatatgacacaaaaaaacatctggaatatttctgtaaaagaactcctggaaaaatatcaggtgacagaacaggggcttaccactgcccgcgcggaggagcttcgcctggaaaagggtgaaaatatcctgcaggagagcaggcgcaaaagtataccggaagtatttatcagtcagtttgctgatctgctggtagtaatcctgatcattgcggcagcgatctccatgttttccggcaatacggagagtaccattgtaatcctgctggtactggtgatcaacgctatcctgggtaccctgcagcatgtaaaagcccagcgttctctggatagtctcaggcagctatcttcgcccagtgcaaaagtcataagagacggtgtgaaacgggaaattccatcgaaggatattgtgccgggagacatgatcgtattggaagcgggtgacatgatcgtggccgatggccgtatcctgcacagctattcgctgcaggccaatgaaagctctctgacaggcgagtctgccaatgtagagaaaacagatgccgttatagagggtgatgtggcacttgctgaccgggcaaatatggtctattccggaagtctggtcacctacggacgcgccgagatgctggtgactgctaccggcatggagacggagctgggtaagatcgctgggctgatgaatgcagccaaagagcgcaagacaccgctgcaagagagcctggacaagttcagcagcagacttgccatactgatcctgatcatatgtgctgtcgtattctgcctgtgtatctatcgccggatgacgctgttggattccatgatgtttgcagtggcactggctgttgctgcgatccctgaggcactgagctccattgtgaccatagtgcaagcctttggtacacagaaaatggcaaaggaaaatgcaatcatcaagaatcttaaggctgtggaaagtctgggctgtgtctctgttatctgctctgataagaccggaacactgacacagaataaaatgacggtgcagcagatctatatagaagaccggttatacgagccggaccagcttgaccttttgaatcagactcatcgctatctgctctacgacgcagtcctcaacaatgattcgagcatcgtcgatgacaaaggcatcggtgaccctacagaatacgcgcttttagaaatgttccgaaggattgaagcggatacatcttctattttgaaagaagcaaatatgcatgaagatatcctcaggcagaacatgcaacgccttgaggaagtgccttttgattccgacagaaagctgatgagtacgaaatatatgctgcatggtgtacccacgatcctcaccaaaggtgctgtggatgttctcttagaccgctgtgactatgtgcgctgcagcgacggtatccgtcctatgacggaagctgaaaaagacaagatccgtatgcagaatcagcttttttcagaaaatggcctgcgtgtattgtcttttgcttacaaggaatcggaggaaaatctcgacatccatgcggagtatggctataccttcctgggtctgatctctatggtagatcctcccagagaggaatctgcggctgccgttgcagcttccaagagagccggcatccgtccggtcatgatcaccggtgatcataaggtaacagcagtggcaattgcccgccggatcggaatatacgaagaaggagaccttgcactgacaggtgcggagctggatgccatgagcgacagcgaactggaggaacagatcgcacaaatctccgtctatgccagagtatctcccgagaacaaaatccggattgtcgaggcatggcagcgcagaggtaatattgtttctatgacaggagacggtgtgaatgatgctcctgcattgaaaaaggcagacatcggtgtcgctatgggaattaccggaaccgaggtatccaaggatgctgcggacatgattctgtcggatgataatttcgcaacgatcatcaaggcagtggcaaacgggcgtaatgtatacagaaatatcaaaaatgccattttgttcctgctgtccggtaataccgccggtatcttagccgtattatacacatccctgatgggacttcctgtaccttttacacccgtacatctgctgttcatcaacctgctgaccgattctcttccggccctggcaatcggcatggaaccggcagatgacgaccttctgaaggaaaagcccaggaatccacgcgaaggaatcctcaccagaggctttatgattacgatgataacacagggtctgctgatcgcagcagcctccatgacagcttatcacatcggactgaccgtcagttcggctatggcctccactatagcttttgccacactgacactggccagattgttccatggttttaactgccgtggcagcgaatccatcttccggctgggactgacctcgaaccgatatagcctctatgctttcactgcgggagtctctttactggcactggtaatcttcatcccgggactgcacagtgtattcagcgtagccgatctgcctatgacagcactcggtcagatcgtagggctcgctttcatgccgacagtgctgatacagataatgaaaattatccggcatagataattggtttaatcaatatcttccacagactgcaatctttccttttttaccatcagatattcttctgcataatgtgtctcttcgtcggtcgtcagaatgacctcctgcccctgcggcatatcaatatctgttgccacaagcaggagggaatcctccttcagccagctttccagccctgtgaaaaactgcgggtcgtagtgatctgcccctttcagctcattatgatatctgtcaaaggaatagttcacgggagacagtacattatagtcataatagcagacaccctgccccgaccaaaggcttgtcgttaccagataatcgtaaccatccttttgtgtgaggaatatctgtacgttccccgcatgggcaatggcgaattcctgcgaccacagaggaatgattccatattgtccatctcccagatattcgtagaccgctaccgttccccagtttccggccttccgcaatgcttctgtgagattttcgttttcttcctccaaatgaaccttcgttacaatcttttccttgtaaccgttatgggtcagatcataatatccggtatagacttctgtcatatccggttcttctttgtcgatattctcctcttccaaataacgagaatatgttttttgtaccgaaaaatctcccagagaaaaattaccatctttttgcatggataccggtgccgttatattaaagccagtctcataaaccaggtccgccatctcgttcatatttatgccaacccctacatttgcaaagggctgtcctccacgaaaatcataccggatctgcgcccccacaccgatgcttttataagtgtatccttccagtttctgcaacagacgggtctgatccagatcaatactcttctgagcatctatctttccgtttttatccagaaaatccacatgaagtgtatggaactgttcatccagcgtatccgccgcaaggatccgtctttcaaaatcttcaaccacatttgtatattcggagaccttcggggttcctttctgtacatctacataatacagtccttccacatggacgccagttcctgtcccctgtatggtagaaatatagtactccttgtcgccatccccgtcataatccgcggcttctaccgcaggaggtgccaaatacatgttttgccagggaatctccacccggtattcctcgtcgccgtcatggatcaccagacagtcttctgcaccgttgccccagacactgaccgactcgtcataagaatatgacagcaccccatattctccttccggcagttcccgggcagcattgaccgagacctgatccgccagggttttctcctggtatagtccggtctggcaggtaagtttctccggctcaggttccgttgtcgtctccgggattgtctgtgaggtggctggagtggctgtagcggtttcctgactgattccttctgcctgagcagattcggtatcagagatttccaaagcgtccctactgctgccgcagcctgtcagagaaaatgccacgatcaataccaataatccgctgcttatttctttgtgaagctttcttttgtacatacgccctcccccctatagccggtaaatgcattttctatctttatcatatctaacgaatctggcaaagtaaagcccaaaaaagcccaaaaagtgccgacaccatgcttttcggtatcggcaccttttctttttaaaatgctgaaaatcactctgaagacattgtaacacctaaagccagctttagatcaagaattattgttttacatatctctgatttttactatttggcttttccggcaatgtcatttttattagtcccaactctatggccggcttgatataattttttcgaaatgtttccttggatttcagatgcagtgcctccatgatcgcattagcggtataggggacatcgtactccattacttccagcatccgttttacatattctgacatactttcatttgtcttatttacctgtatgataacctcatctaatacctgatctatcatactcaacataaattctataaatacatctgaatttccattcacatgacattttgctattgcatcataatattctgcctggaatctttcaatctgactttccaacggaatatattcaaacacatttctccaacgatatagcattaccgtatgccataatctggccattcttccatttccgtctgcaaaaggatgtataaacacaaattcgtaatgaaaaacagctgacacaataagcggatgtattgtcccttcactgcttttaacccatgaaaataaatccttcatcagttcatttaccatattcggcggcggtgccacaaaaatacactgatctccggaaaagacaccctcttccccttttctgaatacgccggattcctctactgttctataggtcattattccatggatttttatcagatctgacatgcttttgggatttatttccgagattttttcatatgcagcatatgcatttttcacctcttgtatttccttttgatctcccaatacaagatgaccattgatgacatctctcacttcagccagagacaaagaatttgcttctatttttaaggaagaatgaatggatcggatccggttgtttttccttaaatgcggtcttgcctctaattctctgtgactgcttattttacctactttttcagatatagaagaaacaagctccaacattttatttgagatcgtatatggcggttcatattttcccatttatgtcactccatcttgcttattatcttgcttactatcttactcgttttggatatcattagcaatctttttatttttcgcttaaacattttctttctcctttccgcattttttttacatatacttttgcatatttccgcattttttacaacatttcttgtagtaatctagaaaagcagctattaaataaaaataagtattcatgtataatttatgatatactattgtaactattcaaaattattgttctgagagaaaggaattccgactatgggaatcagattagtctgcagtgacctcgatggtacacttttacaatatggaaaaaaagaattggaaggcgagatttttgaccagatccgggcacttcatgaccgggggatcctgttttgcccggcgtctggaagacagtataccagtctgcggaagctgttcgctccggtggcggattgctgtattttcttatgtgaaaacggtggcgtgatctacaaggacgagctgtgcattgcgaaaaatcccatgccccgtgccctggcggaagagattgcagaagatctgtggagccggagtgacgggcagggcgaagtcatgctctccggacagaatacggcttatctgatggaacgtgggctgggaatgctggacagaataaagtttattggcaacaactatcaggtcattcaggatccttccgaaattccggaggatatcgtaaaggtctctgtatatctccatgaaggcgtagcggcttatgctgaccgcttcgtcccccgctgggagcaggcgaactgcgcagtggcgggaccttactggatcgataccacccttgccaacaaaggcatcggtgtcacctctatctgcaggatccttggtattgaccttacagatgtcatggcattcggtgacaattataacgacgtatccatgctagatatcgtgggacatccttatattatggacggagctgccggtccgttgagagaaaaatatccgcagcacactccccggccggaagaagtactgcagactttcctgaaataattttattttctatacctgtgcggatattttcccagcaataatctctgttacttcttccagcgatttgtctgtggcggaggctatctgctctgccgacagaccattcttatatattttgctctcttttatttcctcccagtgcgcttttgtcattacatttgtatgaccagttcttacttccttcagtaaaggcacgggaacattttcgcaggtatgatggtacacgaaaccgaccttttcctgcactcttttggatttttgatttccctcataatatccgcaccatatggtgttcatcccaagttcttcgaatccatggcgcagaatttcctttgcggcctccggcatgtacccttttccccaaaatggctgtcccagccaatagcccagttcacactcgtcctcacggtctgtcatatccgtgtggcccttcaatttcagttcaatggcaccgattgccttcccattctctttttcacagatggcatagcactccggaccattgaatacatttctgatcacatcgaggctttcctctacggacttgtggggtggccatcctgcgatagggccgacttccgaatcttttgcatactcatataaactctctgcgtctgcctctgtccattttcttaatactaatctttttgttttcataaataatcattctcccatataagtgcaacctcaaacttctcttttttcttggtcatagacctttttcgagtataatattgcaataatcgttgctgataataaatacaccaataataaaattgtactggttattccattggcaaatgcagccgtaataatggtcaatactcctgcaacaacaatactgatggctccaaaacggttactttttctccatgtattatcattatacatactccaggccgttcgaaacccaactaccgtatttcgctttgcctttgtcatataatttcctactacaacaaaaataattccacataagatgcaggaaatccttgcaatatcaactgttacctttgaaccattcacattttcctgcacacaagaggaataaaggatacaataattcataattccaaacatgatagcctgcgatagtcctaccacgcatagtacccttgcggaggaatttgcttccatacgttctttatccgtacttgctttcacggtctttttttcgaatgtaccaattaaaaggtgccaaaagaatgtaacacacaaaataactatcggaaaaataaaaattccgattttatgcggtatcatatccggtatcacctgtaacatcatacttgcaaccaccactggtagcaccgcaacaatccacatgatttttttcatccctttgctcctccaaactggttaatccatagaattaattcatcaaaaactgtcgtattgatttcgtaaaatataaagtttttttccttatattcggatactaagtcggcgctttttaacagttttaagtggtaagacaaagcagccggtgtgacttgtaatttttcggcaatctccccggcatttaatcggccatcttttagcattatcagaatctctctccgttgttgatccgccaatactttaaaaatatttgtttctttcataatcttcttacccatttaaaattatctttaaatagaatatagcatactcccttttgcttgtccacaggtatttaaaatatttttgaaatagttgtgtcttccgaaacatctttattcaactggggtgtgacgctaatatttacatagatgagaatgacaaacagactgttattttcgcttatccaaatctgttcacaaatccttctaccctacaggtaatccgcctggaaatcggtgcattagcagcctggacacctgctaaaattgcaagcattgaaccgtatacagctgtatactacccaaaaatctttgagcagaaaaatactgaaattcatgccacaacgatattccagacattactatgatctttatagaatggcccagacccctgtaaaagatgttgctttctctcacatagatcttctgaaaacagtagttgatttcaaaatgaaattttatccaagagcatgggctaaatatccggaagcaattcccggcaccttaaagctgattccaccgaaataccgctttccagccctcatcaatgattatgaagctatgaaagatatgttatatggcgatattccaagcttcaatactattatggaatcagttcaccaattagagaacgagatcaattctctttacataattactttttattcctaacaagcttcttgctatctgtgaactgctgaatatccacaatatttatacagaatttattgggaaaaattctgataatccgcaatgatgcccagctttattttcattttcaaaatacgcagaaccgattcgttgagacgttcctcggtaatctcaccggtttcgaccgccttaatgactgcgggtacctgtacttcaaaatcggtgcagcacagcatatcgtttcctgcctgtaccgcccttacggcaatctccgcatccccggcgaactgccttactccttccatgaccagatcatcggtaatgatcacgccgtcaaaccctaattcattacgcaaaatattatgcaccggcagagatatggaggccggctcctgatcatccatgcaggaaaccacattgtgggataccagtaccatatcggctccggcatcgattcctgcctgaaacggcagaaagtcagaatttacaaatgtttcataaggacgttcatcataagcaacaccggtgtgcgtatcggagttattgccatatcccgggaaatgttttaatacactccccatgtgctcttcggacatgacaccgaccaccgtttgcacatagaccgccgtctgttctgcatcctgtccgaaactgcgggcatatataaaatcatttgtatcctgtgatacatcgcataccggagcaaaattcagattaattcccaggttctgcagtaattgacatttttcctgtgtgtcgctccgaataagatcccatccgccctgcgcatacagttcctgaggagaggcaaaaggcgtttcccgtaagttcgcatttttgctgactcggtttaccgtgccgccttcctcatccacaccgatcagcagaggcacttttgcagcattctgatagctttgaatggctgccgttacttcctcttttgttttaccggtaaaatcccgtgcaaataagatatatccgccgagatgatactgtgtcaccttggatgctgcatccgtctccgggcaccgggcgatgaacatctgtcccactttttcctctaaggtcattcctgccaggagttcttctgccctctgctctacaggatcttccgtttccaccggttcactttcttccttctccggcaattccgtaagatctgcactgttctctgcgctgttgccgctcacatcagaatccgatacactctgttccgacataggctccggctgaacttccggtattatttcctgtgcagactcctctgtacttcttaaattccataacaaaaaaaccagaattccaacacatatgacagataaaacgatcactgcgatattccgtacctttttcatttcgcatttctccataaccatattattaagatgccagggtcaaaaggtctaagcccacatgagcttgctcataagtgggtgaaagaccttatgacccgccccgatatgagcataaaagtgggatgataatcccacgatatgcgaatagaggggaggattgtgagagtacgtagcacggaacaatccgtaggcatcaaagtcagggtcaaaaggccccggtcttcggctgatacttcatactcgatacattatatacggtaataaacgccttgggatccagttcattgataaatttcattaacttctggtactcgcttttgtccacaatggtgatgatctcgttgtgtttttcaaaatgataggcaccgatggcttcatagatcgtggcaccgctgtgcagatctcttgtaataaactggcgcagttcttcctctttcttcgtaataatgcagacacgccgcttgatattattgtcaaaaataaaatgatccagaatgattccgttgaaataggtacccaggatactcagcaccacagttttcttatcatataccaacgctgcggacaacgccacacacatcccggacagagacatggccttgcccagttccatatgcagatatttgttcatgatcttcgccacaatatccaatcctccggaagacgcattccggttaaacagaatgctcagtcccacgctgaccaccagaatatagcaaagcacgtccagctcctgactgtctgtcatggaaccgaaattcggaaacagcatctcgaaaagtcctaagaataccggcagcatcacactggtgtacaccgtctttaccccgaattctttcccgcaggtggcaaagccgatgagcagaagcactacattcatgatcatcgtaatgaccgacagtggaagtggtataaagttagacagcacaatgccgagaccggaaatactgctgaccgacgcgtgacttggcaccaggaaaaagtagactgctgccgcgatgatggccaccgccacagtcaggatccctgtctccttcattatttctgcataatttatttttttcttcataataacattttctccaacgatatattttaatttgtttctatactcttctcatcttattattcttagagtactattacagcggcatcaagtccctctatttttccatcaaagggattctctctaagtaaatcatatttttgcgcatactcattaaacattcttgcgctgctgctgcagttgaagatcaaagcaagtgtctcttcgtcattttttctggtcaggacgatcgtctcttccccgtcccttgcagctatttccaacggttcaccctctacgatacatgcatggttttttcgcaccttcagcagctgcttataccattcaaacatctctttatcctggtattcttcatcccagtacataccacgtctgcaatccggatcatttgctccgggcatcgcaaattcatctccgtaataaatcataggcattcccggtaataacaattgaaaagctgctgccaaatgctgctttttcttattatccttacatagatgtaaaaatcttgctgtatcatggctgtcgatcagattccacatgagaggatagcattttttgtttaagcgccccttcaaatatccaagattctgtataaactggctgacattgattttttcatctgcaagcagatctatgagattcaggtaaaacggataattcatgaccgtatcccattcatctccctcaagaaaatctcctgcataatgccagatttccccaatgatcagcagctccttttttactgccttaacagcctttctaaagcgcttccagaagaaatgact

SEQ ID NO: 5499 - DNA, 6836 bp, Unknown
  gut microbiota DNA sequence
cttgtgcgcaagcgcccatcgaggtgttccactctatttttgcatggctcgtagctatgctaactttcaattattcgcaatacttcaacaattccaacgggtgggcgataatagcatcggcgtggccttcttccagttccttgcggttgcggaagccccagaggactcctacagtgaaggcgcctgccgccttgccggtcttcatgtctgtagcggtgtctcccatgtagagcacttcgtctgcggtgagaccgaactggtctaagatccggaagactccggcgggatcgggtttgatgggcacgccgtccacctgtccctgcactacatcaaaatagcccttaccaaataaactctcaatgacatctacggtggcatggtggggcttattggataatacggcgatcttcattccacgtttcttcaactcttccagcagttccggaattccctcatagggcttcacctgatacatacagttcgcctggaagatctccttgtatctggcataggctgcttcaaaatgggtaagttccgtatcgccacccttgatcagtgcccgctttaccagattggcggcaccgtctcccacaaaatatttataatcctgtaccgagaaaggtccatagccgaattccgccatggtcttgtctccgctgtatttcatgctcataatggaatcggataaggttccgtccaggtcaaaaattgctgctttcttcattctgttctcctacactaatctcaatccatgcagttcctgatagactcttcccacgggaagccctaccacattattgtaatctccctcgataccgcggatatatctggcacagaatccctgaatgccgtaggatcccgccttgtccatgggatccccggtagccacatattcccggatctgtgcatcggtcatgggataaaaatgcactatggtcttctcatgaaaagtcagcgtcttcctctcaccattttgctcatagaggatcgtcacgcctgtgtatacctcatgtcctctgccctgcagcatagtaagcatggctgccgcagcttccgtatccgcaggcttacccagaatcttaccgtcgcaggcgaccacggtatcggctcccagcacaagagtgtctgtcatagtagtttctccacttttctgttccggatcaaagacaccacttaccgcaagcttctcccacaccgcttccgccttctgcgctgacagttcttccaccactttcgccggctctgtggagttgatcttctcctcggtctcgctgaccacaacatcgaaatccagtccgatctgtgtcagaagctcccgcctcctgggggaggcggatgccagtataatcttcttattcatgatgtgtctccgggataaaagttctgccttcgatggcagattctcccgcagcctcctttgctttttgaatggcctccaggcagaacgcatcctgggaattgaacaactgctttcctctcttgtcctgcttctcatagctgccatccggctgtaaaatagaagccttcacattatccttcagctgactgttcagaatatgtaataactcttccttcagctccgggcgatctaccgggaagaggatctccacacgacgctccagattacggggcatccagtcggcacttccacagtagatctcataatgatcatcatttgcaaaatagaaaatacggctatgctccaggaaattgccgacgatggaacggacactgatattctcgctgacaccggggattcccaccttcaggcagcagatacctctgacgatcagttcgatcttcacgccagccgcacttgcttcatacagggcacggataatatccttgtcgcagagggagttcatcttcgcaatgatatgagcattctttccctccagcgcataatttttctcacgctcgatcaggtgcaggaacttatccttcagccataacggtgccaatgccagcttgttccagaacagtggctcagaataaccggacagcatgttgaatactgccgtggcatcctcgccgatgcgctccgcgcaggtcagcatacccacatccgtgtacagcttcgccgtagcatcgttatagttaccggtacccagatggacatatctgcggatgccatcctcttctctgcggaccaccagtgtgatcttggaatgagtctttaatcccaccagtccgtagataacatgacagcctgctttttccagcattctcgcccagacgatattattttcctcatcgaaacgggctttcagttccaccagtactgtgacctgcttgccgttctcggcggcctgagccaatgccgcaataatgggagaattgccgctgacacgatacaaggtctgtttgatagccagtacttccggatctctcgccgcctgacggatgaaatccaccaccggcgtaaagctctggaacggatgatgtaagaggatatctcccttacggatctcctcgaaaatattgcagcctgcgggaagctccggtgactgctggggctcatacttgggagtctttaaatggtcaaagccctccagcccgtagatcttcatcaatacagtcagatccaacggtccgtcgatttcataaatattctcgggctcgatgttcaattccttcttaatgatcttcagcagccgcttatccatgccgctttccacttccaggcggatggcttcgccccactgacgcttctttaactgcttttcgatctcctttaacaggtctgccgcctcatcctcatcaatgctcagatccgcatttcgcatgatacggaaaggatgggcacagacaatatcataattcaggaacagcttatccatgttccgctcaatgatctcttctaacagaatgatcttgcaggccttgcccttagacgggatccgtaccacacggctcaggacactgggcacctgtacggtggcgaattccagttcctcgtcactgtttttcttccgcaccatagctccgatgttcagagatttgttgcgaatcagagggaatggtctggaagagtccacggccatgggggtcagcacaggatacacattttcctgaaaatactgatccacatacgttgcctcctccgccgtcagctgctcatgctctctgatgatatgcagcccgtttttctccagaagagggagtaaggaacggttataggtggaatattgcagatccaccagttcatggattgctacatgcagcgcctttaactgctctgtgggcgtcatgccggcaatatcctttttggtatagcccgcattttccatatcctttaaggatgccacccggatcatgaaaaattcatccaggttcgatgctgtaatgcttaaaaatttcaaccgttcaaacagtgggatgctcttgtctctggcctcgttcaacactctatagtcgaacagtacccagctcagttcccggttggtataatatttcggatctttaaaatcgatttccattttccctgctgcctcccttaaaatttctttttctgccggatcaccggggtaatgctgtatacttccttgaaaaattccgtgctggtctggaagaatcccttttccagcgtaatatcttcctgggtgtccaccttcagaatcagttcattctcctgtaaaacggccttgacacctttcattttctgtttgtggctgcggtcaaggctgttggccagacgtaagatggcagtcagtttggcaaccgttaagtagctcgccttatccagtcccatagggcgctcctgtgcctgcccataatagacgaaatcgctgtggttaaaccttaccacgttggccacgatttcccgctccatatgggacaatccgatcatttccgttgccatgatgatgtcataggaagcctcgccgacattgagcaggctgatatattttccacagtcgtgcaaaatagcggccagccgcagatacaggcgttctctctgccccatgccatgcacttttttcatactgtcaaaaatcgtggtagtgatatgttccagggtatccgctctcttactgctgccattgtagcgcttgctgatattcagtgcgcaggcgataatatcctccgcaaaatcatgctcgccacggaacattttgttctgctccgcatactcataggcgatgccgtcgcagagtgttactcccggtgcccagaccagttccgcgcccatgagttctgcaattcgtctggtcagaatggcactgatgtacaccagaggcactttctcctccgcaatatccatccgcttcgccagctccgtggtgcctttggtacgaagggcttccatcagctgggaaaatgccttgcgatccactacggcattgacttctccccgctcgtgagccttgcgcaccgcccagggagacaggtaatcgtccacgatgatgatatttttgatctcgcggtccttgagatacagcttcttgtaatcatccagctgtgccgtagccagttcgtccaccagacgctccatctgagtgctgcccgcgttcagatgattcagcagttcctgcagccgcagtacccccagccgcaggttctgcgtggagaccagtgtatccttgtcgaacagggaaatctggatactacccccgccgatgtccaggatcgccgtcttttcttcaatgattctgcggaaagtctctcccttggaggcaatggacttgtaatccaggaaacgctgttcggagttgcttaaggtctccacccagatgccggtacgctgttcaatctgatcctgtaggatcagggtattttccgtctcccggatggcactggtaccgtaggctttgtaagctgtcaccttgtaggattccatgatctgtgcaaattctttcaaagtatgacacaggtcatctattttctcattgctaatcttcccgtgggcataggtgtccgagcccaggtcgatccgctggcggatacagtcgatctcccgcatggtatttttcccgaagagatcaaatattttcatggtgagttcaaagctgcccacatcaatggctgcgaaggtttttacactcataaagttcctcactttcctaacaggtaatcaatgaactgctgggcacttcttccggacagtccgccgtgggacagttcccatttgttggcttccagtaaaagttcctcttccggcatctccacatgatagcgctccgccagagtcttcacgatattctggaattcctttttgttgggagcaccgaaataaatggtcacgccgaaacggtataccagcgacagcttctcctgtacggtatcgctggtgtgcatatcctctctggtctcctccttgtcactgtagttctcgcggatgagatggcgacggttggaagtagcatagatcaggacgttctccggctttttctccagaccaccctcgatgacagcctttaagtatttgtattcgatctcgaactcttcgaagctcagatcatccatataaatgataaatttgtaattgcggttcttgatctggctgatgaccgtgttcagatcttggaactgatgcttgtagacctcgataatacgcaggcccctgtcataatattcattggcaatggctttgatgctggaagatttaccggtgcccgcatcaccgaacagcaggcagttgttggcctttttcccgtttacaaaagcctcggtattgtctaccagttttttcttgggaagctcgtaacctaccagatcatccagcttcacatgggcaatatttaaaatcggaacgatatgtacgccttcctcatcatgggtgatgcggaaagacttgtgcagaccgaatttaccgacgccgtattctttatagaactgggtcagtgtagccttcatctcctcagccgttccgtctgcgcagaatttctccgccagttcacagatccgggcgcagatccgtttattatagaccttgctctcctgcatgctgctggcataattttctattaaggaaaattccggtaccttaagtatctccatcatgggagcaaaatcaaaatcatagaattccttgaaaatgcggatatcatgcagcgccgcatcgttgatggagccggcaatctctccgcggatctcacagccgcagctataactgttctcgttgttcaccaggagatttgccaggtaacagtgccacagattcccgtggaaaccgtaattgcctgccaggtcgatcagatcatggatacactcgtaaaacagtgctgccatatcctccgtattgtaatattcatcatcgtaatgggacatgagaaatgccatgtcatacagcagttctccatcctcaaaatcacgatatacgatcagttctttttctctcatatgtctaaccttcttgtcttatgttttaactgttcagagccaatgggcgaagtaaccacatgagcaaataacatgcaggcatgttatttaagtaagcctcgcagaggcggttttgcgaatgggtttctgaatagttgttatgcttaataattgcccagtatcttcatgctgcgagcttcttctctgagtccccgcagtgcgtttttcactgcgctgtccgcaagattcccctcaaaatcaatgaagaaacgatactcccagttccggtcgggaatgggtcggctctcgatcttggtcatgttcagattgttgtagataaaatgggacagaatgtgatacagggatccgctctggtgggggatctccagacacagactgatcttgttggcatttttgcggaagatcttctggttcgtcacaatgatgaaacgggtggaattgctgtcggaatcattgatccctttttccagaatttccagtccgtaggtctctcc

SEQ ID NO: 5500 - DNA, 3366 bp, Unknown
  gut microbiota DNA sequence
cggcagtgataagggtgccgtgatcctgggatacaacggtggctatctggaaggtaacaacttggtaattcctgatggactggatgcgtataagaaatattcttacagtgatggaaccaacggcggttatgtcgctgtaggtaaggaaaatgatttcttgttctatgcagtgaatcagacgacaactgatccggaaaccggggcagagattgtgatcagcacagcttatcagccctgccgttatgaagaccgtgcccagtgggagaatttatcatctgaagaactgtattatcacaagtcggatactgtatccggtggtgatcttgtacctgtttatgagaaaacgacagattccaataaacagcgtatcaaaggtgcagaggtatggtatattggcaaccagtatctgcaggaaggaactggaaaagatgcaggtacctggaaaattgcaggaccgatcaccagtagtgataaggggatttttgccggaaatggtaatattcacacattgaccatcggaaagagcgtaaaaggagtgggtgtatatgcattttatggctgtaccggtatgagcagcatttctttgggaaatggtctgaatattattggtgattatgcgtttgccaactgccttactatgaccagtgtaaatctggataggatcagcaatctgacaacgatttcggatttcgcatttgccaactgccagtccatggaaaaatttacggttcctattaatgtaacaacaattggcaataatgtatttgaagactgttattccatgacaggcattaatatgtccaacgcagaagaaaatgacggtttctctgtggaagaggaaatggcttccacaaataatgcaacagcattaaacaattttgggaaaaatgtatttaaaggatgtgcaaatttaagatctgtgacattccccagaactttcagtaatgccagcggcccggcatccggatccattgatgtatccgagttccggggatgcgagaatctgaaatatgtaactgcagcaaacccgtctttgaagatcacgggaggagaagtagatacttcatatacctttgattccttcaaagaggatgtaccggcagagttttatctggaaagtgttgacagctcccagttccatacctgtgcgacgaataattatatggcattcagttatctgaattccgacggaaccaagcagaatctgtatgaactgacagttcaggaaacaagtggcaaaaaggctgtttacagagtgaattcctctaatcagctggtatactgtgaatttgacagcggtctggaaactgttaccatgccggataccgtcggaccttaccagatcacagtgatcggctccggtattttccgtaataactgttatctgaggaggattacgattccctcctctattactacgattgaagacagtgcgtttaaaggctgccataatttgaaagatgtcattttcaaggagcctgtcaatgttaccagtatcggtacagatgcattcaagacccaggaggtggaatatcataaggcagattgcgttaacaagaacgcaactgatgtacagcaattgtattttacaggccccatctcggatgattcggcaccgttcaattatgcaatggatccgaacagctatattaacagaggaagccaggagagaacctatattacctattacagtggctggccgcagaatctggaagtaaagtataacccggatacggacaaaaatgaattggtagattatcctacgtttaaagaaattcagtccggttcgaaatataccacaggcaattatgcttatatgacgttggaataccaggaggcggctaagactgcggtagataaatatcttggtacgaattcagaacctatgacggattatgaacgtgagatcatcaatgcggcactgcagatcgaattaccttacggtattgaaaccattcaagaagatctgtttactgccacagaaccttcggaagctctgccgtccaatacgaccaagacattgaccgcttacggactgttggagatcggcaaggagactttcaaggattgtacgaatctgagtggtgtctatctgaaagacagaactacgaagattgatgattatgcttttaagggatgtacaaatctgaccggtgtggcagtacctgccaccacaacaacaatgggaaaacggcctttcaccggctgtgagaaactgacaacggtggatttccagggaagtccttatttcacctgtgataattctattatctacagtctggaaaacggaaagaagaaagatatcattgaatttctggaaggaagagccagcggagtggtagctcctacggaagtagagggagtcaccggaattgctgaggaagcatttgcgggcaccaaggtaagttccgtggatctgcgtacctcctttgtgacagatattccggaaggtgcttttatggatactccgaagctgttcgcagtttatctgccggatacctgtaagtccattagtaaggattcctttacgaacagtagtattgcctacatggaagtgccggaaagtgtcagctatctggataatgatgccttcggtggaaccaccgataagagtgcactgcagttctactgcgtagatggcagtaatgcatatatctatgcaacaaagaacggtattatgacgacctcaaagccgctggaactgttctataccgtaactttctgggattgggattctacgcttctggatacacagacggtagcagcagggggagatgcagttccccctgaagttaaaggcagagagggatatacccttaccggatgggttccggattatcatggggtacaggccaatctgcaggtaactgcccagtatgaagcagatgatccggatgcttccaaatatacggtaactttccttgactgggatgacagcgtactgaagactatgctggtagctcccggaaaggatgcagaacccccttttgatcctaagagagaaggatatacctttatcggatggagacctgcggttaccaacattcaggcggataccacgatttatgcccagtatgagaagaatgattccgaagactccaaattcacggtacgtttcattgattacgatgatacggtgctgtacgtgcagaaagtagcgtctggtgaagatgccattgcacctcagagccctaccagaagtggttatacctttacaggatggagacctgccattaccggaatcaccaaggatacggatacctatgcccagtatgctattaccggaagccaggatgatcctaacggaacagcgactcctgcaccgggaacgacggcaacacccgctcccggcacgacagcaacacc

SEQ ID NO: 5501 - DNA, 2511 bp, Unknown
  gut microbiota DNA sequence
acaccacaacaaaactgtacacattgacagttaagaacggttccggttccggaagttatgctgccggttcccagccgatcatcattgcaaatgatccggccaagggcatgcagttcagcaactggacaatcgatccatccaataccactatagcaagtaaggtattatcggcaacggtaatcaccatgcctgcgggaaatgtaacggttacggcaaactatacaaagtcaaacggttctaataccagtacttctaccggaagcggtaattctacgaattccaattccaacagaagaccgaacagtactacaacaggaaatgtctccggcggcagaaccaccgttgtcattgacaagaacggtctgtccaataccagtgtggtatccgctacggtaaacggatcttccgataactttgtgatcaagatcaccgaaagtgcatctgcttccgaggaagtagtaaaggctctgatggcagagtatggcaacgatattagtgccatcaagtatttcccgatggatatcagtctctatgattccaccggcaataacaagatcacggatactacaggtttgtccatcagcattaccctgccgatcccggattctctgatcacctatgcaggtaacaacaaggtggcaggagttgttaacagtaagctggacaagctgacaccgaagttctccacgatttccggagtatcctgcattacctttacggcggagcatttctcaccgtatgtgatctatgtggatacgaacaacctgacagccggaacaatcgcagacagcactcctaagaccggagatgccattcatccgaagtggttcctgtctctgggtcttgcatgtctgtccatagtattcttcatgaagaaggataagaagactctgcgcaaggcaagagcctagtgaaaataaaggatgggaaggtttatgaatcataaaaagtgggtagttgcattggcattgatagctaccgcattgatcctgacacatcttcctgtgtcggaggcagatgcggcagcgtctgcctccgattttcagattgaaggcagtacactgacaaaatacagaggaagcgatgaacgtgtcacgattcccgatacagtggaagtcgtgggtgagagtgcttttgaaaataaccagaaggtacagtttgttgtggttcccaaatctgtgaaacgactggatgcctatgtgttctggggctgtaataatctggaagaggttgtacttggtaaaggtcttacctcagtggatgaatatgctttttcaggatgcaccggactgaaacagatcacgatccctgagaatgtacagagtattgatgcacaggcatttgccggatgtacgaaccttacggatatttatattccggacacggtgacaagcattgcagacgatgcattcttaaattgtgataacgtaacgattcatgcggacgaaggcagcgtggctgcaaagtttgcacagaagctggcagagcagaaaagtcagagccctctcgtaacggcagcgccatcagcgacaggcggaacttcggatgtacaggcaacaacagagcctgcccccactgaaacgccgacccctgcaccgacaccggtgcccggaaatgtgctcggcagtacctttgtcgtaggaaatcatgcgatggttatgatgctgcctgaggaagaaactgtgcaacagggctatacggaaccggtagcaggacaggagactgacggtgaaccgcaggatatcacagcggaaacagaagacggaaaaattccggaatggaaatattacaggaaccagtcggtaggagcagtgagcataccggagggaacgaccgaaatcggacgttttgctttttccagaagttctgtacagtcgattactttaccggaaggtgtgaccactattgattatgcagcattttatcactgtgatgatctgaatagtgtgatattgccggatacggtgacccgggtggaagccaaggcatttacgcataccggatggatggatgattttgaagaaaacagcatggatgattacctgatcagcggggacattctggtggcttacaagggggatcttccagaagtgaccataccggatggtgttcgtgtgatcgccgatgaagtgttccgcagccatacggaactgaaaaaggtgcatctgcctgcaagtgtcaccaatatcggtgacagcgcattcccggagggaatcgaaattataaatgaataagggtcagattttaccgacaccaggataagaaaccggcataagatagaataagtcttatgccggttttgtcttattttacggggaaggaacaagatgcagcgggtaagggaacaggtacaggtgccggaacaattgcatagtggggcaggacgtgtgaaatctgtgactgttgctgtgctggataccggaattgcttatcatccggatctggtgggacggctgcttgccttttccgactttgtagaaggccgttcctttccgtatgacgataatggac

SEQ ID NO: 5502 - DNA, 6177 bp, Unknown
  gut microbiota DNA sequence
ggaatcaatgcggcacagcgcggcgcgggcaatacgatgatcgcccttaggacgaacctgatctccaatctggtgaatatctgcggcaattacctgctgatcaacggccatttcggattcccggcactgggaatcaccggagccgccattgctacggtattcggtacggtagtggcatgcgtgatgagcatcatctcgatctgtccgaaagaaggatttatcagtattccgtatatgatcgaacatcacatcagactgcggttggaaccgctgttggagatcatcaaagtcggctattccgtgtttattgagcaggtattgatgcgtatcggattcatgtcgactgctatgatggcagcgaaaatgggtacggaagccatggcggcacaccaggtaggcatgaatatcctcggtctgacgttttcattcggtgacggtatgcaggtagcggcggtggcgttgatcggccggagtctgggcgaacgtgacccggagaaagcgaaaagctatggagctatctgtagacgtatcggtatgggaatctctgttgcactggcggttatctatttcttcggaggggagaccatctaccggatgttctttagagaagaaaatattattacgtacggtgtgaatattattcattgcatttgtatcattgtcctgttccaggtgtctcaggtcatctacatgggttgcctgcgcggtgcgggagataccgcatacacggcagtagcttctacgatcagcgttactttgatccgtacggcggcatcctatattttcgggtttactctgggactgggaatgaccggtatctggatgggtattctggcggatcaggtatccagatttctgtttgcgtcgattcggttccgacagggaaaatgggtgacaattaagatttaatgagcgcaggtaatgagcttatgataataacaaaactcccggagcaatatcgcaccgggagttcttgcgttcaaatatatgcaatgagttactgtgagttctatttcgtcttcaatgtctttttcatagcagtgaaagtctctgcactgatcacatgctcgatccggcaggcatcctcagcagccacggtgggatccacgccgatggaagtcagccagtccgtaagaaatgtgtgacgttcatagattttctctgcaatttcccgccccttatccagcagggtgatgtagccttccttgtccatttcaatatattccccattgcggagattcttcatagctacgctgacgctgggcttggacacacccagatcgttggcaatatcaatggaacggaccacaccgttctttttcttcagcactaagatcgtttccagataattctcagcagattcctgtattttcatgtaatgaccatacccttcccatacatagcattttgaaccgaaatacctgctctacatgtggaaacttaaccatccgcaggcattacaataagcatagcagaaaagggtaggaaatgcaagatttcaacttaatgagaaaaaatatcaataagaaattcctacgagatttctatgaaaaaaatcgaaaaaatatattgacagtaaaaaaaggttagtatatactaaccacgtgaattgagaatgaatctcattaagagctaatgagaaaccacaagcagttaaatactattgaagggaaggaagtgtgtatgatgcccctgagtatggtaggtgccggtgaagagaacacgatccagaggatcggcggcaaagaggagacgaggaagtttttagagaccctcggatttgtagtaggtggtaaagtgacagttgtgtcccagaccgaaggcaacctgattgtgaatatcaaggaatccagagtagccatcggcaaggatatggccaataaaatcatggtgtagcgggcagctgtaccaaaagatgctaataggaggagaaaatgaagacattgaaggaagttccctgcggacagaccgtaaaggtaaccaaactgaatggtgaaggtcctgtcaagagacgtatcatggacatgggcattaccaaaggtgttgagatctatgtgagaaaggttgctcctttgggagatcccgtggaagtaactgtcagaggctatgagctgtctcttcgtaaggcagacgctgagatgatttgcgttgagtaaatgatcttttttttaacaggaaggttagctggaactaattagtgaaggctaatcacatgagcaaaaggaaagtctcgaagagacgattttgtgaatgaggctctgaatagttatgagaagtatgattttagaggaaagaggtagaaaaatggcaattaagattgcacttgcaggtaaccctaactgcggtaaaacaacacttttcaacgctctgaccggttccaaccagttcgtaggtaactggcccggcgtaaccgttgagaaaaaggaaggtaaattaaagaaacagtacggcggtaacggtgatgacgtgatcatcatggacttacccggtatttattccctgtctccgtatactctggaggaagtggtagcacgtaactacctgatcggtgagagacccgatgcaatcctgaacctggtagacggtaccaacatcgagcgtaacttatatctgagcacacagctgatggaactgggtatccccgttgtcatggctgtcaacatgatcgatatcgtgaacaagaacggcgacaagatcaacgtaggcaagctttctgagaagctgggctgccccgttgttgagatctccgctctgaaactgaccggtatcgagaacgctaccaaaaaagcgatcgaactggcacagaagaagagtgcagcagctgcggtacataaattcgcacctgaggttgagagcgtgatcgagaccgtagagaagaaactgaccgatgttcccgaggaacagaagagattcttcgctatcaagctgttagagaaggatgacaagatccaggcacagatgaagagcgttcccgatgtatccgcagagatcaagcagttggaaactgttatggatgatgacactgagagtatcatcaccaacgagagatacacatacatctcctctatcatcaaagaatgttataccaagaaagaaggtcagaagttaacgacttctgataagatcgataaaatcgtgaccaacagatggctggcactgccgatcttcgcagtggttatgttcatcgtatattatgtatccgtaactaccgtcggtacctgggctaccgactgggcaaacgatggcgtattcggtgatggctggcatctgttcaccatcggaaccggtgcttatgaagaagcagccgagccttatgacgatgcaatgaatgtgatcaacgcattcgtagaagctgacggcgatgaagctctggcagcagtcatcgacagcgagtctgaggactatgatcccgcagcagcagtagcagctgttcaggagttcgcggcaggcatcgatgcatccgctaccgcagagtatactctggaagatgaagagactctggcaaccgaggatgttacttacaccggtgctgagctggcagaggcagttgatgtatacgtagcagacggcggagaagctcccgatcccgcagactacggtatctgggtacccggtatccccgtactgttagagtccggtctggatgcgatcggatgtgccgactggctgaaaggactgatccttgacggtattgtagccggtgtcggtgcagtgcttggtttcgtacctcagatgctggtactgtttatcttcctggcattcctggagtcctgtggttacatggcacgtatcgccttcatcatggaccgtatcttccgtaagttcggtctgtccggtaaatccttcattcctatgctgatcggttccggatgtggtgttcccggtatcatggcttcccgtaccatcgagaacgacagagaccgtaagatgacaattatgactaccacatttattccttgtggtgctaagcttcctttcatcgccatggtagcaggtgctatcttcggcggcgcagcatgggttgctccttccgcatacttcctgggaatcgcagcaatcatctgctccggtattatcctgaagaagaccaagatcttcgagggcgatcctgctcctttcgttatggagcttcctgcttaccactggcctaccgtaggtacggtactgcgcagcatgtgggagcgtggctggtccttcatcaagaaggcaggtaccatcatccttctgtccaccatcgttgtatggtttactacttacttcggattcaccgaggacggcttccgtatgctggctgaggatgagatcgatatgagtatcctgggcaagatcggtcagtgcctggcatggatcttcatccctcagggcttcggtaactggcaggcaactgttgcatccatcaccggtctggtagctaaggagaatatcgtaggtactatgggtatcctctacagcgcaggcgagggttccatatatgctaacatggcatctcactttactgcagcaagcggttatgctttcctggcattcaacctgctgtgcgcaccttgtttcgcagcaatgggtgcgatcaagcgtgagatgaacaacaccagatggttctggatcgcagttggttatcagtgtggtctggcatatgtggtatccctgtgtgtaaaccagatcggcagcctgatccttaacggctctttcggtatcggaactgttgtagcattccttctgatcatcggcttcatttatctgctcttccgcccttacaaggagagcaccactctgaaggttgacaccgagaaggctgcataagtaaaataaatgatagaactttcccacaggtgtccggcgtgactgcttgcaggcaaagccagatacctgtgagagaagtaaacagatagaaacgtaacattacttgcggatcttcgataagaggatccgcaggatttcaaaataagagtaaggaggcagtctatgggaaccgtagttgtattggcgatactggccggtgtagtcgcattgattgtccgcaaaatgataaaagacaaaaagaatggaaaatctattcagtgcggtggcgattgcagccactgcggaggtcattgtggacactaaggaacaggtaagctatcagaccacgaaaatgcagagagagatcatattgaccaagctgaaagaaaaaggctgccgtattacgaagcagcgtctccggctgattgatattatcctccagaatgaatgctccagctgtaaggaaatcttctaccgggcattggaagaggatgacaagctgggagttgcaaccgtataccgcatggtcaacctgttagaagagatcggtgctatcagccgtaagaacatgtataaggtagcttactctgaaaattgtatgatggaaaatgcctgcaccattgagttggatgacggttcgatacatcatctttcagcaaaaaaatggaattccgtgatccgggcgggactgaagtcctgcggttacctcgtagaccagagggtgagtaacgtgacgatcaggccgtgtgagtgtgcggaacaggtatgttaagacaagagtataataagtagaaagtaaaccggtgtgaggggcaggcggtctggagagacagcactgcttcctataccggttttacttatacgggtggcaggaaaatattaatctgcatgaaattttgacagatattgtagcaaagatacttctgagaggagtatatttttttgaaagaaaaacaataaggagagtgaaaaaatgggaacttatattatatgcggtatattagtaatagtagttattgcggcgttgctgggatccaaaaagcatttcaagggagaaggcggatgctgtggcggaggcggagatgtgaagatcaagccgaagcacttagatactatcgtagcgaccaaaaagcttcatattgaaggaatgtcctgtgtgaactgccagaatcgcattgagaatgccctcaatggcatggcccaggtcaatgccaaagcaagctttaagaaaggcgaagcaatcgtaaagctcggcgcagacatccccgaagacgaactgcgcgaggctgtggagaaactgggatacaaagttacttccattgaattgatgtaaatggaaagttagttaaatacattggcaaaatccacgaactcccggagcatgcgatacacatgtct

SEQ ID NO: 5503 - DNA, 87142 bp, Unknown
  gut microbiota DNA sequence
cgaaagcttgttaatacactagtagccacggctgggtgtaagaataagctgaccgtaaacagacgccggcacttagcgagggtactttcctcgcttatgtgccgttgcgatctgtttccgagcgaaagcgatgtcagcgtttcttatacccggccaagggctacggagatttgaaaacagattcattaattaactttcaattcactgtcattatcgaacgaaagaactacatcatttattcaatgatcataacgcaaatcccattcagatattacccgttctctttcgcaaaatattccttcgtcagtttcactacaacaccggacagcaggaagacagcgatcaggttggggatgaccatgagtccgttgaaggtttcggcgatgctccacatcagtccgaggttcattgtcgcgcccacgatagcagtgagggaatacagcaccatgaaaggcatgttggagcgggaaccgaagaggaattcgatacatcttgtaccgtacagtccccagccgatgatggtggagaaggcgaagcagcacattgccacagcggtaaagatcgatacccagttgccgtagacagtggtgaatccgctgatggtcagttccgcaccggcagcttcaccgtaatttacggatacgccactgcacaggatgaccagagctgtcatggtacagatgatgatggtgtccacgaatacctcaaagatgccgaagaatccctgttttaccggtttcttcgtatcggcacaggcatgagcgatggatccggtaccaagaccggcctcgttggagaagataccacgggacacgccctttttcatactcatgaagaagcttccgaccacaccgccggtgacagaggcaggatggaaagcaccttctataatagaagcaaatacagtaggtacagacttaatatggaaaatgatcacacccagtgccagcacgatatacatgatcgccatgaaaggaaccagcttggaggtaacattgccgatacgcttgatgccgccgatcaggatcagggcgatgatgatcgccagtgccacgccgatgatcaggttgacaagcttcacagcatctgcaggcagtacgttaaagctgctcagagcagaatcaatggcagtagtgatagtgttgacctgtgtggcattaccggtaccgaacacagccagcacaccaaaagcggcgaacaaatacgccaggaagtgccatttcttatccagtccgttcttaatataatacatagggccgcctaccaggtcgccctgtgcattggtctcgcggaagtgtacagcaagtgttacttcggcaaacttggtgcacatgccgagcagcgcagatacccacatccagaataccgctccggggccgccgatagcgatagcacctgccacaccggctacgttacccgtgcctaccgtagcggcgagagcagtacataccgcctgaaaaggtgtcagggctccgtcggaggcctcttttttcttcatcatacgtcccagtgtcaccttcatggaataggggaactttcggatctgcaggaagcgcgtccggatacttaaatacagaccgacaccgatgatgcagatcatggcggggacaccccagataaaattgttaacaacactgttgactgcttcaattgtggataacataaacagaatctcctatcatttgtggatataaggcaaatacttttacagattaacatattttcacatatgttgccacaaaaatcttgatttccgggcagtgtatcatggaatctgttttttcgaaaagataaatatttgttgcatggaagaaaattcacaattattataatagaaaagggataaataaggaggaccaaaatggaagcagatatcagatggctggacgatccgaaggtgttccgggtcggtcagctgccagcccacagtgatcatcccatttatggggatgtggaggaagcagcagaaggtaaaagctctctggtgcagtctctggacggaaactgggagttcgcctattcggtgaatgcgaagagccgtccggtggatttctaccgggaaaatgccgacagtgcacagttcgatacaatccgtgtgccgggacatatcgaactggcaggttatgaccaaattcattatatcaataccatgtatccctgggaggggaaaatctaccgccgcccggcctacacactgggaaaaggtctggcagaaggtgctttcagtgaggcggagtataatcctgtaggaagttatcgcaagcgttttcacctggcggaaggcctgcggggaaaaagggtgatcatctgtttcgaaggtgtggaacaggcgatgtatgtctggctgaacgggcatttcgtgggatatgccgaggacagctttactccctctgaattcgatctgacaccttatattaaggaaaaggacaatctgctggcggtggaagtgcataagcgcagtacggctgcttttctggaggatcaggatttcttccgctttttcggaatcttccggagtgtggaattatatgccaagccgcagtggcacgtggaagacctttgggcgaagccttatttttccgtagaggatggaaaaggcacgttagatgcagcaatcaaaatatctgctgagggtgagggacagcgtccgggcaaaatgcgtgtatgtctgtcggatgccaacgggaaatgcctgttggagcagacacagattttgcagtcacaggtggagcagacgctgcaccttcgggaaacattggcagaaaaagtaatcccctggagccatgagaattcgtacttatatcagttggagatcactctgacagacagtgagggggaagtgacggaagtggtgccatataaaataggcttccgtgattttgcgctggatcctcaggataaggtaatgaagctgaatggtgagcggctggtgatctgtggtgtgaaccgtcatgagtggaatgcagcatccggcagatgtatttcaatggaagacatgaaatgggatattgcctgctttaaacgcaacaatatcaatgcggtcagaacctgtcattatccggaccgcaaggaatggtacggactgtgtgatgaagccggaatctatgtgatggcggagacgaatctggagagtcacggctcctggcagaagatgggagctgtggaaccttcctggaatgtgcccggttccctgccggagtggaaggaagcggtagtggaccgtgccagaaccaattttgaatgctttaagaatcatccttcgatcctgttctggtctctgggaaatgaatcctatgccggagatgatattgctgcgatgcagcagttcttcaaggaaaaagacgatcaacggctggtacattacgaaggtgtcttccacaacagagcttatgaagaccggatctcggatgtggagagccgcatgtacgcatacccgcaggaaattatagattatctggaacatgaccccaagaaaccctatctgttatgcgaatatatgcatgacatgggcaattccctggggggaatgaattcctatatggacctgctggaccgctttgagatgtaccagggtggatttatctgggactatatcgaccaggcgctgtgggtaaaagacgaagtgacgggacgcagagtactgcgctacggaggagattttgatgacagacccagtgattatgaattttcgggaaatggaatcttattcgcagaccgtagtgaaaaaccggcaatgcaggaggtgagatattattatggcactcagaatcgtaatcggtgatgtgactatcggtatacatggacaggatttttcctatattttctccgtgggctccggaggcatggagtctttatataaggatggcaaagagtggctgtacaggtctccccgaccggctttctggcgcgcggtcacggacaatgacagagggtgtggattcgcattccgcagtgcagtatggtccgccgcggatcgttttgtacgctgcagccgggtagaggcccggatggatggagaggagattgctatccctctggcaccggcgaataataaatacaccggaaaagagacctgcgacagattcgagatcatctatacgtatgagacgccgacagttccggcgacggaggtgacagtgacttatacggtggaagcagacggcagaatccatgtgcaggcagattattgtggaaaacagggcctgccggagcttccggtattcggaatgcggtttctgatgcccaccgcagcggagaggtatacctatgaaggattgtccggagagacctatccggaccgtatggcaggaggaattcccggtgtgtatgaagtacagggcctgccggtgacaccttatatggtgcctcaggactgtgggatgcatatgcagaccaaatggctggagatcgtcaggaagacttccctggataatacagaccgtggagaaagaagcagccgtttaaaaataaccgcggaggagggaaaacacttcgcattttcctgcctgccttatacggcacaggaactggaaaatgccatgcaccacgaagaactacctcctgcccgcaggacggtggtatctatcctgggagcagtgaggggcgtgggtggtatcaacagctggggcgctgatgtggaagatgcttatcatatcagcggagaacaggatatcacttacggattctggatcgagtgaaatacttccccaatcggaccctgaaccaggagatctgcgtggctgtctctgggggtcgcactcttgttgatgaccaccagcttatctccctgaaaataatcaattaacccggctgcgggatagacagccagagaagtgccgccgatgatcaggacatctgcttcgtggatgtatctgacggcggcatttaacgtcttttcatccagtccttcctcgtacaggaccacatccggtttaatggtgccgccgcatttctcacagtgcggtatgccggtgctgtttaagatagcatccagaccgtagaactgatggcatttttcacagtaattgcgcagtaccgagccatgaagctccaggacagtcctgcttccggctgcctgatgcagtccatcaatattctgcgtgaccacagcacgcaccttcccggcacgttccagctcggccagctttttatgggcagcgttcggctgagcttttgggaagagcattttattccggtaaaaacggaagaattcttccggatgggaacggtaaaagctgtggctcaatatggtctccggaggatagtcgtattgctgatggtacagaccgtccacacttcggaagtccgggatcccgctttcggtagagacaccggcaccaccgaaaaatacgatattgccgtaggtatcaatgatcttttgcaattcctgaatctgtttgttcaaattttccataagttattcctccttttccttatgagaattacgaaaattttgaaaatattgtttccgtatcggttgcaggctggcggcagtagtaataaccgccagatatttgaacatctgcagcagaatgtagacgccacaggagtagaagctgttgatgaacttttgcatgtcttcggaaaaccatgcggtgaacaggccacagccgaaacgcagcagaacggcactgagcagaatcccacaggtcaggatccacagttcgagatcttttgtgtccccatggaaaagtccatggatcacgcggacggtcagcacacaaagggcaagcagtgccagcaggaacatgggctgtcccaacaactgatagatagcgttgctcttattcagaagagataccataccggaactgtagatctcattgaaatcatataaggtctcatcctcaatggaatcataatcggcagcctgaaactgtgacagtgtggggtacacggtcaggcaggaggcaaaggattccatacgacggatatccgacagccggccggcacttttggcggaactgctcaaagcacaatcggtgtatcctgcaattttccagatattctgcaaagtatcactgaggataccgggaatttcttccggcagtactccacgggattgggaggaaaaatagagggcaccgtccgtcttttcggtcagctcgccactggctacggctgcccgcagttcggagacgacattgccataaaaggtctgtgcactgacggcattcggggcaattcccgagtcctgtaccgcatcccgcagtacccagctgaagtgatcgccgggaatctcaccatcccttgtggcccagtcttcggtataactgtccaatagtggctgaatctgctgcagagtgggactggctgcttctgctctgacaatagtatcccgggagatccagatgtcgggattggttctcgtattgctgtccagatgatacaacagggacatcagctctgcaaaatttccctccgtgcggtcgttgttcaggaaaacaccgtaatggatccggttgacgacggagacaccggtgttggcgccgaacaggagaaggagtggcactaacatggtcaggcagtgaagcagaagtgcctttgtgtttaatttcttatgcaggaccagaattacataacccacgttccataccgtcataacggcgataaacggcaggatccagacggaatcctcccggatctgccagaaaaaggcaagagtcagtccggtcaggaatgcccagggcagctgttttttcaaggggagctttttgcgcagagtcagcccgatcatgctggaaaataccaccaggaccattcccggaacgattgccatgcggtacagccgctgcgtgaccaacagcgtgaggctgatgggggaaaacaacaggagcagatagagaattgcctgcccatagggattctgccatctcacagacactgcgcggacaaacagccatgcaccggccgcctgcaacagcgacagcagaacagagtagggaaggcacagctttttcgccagtaccagaaacagcggatagccgattccttttgccagtgtataagaatcgtagctgccaagccacacgccgctcagcagatcgtaagcattctcgaacagcagccggtcatcatagcgctgatttgccaggatcatataaggaatcctcagtccggcgaggacgcggaaaacggtcatcaccagcaggaggaagggcagatatcgggaaaaatcttttttggataatgtggtatgcataaggtttccatccgtttcttttttcagaagtagtatgttaattacatcatagtgttaggtgagtgacaagtcaatcagtgtctggtaaagaaaattttcgaaaaaattaagaaaaccctaaaatatgtggtattgagactgccgtaggagatatgctacaatagatcgtaggaaagaatggaggcagtatgaaaaggaaccacttgattccgagggaaaaaagtaaaaaagtgatctatctggatcccagaggcagaggcgtgggagaaaaacattacggagcaagggcgttatatgttctggcggtgctgtgtctgctgtactgtgtggggatcggtctttttgttgccttcggcagctactttttcctggtctggggtgtgattggtgctttttgtgctgcatgggcatgggtgctggcccacagaaccgtatattactggatcccccgatggctgcatattacattccggagtcttgtgatggcagggatggtattgcttcttattatagaagggatgatcgtcagtcagttccatgccacggcgcaggaaggtgcggattatgtgatcatactgggagcccagtggaagacttccggccccagttatgtgctacagaaacggctggataaagccatagaatatctgaatgccaatccagagaccaaagtcatcgtgtccggtggacagggatacaatgaacccatcagcgaggccgagggaatgcaaggatatctggaaaccgccgggatcgatccggagcggatcctcatggaggatgcttccacgaataccacgcagaatctgattttcagcggagaactgctggacaaatcagaggacagtgttgtggttattaccaacaattttcatatgttccgggcgttggctattgcgagaaaacagggctatgcccatgtagagggactgtccgcgggaacttatcccgttaccgtaccgaataacctgctgcgggaggctttcggggtagtgaaggactttatggcaaaccatttataatacagaatcacaggcctctgtcgcgacatgtttgcggagaagtggcgatacaggcaggaaaagaagaggaaaatgttatggatattaatgtgggagatgtattgaaactgaaaaaacagcatccctgcggcagcagagaatgggaagtactccgtgtgggagcagatttccggctgaaatgtctgggctgtggacaccagatcatgatcgcaagaaaactgttagaaaaaaatgtgaaagaaatcgttgaaaaatcttgaaaagtggacaggaatatggtatcatgttccttcgtgagacactttattccttgctcatatataaaatatgggccagagaccaaaaggaggtaactaacatgaacaagtacgaattagccgttgttgttagcgctaagatcgaggatgatgagagagcagccgttgttgacaagtgcaaagcactggttgagagattcggcggcaacatcacagaagtggacgagtggggcaagaagaagcttgcttacgaagttcagaagatgaaagaagctttctactacttcatcagatttgaagctgagagcactgttcctgcagagatcgagagccgtgttcgtatcatggacaacgtgatcagatacttatgcgttagacaggacgaggcataaacagaaagcgagaagcgaaatatgaataaagtaattcttatgggacgtttaacaagggatcctgaggtaagatattctcagggagctaccgcaacagcgattgctcgtttttccatagcagtagatagaagatttaagcgtgacggtgagccggatgctgattttattaactgtgtagcgtttggcagaaccggtgagtttattgagagatacggccacaagggaacaaagttcgttgtggaaggacgtatccagaccggaagctataccaataaggatggacagcgtgtgtatactactgatgtagtggctgagaacgtagagttcgcagagagtaagaacgcatctgccggcaataatgacggcggataccagaacgctggctttggtggtggtaataatgcccctgctccttccggagcaggtgatggctttatgaacatccctgacggcatcgatgaagaattaccctttaactaagtttcagtgacaagcggagctgacacccgcctctgccctgacagattccgataggaggtaataataatggcttttaataagactgagaagaccgattctccgatgagaaaaaaaggcggtatgcgcagaagaaagaaagtttgcgtattctgtggtaaagataacgtaatcgattacaaggatacagctaagctgaagaagtatgtatctgagagaggtaagatccttcctcgtcgtattaccggtacttgcgcaaagcatcagagagcactgaccgttgctatcaagagagcacgtcacgttgcacttatgccttacgtagctgaataattcagactaagatgagagaccagccctttgtggctggtctttttgtgtataccatgagccgagtacagggtaacagttgcgtttgacgggggtcggatgctccattataataaagagagaaaattattggagaaaaggtatcgcaaaagcatgagtacagataagcatagattaataccaattactgatctgcatacaccggaactggagatctacaatgaacgcagggaggtacaactttttcattattatgagccagagcgggggctgttcattgcggagagccccaatgtgattctgcgggcactggcagcgggatatgagccgctgtcacttctgatggaacagcgggaagcggattcggagaagggcagggaaatcctggggcggattgcagaggtgtctggggaaattcccgtatatgtggcatccaatgcagtgctgtcggagatttccggctttaaactggcgagaggaatgctctgtgccatgcgcagaagagcattgccgaagatggaagacttgtgcggaaatgccagacgcattgctgttctggaaaatgttgtaaatcccacaaatgtaggcgcaattttccgttctgcggcagcgttgggaatcgatgcagtattgttgacgggaggctgcagtgacccgttgtaccgtcgggcagcaagagtcagcatgggaaccgtattccaggtgccgtggacgatcctggagacaaaggactggccggagcataccatggaacagctgcggaagatggggtatcataccgtggccatggctttaaaagaagacagcttgcggccggatgatgagaaactgcataatgtcgaaaagcttgccattattctgggaacggaaggggaaggactggcagcggataccattgcggactgtgacgatacggtgtgcattcccatggcccatggtgtggattctctgaacgtggcggccgccagcgcagtggctttctgggaactgtgtaagtaagagaacggctctccgtccggaaaagctgacaaaaagcacaaatttgacagaggaatattgtctattcgtcaaaataatatggtggcggagcgggttattatttgttataatagaagttgtcgaacgcaaatattgagaggtgttctttcatgaaaaaacgaatcagactgaaaggcaggatccgtacatatatccagttcaccctatatctgggcctgttactgctggctatcgatgcggcggtattcatgttggatttccgtgcaggactgcttaccttcggatttacgattttttattttgcaattaccctgacgctgtatttctacaacaagccgatcatcatgaacgagttgatcagctttgccacggaatatggtcagatccagcgaaaactgctgcgggatctggaattaccatatgcccttctggacgattccggcaaggtgatctggaccaacattgcctttgagaatgtggtgcatcagcccaagggctacagtaaatccatcacttccctgtttcctaccattacccgggacaggcttccggacgaatctggtgtggacgaggcacagtatgaactggaatacgagggctgtgagtatgtggccaaattccgcaagatttctctgaaggagatggcggaacacagcgatatgatcgatgcagaaggctataacggttatctgattgccgtctatctctttgatgagacggcactgcatattgcactgcaggaagtggatgaccagagtctgagcgtaggcatgatctatctggacaactatgaggaagcgctggagagcgttgaggaagtccgcagatccctgctgatcgcactgatcgaccgtaaggtgaacaagtacattgcatctctggacggtatcagcaagaagctggaaaaggacaagtatctggtaatcatgcggaaaaaagcggtagcacagctgcaggagaaccgtttcgatctgctggaagaggtcaagaccgtaaacatcggcaatgaaatggcagtgaccatcagtatcggtattggtctggatggcctgacttatgcacagaactatgaattcgcccgcaccgccattgatctggcactgggacgtggcggggatcaggccgtgattaagaccccggagagcatcacctactacggcggcaagagtcagcaggtagagaagaatacccgtgtcaaggcaagagtaaaagctcatgccctgcgggagattatcaccggaaaagaccgtgttatcgttatgggacaccggatgccggatgtggacagcttcggttctgcggtgggtatttaccggatcgcccagacattgggcagaaaggctcacattgtattgaacgaggctacgacctctgtacagccgctggtggagctgtttaagaacaatccggaatatgacgaggacatgatcatcaccagccagcaggccattgatatggcaggcagcaatacggttctggtggtggtggatgtcaataagccctccatcacagagtgcccggatctgcttcgcttctgcaaatccgtagtagtactggaccaccacagacagggtacggagaccattgagaatgccacattgtcttatgtggagccttatgcatcctccgcctgcgagatggtatccgagatcttgcagtatacctacgacaatatcaagatccgtacggaagaggcggattgtatgtattccggtatcatgatcgataccaataactttatgaccaagacaggtgtccgcaccttcgaggctgccgcattcctgcgcagaaacggtgcggatgtgacccgtgtgagaaaactgttccgtgaggatgcagcagaatacaaggccaaggcggatgctgtcagtcaggcagagatctacaagcagttctttgcaatctctctgtgtaccgcagaggatctgcccagccctaccatcattggtgcgcaggcagccaacgaactgctgaatatcaagggcattaaggcaagttttgtacttaccgattatcagggcaagatttatgtcagcgccagatccattgatgaggtcaatgtacagatcatcatggagcgtatgggcggtggaggccacatgaataccgcagcctgccagatggaaggcgtgggactggtagaggccattggcgtattgaagaacaccatcgacgacatgctggaatccggtgagatctaagggattccgtttgaaaagttttaccatataaaatagaagattcaggaaaggcaggttgatcctatgaaaattattttacttcaggatgaaaaaaagctgggaaaaaaaggtgacatcattgaggccagcgaaggatatgcaagaaactatattttaccgaagaagatcggtgtggaggcaagctccaagaatctgaacgatctgaagctccataaggcaaacgaagagaaggtggcacaggagaatctggatgcggcaaaggcgctggcaacagagctggagaccaagcaggtcgtggtcaagatcaaggcaggagagggcggaagaaccttcggttctgtatcctccaaagagattgcaactgcctgcaaggaacagcatggtatcgagattgacaagaagaaaatccagctgccggagagtctgaagaacttcggctcctatgaggtaacagtgaagcttcatccccaggtggcagcgaagctgacggtgaaggttacggaggcgtagacgaccccatgcccgcaatggatgaaaatgtaatcaaaagaataatgcctcacagtttagaggcggagcagtcggtcatcggctctatgttcattgacgcggaagccattgcggccgccacagagcagatctccggagaggatttctacaacaggcagtacggtgtggtatttgacaccatcgtagagttgaacaatgaaggaaagcccattgactttgtcaccttacaggatcggttgcgatccaaggaggatgtgcctcccgaggtcagtggactggatttcctgacgaatctgattgcagcagtacctacttccgccaatatcaagtattatgctggaatcgtggcggagaaggcgacactccggcgtctgatccgtaccaatgaagagattgccaatacctgttatagtggcaaggagagcctggatacgattctggagagtaccgagagcaagatcaatgaagtggtacagaagaaaaacgtcaaggaattcgtaccgattcgtaccgtagtcatgaacgccatggacaagatcgagaaggcttccaaactgcacggaaccgtcacaggtattgccaccggattcgttgatctggactatcgtaccgccggaatgcagccctcggacctggtgctgatcgcagcccgtccttccatgggtaagacggcgtttgtattgaatatcgcgcagcatgtagcatttaagcagaatctgccggtagccatattcagtctggaaatgagtaaggagcagctgatcaatcgtatgttttccctggaatccagcgtggacgcccagaagctccgtaccggccagctgaatgaccaggaatgggaacgactgatcgagagtgccggtgtcatcggcaagtccaagctgatgatcgatgatacccccggtatcagcattgccgagcttcgttccaaatgcagaagaatgaagcaggaaaacggtctgtccatgatcatcatcgactacttacagttgatgtcgggaagtggcggaagaagcagcgattccagacagcaggagatttccgatatttcgagatccctgaaagcagtcgccagagagctgtccgtaccggtgctggcattgtctcagttgagccgggctgtagagcagagaccggatcatcgccctatgttgtctgacctgcgtgagtccggagccatcgagcaggacgccgacgtggtaatgttcatctaccgtgatgattattataatcacgattcgccggataaaggtatttcggagatcatcatagccaaacagagaaacggtcccatcggaaccgtacagctggcatggctgccggaatacaccaagtttgccaatctggaaaacgacagaaaaaaagatttctaagtatattacgaatacagaacataaaatacgaaagagaacaagtgagggagattccccacacctgttctctttcgtatttttattatatgatgccagggtcaaaaggtctaagcccacatgagcttgctcataggtaggtgaaagaccttaggacccgccccgatatgagcataaaagtgggatgataatcccacgatatgcgaatattgggtagggtgctatgtgccagtggcacatgtctagcacggaccgaagcggagcggagacgtgggagtgcgtagcacggaacaatccgtaggcatcaaagtcgggggcttttgaccccgacatcattatatatggctatgtggaaaggaagagaatatgggagagtatttattgatttcggatgctgcaaaacaggtaaaggtggagagccatgtacttcgctattgggaagaggaattacatctgcccatcaaaagaaacgagctggggcaccgctattatacgaaggaagacgtggaacggttcaaagagatcaagagcatgaaagaaaggggattacagttgaaagcaattaaaatgatattaaaggacggacggctggacgtactgccggaggaacgggaaaaagagcctgtagaagcccggaaagagccggcagaagtccggacaccacacatggccattgagatcgttgataaaccggtggataaagagatgccggtacagccgcaggagaggatatgtacggtgccggagaaggaaggactgcagagtgaaagcagggaagagaaggctaaaaggctccagtggatcctgcaacagttgatccgtgaggcagtacgggagaataaccaggacctttgccgggaactcaaggaaagcatggtcaaggagctggattatcagttccgcagcagagaagaacgggaagaggagagagaccgcagactggaacagcgcagcgaggagtactatcagaagatggacgagctgttgcggaaaaagaccaggggacaactgcggaaacagcagaaagaggagagaaggccgaaagtggaaaaagagtccacagagatcgcagacaaagaaaataccggcagggaaattaaggcagaaaaaaagaaaaggcatttcattttctgaaatgccttccccggggtacgttctgaatcaggaattaatcctctgcgatagcaccaacagggcactgacctgcgcaggaaccgcagctgatgcacttatctgcatcgatttcaaactttccgtcgcccatgctgatagcgccaacggggcactgtgcctcacaagctccacatgctacacaagcatcaccaataacaaatgccataatcttttcctcctattttgcgtgtatcaaatctcttgtttgatacaaatttatcaatataaccaattgtattgtaatataaatgggctttgaatacaagacttatttagtattttttatcaatagttacagttgcttatttatatttattgaactccagaatcttcttcgcgttctggatcctctcttcggtgggcggttctacaccctcaagcttgtacggaatccccagttctttccacttgtactcacccagagtatggtagggaagaacttctactttcatgacggtatccagagtatcaataaattctcttgtctttttcaggtattcgtcattgtcagtaattccgggcaccagtacatgacggatccacatgggaataccctgctcggaaaggtatcttgcgcagtctagaatattcttgttggtatggccggttagcttcttgtgttcttcatcatcaatatgcttgatgtccaacatgacgagatcagtatatttcagtaattcattgaatttggagaagaaaggctcttctctggtaaaaggctgtccggaagtatcaagattggtattaatgcctctctcgtgggccttgcggaaaagatcgatcagaaaatcgatctgtaataaggcttcgccgccgctgacagtgatgccgccttctttgccccagtagctgcggaaacgctctgctttatccagaagctcgtctgctgtcatcagattgtcagtgtcgggattccaggtatctacgttgtggcaatattgacaacgcatattgcagcccttgaggaaaataagatagcggattccgggtccgtctactgcgccgaaggattctaatgagtgaattctgcctttgatcattgtaataatctccattctctgccgtgcaggcagctgaggggtgagtgttactcttgcgaatgcaagcattcgaagagcatccgaaaatatttaatggttctgaatagtgtacccaaaaagggaccggacattactgcccggccccatatacatcaattatctcaaaacctgtaagaattacagactcttatggcaggttcttgcgataacatcatcctgctgctccttggtcaggctgatgaacttaacagcataaccggatacacggatggtgaagttagcgtactcaggcttctcaggatgagcctgtgcatctaacagcttctcggtaccgaatacgttaacgttgaggtgatgagcaccacgatcgaagtaaccatccattacacgtaccagagtttctttctgctcgtcaaggttgtgaccaagagcggaaggagccatggtctgggtattagagataccatccagagcatactcataaggcagcttagctacggagttcagggatgcaagcagaccgctcttctcagcaccgtaggaaggtgatgcaccgggagcgaaaggcttgtaagcttctctaccatcaggcagagcaccggtagccttaccgtatacaacgttagaggtaatggtcagtacggaagtggtaggctcggaatttctgtaggtgtggttcttcttgatcttctccatgaaggtcttcagcagccatacagcgaattcatcagctctgggatcatcgttaccatacttagggaagtcgccttcgatcttgaagtctacagcacaaccctggtcatcacggataaccttaaccttagcatacttgatagcggacagggagtcagctacatgggacagacctgcaatgccggttgcgaaggttcttcttacatcggtatcgatcagagccatctcagctgcttcgtagtagtacttatcatgcatgtagtggatcaggttcaggatgttaacatacagagatgcacaccagtcaagcatgatgtcatatttatgcataacttcgtcgaaatcaaggtactcggaagtgataggagcgatttcgggaccacactgcatatgcttgccgttcttgtccagatgcttctcatccttaccaccgttgatagcgtacagtaagcacttagccaggttagcacgagcaccgaagaactggatctccttaccggtctgagtagcggatacgcagcagcagatgctgtagtcatcaccccagataggcttcataacgtcatcgttctcgtactggatggaagaagtatttacagaaatcttagctgcgtacttcttgaagttatcaggcagagcgctggagtacagaacggtcaggttcggctcggggctgggtcccatgttctccagagtatgcaggaaacgatagtcgttcttggtaaccatatgacgaccatccatgccgataccaccaacttccagagtagcccatacagggtcgccggagaacagctggttgtaagaaggaatacgagcgaacttaaccatacggaacttcatggtcatatggtcgatcagctcctgagcttctttctcggtcagggtgccttcctttaagtctctctcaatatagatatccaggaaagtagagatacgtcctacggacatagctgcaccgttctgggtcttgatagctgccaggtaaccgaagtataaccactggatagcttccttagcggtggtagcgggaccggaaatatcgtagccgtaaatcttagccatttccttcatgcccttcagagccttgatctgatcagcgatctcttctctcaggcggatgatgtcctcggtcataacgccggtaccgcagttcttcttatcctcttcctttttctggatcaggaaatcaataccgtacagagcaactcttctgtagtcgcctacgatacgtccacgaccataggtatcgggaagaccggtaacgatatgggtatgacgagcaaccttcatctcatcggtataagcatcaaatactgcctggttgtgagtcttgtggtattcgttgaagattttgtcatatttagcgtttacttcgtagccataggtgcttgcagcctgctgagccatcttgataccaccataaggcatgaatgctctctttaaaggcttgtctgtctgcagaccaacgatctgctccagatccttcatagattcatcaatatagccagggccataagcggtcagactggatacgacctctgtttcgcattccagaacaccgttatgctcacgctcttccttctgtaactcctgaagtctgccccaaagcttattagttgcttcggtaggtccctccaggaagctctcatctccatcatacggagtgtagttggtctggatgaagttacgtacattgacgtctacatcccagtggccatcttttttaaaacctctccatgcttctgccatgaaaatttacctccttctggtaaaaacaattaatattatcaactgagagtaccagttgcgctggcatcccaagctgtttctttacgataaaagtgtactacctgacaagggtaagtgtcaacctttttaggaattgttccgagttttgtacatcagcaacaaagcttcctcattcataaaagcgctttgtccataaaataccgattatctgactctatgtgcaagcaccctcgtcagaaatccggtattttatgtcagagctgatgtattaagaatattcttgtaaaatatgggggaaagtattatactaaaaaagccttatacggcagaaaggagaccgatatgaccggagtaacaaaagacatgaccattggtgagatcttacgtgccaatcctgaagtagctcccgtactcctcgatgcaggaatgcattgcctgggatgccctgcttcacagggagagactctggaagaggcagctatggtacatggtattgatgtagatgagcttatgaaagtgatcgaggaaatgtaatttttgtatttctgttttggaaacatcgcctgaccggggcacacaggtgaaacaaagtatttatggaatttcatagctcagatttccgcgcaatcgaaatgtgtccgtcgattgcgcggatttgagaaatcaaaagaattcaaggaattcagatcatcggcctttggccgtctttttttgcctttttcccttagatattatctgctccgatattatgaagtatgactagcacggtagattctttcaggggaggctaatcctgtggtactttcagttcccagcctgaatgaatcagagcaggattgcggatcagttcccggttcagggaaacgatttcagccacggagcagccgcattttctggcgattgcccagagggtgtcgccctgtctgacgatgtatatcccgcgtttcttattctcaggcaggacagcatcgggagtgccgtctgtgataggcgctccgctttggggaatcttaagctgccagccggcgtgaatccggttcgggttcttgatccggtcactgttggctgccacgatctcggttatggagcagttgtattttctggcgattgcccagagagtgtcacctgcctgtacggtataggtcatataggaggtggtgtttttcatgacaggagagggattctcacggtcagccttttcctcggagccgctgtcagtactttcctgttcggtgtcagcattcacatcatagtagagcttcaaagtcacgatatcctccagactgctgatcttcttcaacgttccgctggcggtggagattgccggattgtaggtaaagccttcataggttttcggcgttgctgtgacggtatcacctgtcttccctgcggaatgttctgtttccgccagcgtgtagccgctgccgtccgtcttgtagtgctccacgatataattgatcgtgtttccggagatgatgggagtcgtgtttcgcgtccattttgcgtagaacgttttatttcccgtatcggtacctgtgatctctgtgacgggtgaaccggaaaagttgctgtctgcgtaccagccgtcaaagcggtatccctcgcgggtaatatcattggtggtaggaagaactgtcccggtgccgtaagtgtagccggttacttcttttccgctggcaatcgtaccgccgtctgtctgcagcgttacggaataggtggagagttcccattttgccttgagggtcatagtgcatttgactgtatccgtgtcaaagttccattttgtttctgtaccgttgttatcataataccagccttcaatactatgcccctctttggtgggaacaggatccggtgcggtgagtgccgctccgtccttactccaattcactttctgtgtgctgggctgatccccgttgtttgggtcaaaagtgatcacgagcgtaccgctcagggtggtggcaacgctgaaatcaccgtctaaaaccgtaccatcattgttcgtaatcgtgcctgtgaatgtgccgccgttaatggtaccactgctctcatttatgacctcattcgtgaatgtgcccttccggatggtaccggtgttggtcactttgccctggaactcagtgctgccggcggcaccctcgctgccggtgatcgtgccgctgccgtactcgttggtatcgttcgtcattgtgccggttattttgccgccgtcagcattcaggatgccaacgtttgttacatttgtgtagatttttgcattgtcgcatatagtaagaataactctctgagaggaagtattgtatacagagcttgcatcattcagattagtaggatcaccgatcgtgccccctgtcatggtgaactgattatcattcctcaccccgccgcttgaagcatattgggtgctgatgctggctttaatcgtaccgcctgacataataaaggatccagagttgtccacaccgccgctgtataatcctgtgcatgtacggattgttccgccgttcatgataaagcggccgatgatatttgaattccacagggcgctgatgtccacaccaccacccccggattgtgcgttgcagttgcggatctcagagccgggacccatggtgaatgtgcaccccggggagatagacacaccgccaccgttttttgcagcgcagccgataatactgccgcccgtcatggtgaatgtgctgttcttgccgatggcagagtcataggcaaggcgtacaccgccgccgagaccaattgccgagcatccgacgatgctgccaccggtcatggtcagtgtaccgccggcattaacaagcacaccgccgccatcattgtgggcataatcactgctaccgcctgtaataactccaccggagacggtttccgagccgctatcgtccagcttccacatgtcaatgtgccaggccgaatctttatagtccgggtaaaagttgtgtggtgtggatgcgttgctgtccgcaattgtcagattgccgcccgactctaccttaattacgctaccgcggccggtcatttttagtacattaccgttcaaatccagtgtcacagtacggttgaccgtcagtgtagagccgatatcgatatccccctttagtgtgatcccggaaatactgctatctgccagtgcggccgtcagttcctccgctgttgccacttccttcacaccgtttgctaccggcagtgctgcgtacagtccgttcagcatcgctgcagcttcatttcccgatgcgctttccggggatcccggaccctctgtggatgtcgggggattcgtcagatgtccggtttctgctgccgataccggcgtggagaccagagaaaataccatggaactgcaaagcagcgccgcatagaaccgaattttttgctttttcatgaatttttttcctcccattgttgtgatgcgtttccttttcccgtgccttgtccgcggtgttctctttcccggagtctgatacacagcacagtgatcatgactgctgtggagaaagaaattaccccaaccagcacataaccgccggcgtcttcatgcagcaggatagaaccgtacattccccgggcggtgatctgcgtctggccggctgctgtgtgcaccgttcccacaaggaacgcagacaatgctgtgcacagggcagacagccggcagatcacgcgacgcttcttccggcgatatttttcatgcacccgttttttcaccagttcgacccgcttttctgtatcatacatatcgttgaaaacctcccttcggaaagtaaagtcataaaatacatatgtccttcatctaattaggtacaaaaaaacgaaaaaactctcacctgaaattcaatttttacaaaaaaagttcttcaaaaaacaggagctgccgacagcagctccgcaaaagacaggattcagttgtgattctgggtaaggcggcgggtgatcagtttccctgccgtcaggatcagcacaggcagaatgtatgcgatatactgtatcgcaccgccataggcgatcagaagattataaattgcatgaaaagtgatggctgccccgagcagaccgcaggttccggcgatcttcagccaggtgcgctgccatacatacgccagtccaccgccgacgatggcaccacagattacgtgcatggcacccgttccaatgccccggaaaaagataaaggaaaaatgtccggctccattttgaatcagatagcagacattttcaaaggtggcaaaggaaagtgcaacgatgatggcggcattttttatcggcaccggttcaggctcaaatacaagaagataaaagagcagcggcaggagtttcatcacttcttctaccacaggtgcgatctctgcggtggcggcaatcgtatctgctgcgtaaagagcggcaaagaaggtattgatgtaagcggagagcaggcatgcccccattcctgcaagacagcacagaaagaatttggcctgccgcctacccatgcacagggcggcgatcaacaggggtgaggccatacagataaatacattttcaatataggtcatgtccgcaccgcctttcctgtggcaggcagcagtccgaaaaggcagaacgtcagcagaagatcacaccagcaatagggactgaagatagagtcgcccggccagaagcagccggtggtccacagagcgtattctaccgcaacatagcagaggattccgatgtgaaaataccgcaggttccgtccttttcccgtctgtgtctctgcgtagacaagaccgtggatggaacgataggagacaaggatcatcatgccgcaccagagcaggttggagagaatgtcaccaaaggtacagtaaaatgcgcacaacggaactccgatcagcggagccagcagggatttccgacaggaaaagcttctttcctccggggaggagagagtatattgcaggagacagagaaaaataacgctggagacccagccgaattccgatacataaaagatccgtggtgtttcggaaaacaacaacagatataatgtccagtacagggagcccagtgcgaaacagccataaaagcaaatcagcagaaaatatgacagtgtccgatgtctcagataacgaatgccgctcagacagaagcccagcaaagtaacagaaaattgcaaaagattaatgatcaattccattggcgcggtcccccctctgctctgcctgctcttctttgtccaacagatggacacgaaaacacaggatcgtcacgcatacgccgagaagaaatgaaagcagccctattatgatatattcgggtgcagcacctccgccgaggatcgttgccgccgtttcatatccggaggagatccccggcaccatttgcccggaaatcccggacatgacaaaggaagccccgaagatcacagcaaggcatgccgctatgcaggaaatagcaacgatccgccgctgtttccgccttttttgtcgctctttttccgcaatccttcgtcggacttctgcgatccgttcctcatgactccgcatttgttattccctcccgttccaataatccccgcagacgctcttttccccggtacattatattagtgatctgcttcacactttttcccataacttcagcgacctgccggtaactcataccctcaaaataggtcagataaagagcttctctgtaatccggatgcagttcacccatgcataaatgcaggatctgatttcgttcttttgtccggatcacctcatccaccagtttcccaccttccggctctttggtcagatcatcaagacagaagtgatgtcgccggatgcttttatggcgcaaagccatatgtcgcgcagctttatacaggtaagccctgaatccgccatcccggatatggggccttttggcgaacaggtaggaaaatacttctatcatcaggtcctctgcctcgtgaacgtcatgcagatagccgttgatgtataaggtcagtggattgtcgtattttctcatcaattcttccagccctgtttcatcgccgcttaaatattgtcggtataattcttcgtcggaaatcatattgtgtacatcctttccactgtaaccggcgttttgaccctttgtaattccgaatgtgtatggaattgcgtaagctgcatgcctacggattgcttcgtttattaaacatcattatatgcgaataaggttatattttcaagttatgcattttccggctcctttcccgtagccccgccgctgggagagacaggtataaaacaaccataaaaataagaaagtccccacagagtgggaactctcctgaatgttacaatctgttgttacattgaagtattagaaagacgctgtaaagcatgttcggcgatcagtgtggaacaatgttcctcaagaaaagtaaggcttgccggtgtggaacgcttgggaataccgtattcagagatgacattgcagacacggtcgaagacctcgcgatcttcttcgccctgcgtcaggatcagataatacccgtcggtaccctcttcgtgatacagagtgctgagcccatgataatgaccggcagccacgacggcagcgttgattacctgattcagagtatccatacggaacaggcgggatctgacagcatcgttttcctcgggagcgggagcggcgggagtctcggctgcagcctcctcattttggatacggcggaacagatccagaacctcgtctgccgtgctctcatcactgtcatcatcactgtcttccgtaacggaaggtgcaaagcgggaaaaacgggtgtccagttcttccggatcttccactttggtaatgatcagtacgatacaatccgcattcagagggatggcttcaatcatcaggggaatatcctctgcttcgaagccaaattcaaaattggcctgctgcatcatatcacggaacagagatttagctttttctgtgccgtaggcaagttcacttatttttaattcgcggctggcgagatcctcacgggtcagggtgcagcgaatctgattttcatttactttttctattttcatgcgacaacacttcctttctgctttcgcattggtatggtatatagcttatactttccctatattttagtcaatagaagctattcacagtttaaaaaaatttaataaaacatcttgtcaaatagcaggctgcagtgtataatccgacctatagatgcctctgatactccggtacggagaggaggtcgacagttttccattttttcttgttgatttaccagggaacgattcgttccagttcatccccttttttattttatgatgcagatggctgttaatgtatttgggaaggataggttatgctgatctgtaaaatatagtatggagatgtcttacaggcatatacgtgtctggtcataatatttcaacagatatttttcacgaacataattccaacattttcacacaaattactacaagtactgtcagaggcatttataagtaactattcagagccacgcaaatcgtgtcaataggtacgtggaatgcttgcattcgtaagaacatttgacatgatttatattgcgaatagtgttctgaatagttacgcttatatgtactagcggaaaaagcagcgttattttaaagtgtttcacgaatccttttggtaaaatatgctgcggacgggaggtgtctgtggaggaccgggaagctgtgactcccgggaagaagtttcccaggagaaaggtggaaaaatattttcaaaagcttcagaaaaacggcacagaattgtatgtcgacggagaaaaggtctcaccgtcgcaggcggcagcgtatgccgtcagagaagaaagcccgtatatggcagactatatattgggagaacagggcaaaatcagccaggtccggctggataaggtggatctgcgttaaagggtgtcagctcttgcccgggtaatactttgaaacagagaatgcgctgcggggatgcaaaacgggattgcctctctggctgtatcccgcagtgcaggatctgtctctattgttccttgtattatatagaggaattgtgatagaataaaactgttctgccgatagaagacggaacggaagaaaaggcaagaatggtgcaggcggcagcctgcggatgggagcacatatgaagaaaagaatactaccggtgatcatagcaatcctgctgatccttgtgatcgcgggcggagcactgggaaaggtgctgttggataaatattcctacagcaaagaagaggcagactggaacgaattttatcaggtgtcagagagtgacagaagtgccattattttgcaggacgaaatggtagaagaacaggcactgatcagagatgacgtatgctattttgatctggcaactgtccataaatatatgaacgaagtgttttatgcggatatgacggaaaaactgttgttgtacgccaatccgacagaagtgatccgtacgactttcggcgagacttcctatacgacaacagaaggcacacaggatgccggatatgtgatcagtttcgtggaaggggataccgtatatgtggcggcggattatgtgaagctgttcacaaattattcctatgattgttatgacagacatgtgcaggtctacaccgaatgggggaccagacaggtggcacagctgaaaaaggatacggcggtgcgtctgcggggcggtgtgaagagcccgatcctcacgcaggcagcgaagggagataccctggagattctggagcagatggagacctggagcaaggtgaagacagcggattccgtgatcggatatgtggagaacaagcgtctgggagatattacggaagagaccgagactccggtgacggattatcaggagccggaatatactgccctgacttctgacagcaagatctgcctgggctggcattctatcggcggtgcaggcggtaatgacactctgtactccatggtgtccggtacgaagggtatgaatgtcattgcaccgacctggttcagtctgacggatgagaacggaagtatccggaacttcggaacagcgaattatgtaaccacggcccacaatatgggcttacaggtatggggcgtggtggataattttaattacgccaatgagaccggaacggccatcagtactctgaatatgctgtcctccaccaccagccggcagaactttgtgcggaacgtgacagatgcagcagtcagcctgggactggacggcatcaatgtggacttcgagcagctgagcagtgactgcgggccgcattatgtggaatttatacgagaactttccattcagtgccgcaacaggggactggtattgtccattgccaactatgtaccgttcaatttcaatgattattaccgtctggatatccagggacaggttgcagactatgtcattatcatgggatatgacgaacactggcacggaagcaaggatcccggaagtgtggcaagcatcagctatgtatccggcggtctggacagaacattgcaggaggtgcctgcaaacaaggtagtcaatgcccttccgttctacacgatcctgtggaagaccgaaggcacggatgtgacggatgaatatattaccatgaacaacgaggcagacttcatgaacagagccggtgtgacggcagagtgggatgaggagacctgtcagaattatgcagaatggacctccggaaatgccacctatcagatctggctggaagatgcggaatccatcgcagtgaagctgaacatgatggctaccaagaatattggtggtgtggcggtatggagactaggttacggaacacaggcagcctgggaactgatcaatgcctatctgcagtaggaacagaataacatagtaaaagcccggtcccgcaagggactgggctttattgttgccgaaaactttatttcgcttcctgtacgttctttctgcggatggtatagcctccggtcatgcatacaactgcggcacccagaagccagaacattgcagaattttcaccggtctttggaacgttgtcatattcggaagaagtactgttctgtgtggcctgtgcaggagctgtggtctgtgtgggctgctcggtagctgcaggagctgcttctgcggcagcagcgggagcgggagcggtggtgctgtaatactttgcttcggtcttcagggatccgtcttcaatggccagcttacctgcggcgaaactgtaggcctcatagaaaacgctctggtcacggttgtctttggcaatcagatgattgacggtaccgacaccgttgatggtggcatgcagattattggatttatcatctgtcaggccgatcatttccagagtgtctacattgctgttgaaatttgccttggcatcgccatatacataggcatgagatacatcaccgttgacagcaccggaggtaccgctcaggaaatagacactgtcatagccgttggcatagactacgggaacaccaacagtattcttgaaggtcaggttgcccagacggacagaaaccttgagggccagggcattgttctccacatcgttgtcgatgacaatatagtcaccgtctttgatattctgctgcagataatacaactcgcggtcctgaacttctgcggaccagctggatgcttccttgtatctccactcggaactgctgtcggaatagttcagaacataggtggtgggctccgcagcctttacagtgatctttcccagaccgggaatagcaaagcatacggcagccagcgtgaacagtgtgacaaattttttaagtctcttcataagaaaacctcctgattgtctgtgagttattcctgtatgggaaggtagtaatcaccgggttctacttctttggcaacgactacgaaccggccctgctctacatggtatacgcaggtggacagtgtcagaaaatgatctccgaactctgcggtgacaccggtgtcatactgggataactgcttgatattgttataaaagtcatcaaattcttcctgcgtatccgcctggaaaaatttgtagaacttaaatacctgatctgttttccggtagacctgggagcgaaagacggcaatgatctcgtaattgcgctgacactcttcggtatagaggataatgtttttgtgttccttatagaaatcctgattctcgtaatcggtcagattgccgaacatggcaccggatttcatattgtgaccgtgaatgataagattcgtggtcagaggatctacacagctttcatcgtcaaggagcagacagccgtttttattttcgctgccgtcaaaagcacggtagagataataggtctcatcttccggagtccacattaccggataatcgatattggtgcccggaatctgcagccaggccgccatatccttgttggcaagaaaactgtcggaataagggttggccactcgttcgaactcctcggtggaagccggggtcttttctgtggacggttccggggaggcggtaacggtcggctcaccttcgactgtggaaggtgcctgcgtggtctccacggactgcgtcgggcgcaattcatccagcgcttcctccatacgccggtcttcgatccgcccttttaccaacaggatcactgcagcaagaacacaaattcccgccagaacaaataaaatgatagaaagagtttttttgcttattttcataatggtattatacgctgaagtagtaaggggatgcaatagtttaaaacaaaaggatttcttaattttcggaagatatttccagagaaaaaggcatataaaatcatatagaataaaagagacaccggagaacagggatggaacagaaagtgttaagggcggtgatggtatgcctgttgcttatgtctatggcgatacttggcagggaaacggcggcatatgtggaaacggtaaatgccgtgaatgccttgcaggggaataatgcggacacggacggaatacagacggtagtgatcgatgccggccatggcggggatgacccggggaagattggtatcaacggagcaccggagaaggatatcaatctccggatcacagagaaactgagacagtatctggaggcagacggaatccgggtggtgctgaccagagagacggaggatggattgtatgatgcatctgctcccaataagaaagtgcaggatatgaaacgccggatcgaaaagattgagcagacggatccggttctcacggtgagcatccatcagaacagctatccggaagagtatgtgcacggagcgcaggtcttctattataatggcagcagcggaggggaacaactggcagggctgatccagacacagctggtccaggatctggatccggagaaccaccggcagatcaagcccaacgacagctattatcttttgaaaaaaaccaaaggaaccatcgtcattgtggaatgcggcttcctgtccaatgcggcagaggcgggaaaactgtgtgacgaggcctatcaggacagagtggcatggtcgatccacaaaggaattttacaatacattaacgggatacagagggattgaaacgggaaatacaaaataaaggcacgagttgtatacacagtgttattatgataatataggatttgtatgttatgacagaattttataaagttacgggagagaaaatgagacgatatcaaaaaataagaaatgttctgttgaccgtgatcgtgacactggcattgcaatgtacatttgaagtctgcctgggaggatacgtggattcgaatcttgtcaatgggctgaataaactgtgcggagcatttacggtgctggattatacagatctgttaacggctgcggcagtatttgtaatgcttaaggaagtgaagaaaagagaggcgaagacagatgtggcaacgttggtactttctgttattctgtcattccttcttatagtatgtatcagctttaagaaatatgattctgccattttcctgtggggcaattcttttcagatactattatccacgttctgtgttttggggtttgcagtgttattgtatctggtattgcgtctggcatattttgggctggagcatgtggaattacccgcagagcagggcaaaaagcacctacagatggtgggcttttttgtaatagccttcagctggctgttctggatcctgctaaattatcctggaactaccagtggggacggtctggtgcaactgaaacagtttctgggtgaacaggactggggagcggcacatccgccattttcctccgcaatcatcggaatctgttttgtgctgggaagaaccattgcagatgccaatttcggctttttcctgtattgcctgatgcagacactggtaggggcctatgctttttccctcagcatgaaaaaactgcaggagctgggaatttcctggaaatggtgtgccgtgggaatcctgtttttcgccctgacacctttttggggaacctatgcccaatggtttgagaaagatctgctgtatgcggaaatgacggtgttacaggcagtatatctgatgtcggtactgaaaaagaaggaatgtggcgggaaagatgcggcgggactgattgtattcagtgtattatcctgcctgcttagaaataacgggatctatgcgattgttccggcactgcttttgctggcaatttatctgaaaggcaaagaacgcaggaaggcattcctggtattgctggcaactgtggtgatctatgaactgatcacggtggtgggatacagagcgttgatcgatgtgggaaaaccggcagcttccgaggggctgagcgtaccgttccagcagacggcgagatatgtctgcgaatacgaagatgaggttacggaatatgagagacaggtgatcaatgataccctgaactttgatgctatgaaaaattatgaaccccggatttcggatcccattaaaatattatatcgaggcggagacctggggccctacatgaaaatatgggtgcagatgtttttcaagcatccgggatgctatgtggcggcatttgtcaacaagggctatggctatctggcaccggtggaacagaacatagaggcctggatccagctggagtatccggaatatgcgcaggaacagggaattcatcatacattccccattcagacatcggagtttctgctgcagatctggttcctcagtatgcggctgccgctgatcaagtatctgtgtactccgggattgtatacctggattctggtagtgctggcatttttcctgtggaaaaagaaaagatacagtgcgttgatactgctggttcccggctttataaacgtgttggtgtgcctggcatcccccatgtccaatgcaatccgctatgaactgccgaccgtggcggtgattccgctgctggtcggatggaccgtttattctgtacacacaacatcccggcagaccggagaggaataatctttccatttgactggggatatgatatactatatccaaatgcaatttagaacacagaaggtaaaaacatggagactgagatcataaagattcgtcccggagagggccccgtcagcgaagaagatgaggagaaactccgggcggcgggagcaatcctgcagcagggaggactggtggctttccctaccgagaccgtgtacgggctggggggagatgcactgaatccttcgtcttcccagaaaatatatgcggcaaagggcagaccgtccgacaacccactgatcgttcatatttatcggtttgaggacatttacaagattacaaaggaggtaccggaagaggcacggaagatcgcggatgctttctggccgggtcccctgaccatgatcctgccgaaatcagacgcggtgccttatgagaccacaggtggtctggatacggtagcgatccgtatgccctcgcatccggcggcgcagaagctgatcaaatacagcgggggatatattgcggcgcccagtgccaatacttccggcaagcccagtcccacagtggcaaaatatgtcgaagaagatatgatggggcggatcgatgccatcattgatggcggtgaggtggggattggcctggaatccaccattattgacctgacggtgacaccgccacagatcctgcggcccggatacattacccaggagaaactgagcacagtgctgggaacagtggatacggacaccacgatcctgcgggcagacagcggacaggcccccaaggcccccggaatgaagtacagacattatgcacccaggggagaactcaccatcgtagagggaaccccggggcaggtaagggagtatattaaccgggctgcggcagcagaccataccgcaggagagaagaccggaatcatcggaaccgaagaaatgctgtccggttatatagcagatgtggtgaaaagtgtcggcagccgtaaggatgagggcagcatcgccagacatctgtacactattctgagagaattcgatgatgaaggtgtgacaaagatctattccgagggattttccacggaaggcttcggacaggccattatgaaccggctgttgaaagcagcgggccataaagtagtaaaactttaaacagaaaatacgaggagaaggaaaatgatagcaattgcaagtgatcatggcggatatgatctgaaagaaagagtaaagaaatatttagaggagaagaacattccttatcaggatatgggatgtgacagcaaggcaagctgcgattaccctgtgttcggacatgcagcggcaagggctgtggcagacggtacctgcgagaagggcatcgtgatctgcaccaccggtatcggtatcagcatttctgccaacaaggtaaaggggatccgctgcgcactctgctccgatcctctgtcggcgaagatgaccagactgcacaacgatgccaacatgctggcaatgggtgcaggcattgtcggtgagaacctggcgttggagatcgtggagactttcctgaatacacctttttccggagaagagagacacagccgcagaatcagcctgatcgaagaggtttaatgcattacacagacacgaacaacgaaataccattataacaaatacaaaacacaggaggacaacaatatgtcaaaagtagtagttatggatcaccccttaatcgagcagaagatcggaatcatccgcagaaaggagaccggtaccaaggacttcagacagaacatcagcgagatcgcaatgctgatcggttatgaagcaaccaaggatctgcctctggaagaagtagagatcgagacccctatctgcaagaccaccgtgaagcagttaaagggtaaaaagctggcactggtacctatcctgcgtgcaggtctgggtatggtagacggtatgttatccctgatccctgctgcaaaagtaggacatatcggcctgtatcgcgatcctgagaccttaaagcctgtagaatattactgcaagctgcctgcagactgtgcagagcgtgaggtattcgtggtagatcccatgctggctaccggcggttcttccatcgcagccatccagctgttaaaggacaagggctgcaagagcatccgtctgctgtgcatcatcgctgcacccgaaggtgtaaaagctatgcaggaagcacatccggatgtggatatctatatcggagcactggatcagaagctgaatgatcatggatacattgttcccggactgggagatgcaggagaccgtattttcggtaccaaataaaggagacacccatgagtgccaaacgcagcgattatatcagctgggatgaatattttatgggggtggcccacctgtccggaatgcggtccaaggacccgaatacccaggtgggagcctgcattgtcagcccggacaacaagatcctgtccatgggatacaacggcttccccaagggttgttccgacgatgagttcccctgggagagggagaacgccaatgacaggaatctgacaaagtatccctttgtaacacatagtgaactgaatgctattttgaattatcgtggcggttccctggaggggacgaagctgtatgtctctctttttccctgcaatgaatgtgcgaaagccattatccaggcggggatccgcacggtggtatatgacagcgataagtatgagggaactccgtccaaccgggcagccaagcggatgtttgacgcggccggagtgaattacgtgcagtaccgtaagacgggccgcatgatacgcatcgaggtctgaagcaacagataaaaggagtaaaacggttgaagcgcctacagaagacagctgtgctgcttacagcagtgatccttgcaggagccttttcttcagaagatatcaaagtggaagctaccagcagtacctggcagcagattcagaaagagcaggaagagaaaaacaacctgcagaatcagctgaatgaggaaaatgataatctggagaacctgaagggagaacagaattccctcaagggacaactgaataatctgaacggtcagctgacggaagtcagtaacaatctgtcagatctggaacagcagatcgcagacaaggagcaggagatcgcggatacccaggccagtctggaagaggcgaaagctacggaagcatggcagtatgagtgtatggtgatccgggtacgggatatgtacgagcggaatgagaccagttacatcaacgctttgctgaatgcccagagcttcgataaactgctgaacgctgcggacttttttgaacggatcgcagcctatgaccagaagaaactgcaggaattcgaagagaaccgcaagctgatcgaagaggaagaggcgagactgcaggcagagaaaacggagctggatagtctgaaggtggcagcggaaaccgagaaaagcaaggtgtccggtctgatcagccagacatctaacagcattgcaaaatatgccggggatatttcggaagcagagcagagagccctggcatatgaacaggagatcaaacaaaaagaagaaaatctggaaacactccggaaaaagctggcagaagagatcgccatgtcccagaaggcggcaaacgcaacctggcgggacatttcggatatctcctttgaagagggagaccgttatctgctggcaaatctgatctattgtgaagcgggcggagaaccctatgacggtcagctggcggtagccagtgtggttatcaaccgtgtcagaagttctgtttatcccaacacagtggtgggagtgatctatcagaataaacagttctcaccggtggccagcggacgtctggaactggcattggccaccaataaagccaccagccgctgctaccaggcggcagacgaggctatgtccggtgtgaccaatgtaggaaactgtgtatatttccgcacaccggtggaaggactgacaggtatcaatatcggcggacacgtattttattaaacgaaagcgaaaatctatgagaatcaacagcgtagaacaaaagggttatgcaaatagaatcatggactggaagatattcgtaaggcaggatctggtagcagccaaggcgtcggaatttttctatgaattcgtaggggagaattctttccggccggtgagtgagctgcttctgccggaagacggggagctgttgaaaaaagcagtggaggcggatacgttccaaccgctggaactgatcacggtgcttcacaatctgaaggacagtgtaaggaatgtgtatctgcgtctggaacagagtgaacagacggagaacgggattccgttgtatcagatcaccgtttcagatattcatgatctggagaaccggaatttacgactggagcagagcattctgaagtaccgtcattttatgacattggaagatgtttacttttttgaatatctgatcgaacaggacagtattacggtctataaatatgtcaacgagcgggccatgaaccagtttgaagggcctatgaatgcgctgatccggaatgtggaacaggcacatgagggcagtgatattgccatattggaagggcagcttcggactttctgtgcgcatctgcgcaatggagatgatttctttgagatggaattcgtcagtgagcaggagaacaagggaatatggagggtcaaaggctcccggatcccgaagaagcgtgatatggtggctggtatcataaccccggaccggaacagggagcaggaagcttactatctgactccggcagcccgggatgccggaaccggtctgctgaataaacgggcatggacggaatataccatcgaacagctgaatcggaaggatggtcaggtccgctggctggtgatcattgatattgatgatttcaaacatatcaatgatacctatggtcatatctttggtgaccaggtcatccgcagagtggcggagatcatgcaggaattggtgggacagcggggcgtgatcggacgattcggcggagacgagtatgtgatcctgttggagaaagtggagaccagagaacagctgaagacacttttgaagaccattgcgaaggaatttgctctggcatttgatccgaagacccatgcgacagcttctatcggcgtatcagagtatccggtagatggaagcgaatacgaggaactgatgcgcaaggcggataaggccctctatctggccaaggaaaaaggcaagaaccgccatatcatctatgaagagagacttcacggcaagctggaaagcgacgatatgcagaacatggctatggcctatgcggtatctaaggagaaaaagcgggaagtcatcacgaagatgatcaccgaactgtgtgtatccgatgtgaactccattgtaaaaaaggaagaacggctgcagcagatccgcagtctgtttgatctggatggaatcacgatttattcagagtcgggagcgcagctggtatgccggaatggtaattacatggtagaagtaccggatggaagaggactttttgaagatgagaagtatcttgcgctattcggggatgatgataattttatagaatccaacacattgaaactcagatcccaggatccggcggcatttgccgtgatgcagaagcaggagatcggtgctttcctgcaatgtctttgccgcaaagagggagtgccgaatgtgatcgtgaactttgatgtgttcaaccgcaaccgtaagtggtcggatgaagatattacactgttgacgattctgggacactgcatcggaaacctgctgaactattcagagtaaagtaagtgagagcagaagctcgtcggacacttgtgtccgtaagagcctatgctctcatttattttgcgaatgtgttactctgaatagttctgaccagggagcaaaaagtaagcactgcagctacagcccgctcctatccaacggattctgcagcctgtcgaacttgtcccggtagataatggtgatcaggttgttcagctggcgcaggcaggcactcatctgagcctgggtgatcagccccttttccagagcctcggccagctcgtccagatccacgacatgcatccttccatcgggatagaggataatgtcagccaacagatccgtgacgatcagggaattatcttccggtcgggaagtatattccacaatatcgcagtaccagtacagcagagaaccgtcatggcggtagaacttgctgatcttgaagccttccttgagataatagcaggaacagccgtgggaaaacgtggtcttgggattcaaggtcttccatttggtcagaatgtagtcttcgttctgctcgacgataatatcatcctttaataaaatgcattcttccgggatcagccgcttacggtagatctgaagttcgttgctcatagagtttctcctttgtgcggtgtgctttacaacggccacagttccggaaacgggataaaaggcatgggagggatcgtgtgaggacacagcgtcttctccatccagatcatatcatgccatgcatcctgcttgtaaccggaagcgtgaaaatgtgccacggttttataaccatgcttttcgtggaaggcgatgctgggaggattggggtaggtgatgcaggcacagacattgcagacgtgctgtgcggtcaggtattcctccagcttttcgtataacagactgccgacaccgctgcttcgaagatcccggctgacatagatggaagtctccacagaccagtcataagcagcgcggcctttaaaagcggatgcgtaagcatatcctgccggctccccgtccagttcagccaccaggtaaggataacgggtaagagtgtgacggatccggtccgcaaattcttctgcggaaggaacgatgtactcaaaggtaatagaggtattttccacataaggggcataaatggcaaccagccttgcagcatcctcaggggtggcaatacggatccgcagctgtcttttgatgtctgtagtcttcattcgcgtcatccttctttctataagggtgtaaagtcactgaatagttactcaaatagtacttccggagagatttcaagtcaatctttttttcgcaggattttatagattttttaccatttagacagggggattttactggacatcatgttaagatttcgttataatgactataggtttgccctgcagtgggaaaatattttcaaaaatgtacaaaaataaatgctgagagcagaaatcaacacaggaggacacagtgtcaagaaaaaagaaaccctacgacagacaggtgtttcgggcgatcacactgatcatgcaatttggtatcaatatgttggtaccgatctgcctgatgtccgcagccggcatctggctggataaacatttcggaacggacttctggatgatcctgcttttctgtatgggagctgtggccggagggcagaatgtataccggatggccaggacaatttatgaagacggcgatgataaacacactaaaaaagataaatagaacggttctggagatggatctggggatcttgttcctgggagtgtcagcgcagatcataggagcatttattgcaaaggatgaagcaatgtatgccaaaagtctgtggtttggcgttctgctggcgctggtctccacatatcatatgtaccgttccctggaccgggcattggaccagcccgagaagactgctacgaaaatgatcatccgtgcctatatcttacgatatgtcatgttgatttttttcctgttggtgatgatgaagaccggagtgatgaatcctctgattttctttttcacctatgttatatgtatgaaagtaacggcatttctacagccgcttacccataaattatgcaataaactgttccacgagacggatccgataccccaggcgatgccggaggagactgcggaagacaaaactgctccgcagactgcggaagaagcggaagccccgaaggatggagaagtgacagaggaacaacagaataaacaataaggaggtgaaacaatggaacatggaattctgttatccggtgccgacaatatcgactttatgatacatggcgtgtttaagtattcctttttcggccatgaggtatggataacgaccacacatgtgtgtgtgctgatcgtcatgttgcttatcattggttttgccattgctgccaaccgccagatggccaaagccagagaagtgccggaaggttttcagaatgtggtggagctgatcgtggagaagctggatgccatggtggatgctcccatgggcaaggccgcaccgaagttctacaactacatcggaacgatcttcatcttcattctggtgagcaatatttccggtctgttaggcctgcgtccccccacagcggactacggtgtgacattgcctctcggtgttctgaccttcctgctgatccattacaatcagttcaagtaccagaagccgaaagaaatctgggaaggcatgtgttccccgctgcccccctggctgccgatctggctgcccattaacctgatcagtgagatcgcagtaccgatttccctttcattacgtctgttcgcaaacgtattgtccggaacggtaatgatggcactgatctacggactgttgggtgtgatcgctacagcgtggcccgcagcactgcatgtatactttgacctgttctccggagccatccagacatacgtattctgtatgctgaccatgacttacattgccaatgcaagaggagacgcttaaagctgtactgttcaggtatggctatctgaaactatgctagaaagattctgataagaatctcaataataggaggatttactatggattttaatgaaaactttatcttaggctgttctgcaatcggtgctggtctggcagttattgccggtatcggacccggtgtaggccagggtatcgcagcaggacacgctgctgcagcagtaggacgtaatcccggagcaaagtccgagatcacttctaccatgttattgggacaggcagttgccgagaccaccggtctgtacggtctgttgatcgctatgctgctgctgttcgtaaagcccttacttccctgattaaacgaaaggaatgcggatgaaaatgatactattaacagaaggcgagaccatgtcaagactgtttgacctggactggcagctgctggcagactcctgcctgatgatcattgccatcttcgtattgttcctggcactcagctattttctgttcaatccggccagaaagttcttaaatgatcgtaaagagaagatcaggggagaactggaagaggcaaaggacaatcaggaaaaggccgcagaactgaaggcacagtatgaggcgaagttgaaagacatcgacaaagaggcggaggacatcttaagtgatgccagaagacgggctcttcagaacgaggagcgtatcgtcacacaggccaaggaagaggcagccagaatcctggcgagagcacaggaagaagccagactggaaaagcagaaaatgtccgatgagatcaaacaggagatcgtatccgtggcatctgtcatggcaggtaagctggtaggcgcttccatagacaccaccagacagaacagcctgatcgaagagacgctgaaggaaatgggtgaggatacatggcaaaattagtttccaaagtctatggagaagcccttttcgaagcggcagtcgaccatggaaatgcgatccagctgatgaatgagaccgcacagcttgagaaaatattggaagacaatccggattttgacaagctgatgaaacatcccggaatccccaaacaggaaaaactctccatggtggaacaggtcttccgtggcagagtcagtgatgatctgacagagtttctgaagatcgtggtgaccaaggaacgttacggctcattaaaggcaatctttgcttattttaccgaactggtcagagaatctgaaaagatgggaaccgcatatgtggataccgcagtggagctgacggaggcccagaagcaggcagtgaaaaataagctgctggctacgacttcctatcagacctttgatgtgtattaccatgtggatccgacgctgatcggcggaatggtgatccgggtgggtgaccgggtggtggacagcagtatccggaccaaactggaagatatgaagaaacaattattaaatattcagctgggatgaccggctgaaagaaaggtgcgacagatccatgaatttaagaccagaagaaattagttccgtcattaaggaacagatcgaaagatattcttcccagctggatgtatccgatgtcggaaccgtcattcaggtagcggatggtatcgctcgtgtacatggactggaaaatgccatgcagggtgagctgttacagttccccggcgatgtatatggcatggtgctgaatctggaagaagataatgtcggtgtcgtattgttgggaagtgccagcaatatcgaagagggtgatatcgtcaagaccaccggacgtgtggtagaggttcccgtaggagacgcattgcttggacgagtagtgaactccttaggacagcctattgatggtaaaggccccgtacagactgacaaattccgtaagattgagcgtgtggcaagtggtgtaatcactcgtaagagcgtagacacgccgctccagacaggtatcaaggcaatcgactccatggttcccatcggaagaggtcagcgtgagctgatcatcggtgaccgtcagaccggtaagaccgctattgcgatcgacacgatcatcaaccagaagggtcagaatgtaaaatgtatctatgtagctatcggtcagaaagcatctaccgtggctaatatcgtaaaaacactggaggagttcggtgccatggcttataccaccgttgtggtatccacggcaagtgacctggctcccttacagtatatcgctccttattccggttgtgcgatcggtgaggagtggatggagaacggagaagacgtactggtggtatatgatgacctgagcaaacatgctactgcataccgtacactctccctgctccttcgtcgtccgcccggacgtgaagcatatcccggtgacgtattctacctgcattccagactgctggagcgtgcagtccgcatgagcgacgaatacggcgggggttccctgacggcacttcccatcatcgagacccaggcaggcgatgtatctgcatacatccctaccaacgttatttccattaccgatggacagatctatctggagacagaaatgttcaactccggtttccgtcctgcggtaaatgcaggtttgtccgtatcccgtgtaggtggtgccgcacagatcaaggctatgaagaagatcgcagcaccgatccgtaccgagcttgcccagtacagagagctggcttccttcgcacagttcggatccgaactggatgcggataccaaggagaagctggcacagggcgaacggatcaaagaagtgctgaagcagcctcagtaccagcccatgccggtacaatatcaggtaatcatcatctacgcagtcactaagagattcctgctggatgtacctgtagaggaaatcaccagattcgagaaggaattcttcgagtatctggatacgaagcatcccgagatccccgcagccatcgctgaggaaaaagtgatctccgatgctacggaagagaagctggtaaaagccctgaatgatttcaaggcagaattcctgaaataagtgtgtcggccgcagattgcggcagaatgagaggtaactatggcatcaatgcgtgatatcaagcgccgtaagaccagcattcagggcacacagcagatcaccaaggccatgaagctggtatctacggtaaagcttcaaagagccagagcaggtgcagaacgttctcagacgtattttgactgtatgtatgataccgtaaataatatcctgtccagggtaggtcatctggaacataagtatctcgttccgggggcttcccccaaaaaggcggtcattgtcatcacctccaaccgaggtctggcaggcggttacaactccaatgtggccaagctgatcactggacaggaggagtggaaggcagaagacgttgtggtctatgccatcggtaataagggccgggagattctggagagaaagggatataccgtgaaggaatcctatccggaggtcatcgaagagcccacatatgccgaagcaatgcttctgtcggacaaactgctgacatcatttgcagccggagagatcggcgagatttatctggcatacacacacttcaagaacacggtgagccacgagccgaagctgttgaagcttctgcccgtggaatatgatgcagaggcgggtgcatccacagagggtgccgatgcgctgatgaatttcgaaccggaagatgtggaagcactggatatgatcataccgaaatatatatccagtctgatctatggtgcactgatggaagcggcagccagtgagaacggtgcccgtatgcaggccatggataatgccaccagcaatgcggaggatatgatcagtgatctgtcactgaagtacaaccgcgcaaggcagggaagcattacccaggagcttacagagatcattgcaggcgcagaggcgctttaatatttatattttgcagttatgtctctggcaggttttgtatcattcctaagcagaccgtaaaggaacgtcggcacttaatgagcgcttcagcgcgaatttagtaccgctacgttccgatccgagcgtaagcgtgtctgcgtggaagatacaaagactgccagagaaaaacagtgcaaaatgtgagttgattatgaaatgcccgcatagtgggcaggaaagaggtagaaatggcaggagagaataaaggaaggatcacccaggtcatcggtgccgtactggatgtacgcttcgatgagggcaaacttcccgagatcaatgacgcgatccgcatccctaccagagatggaggagaactggtagtggaagtctcccagcatttgggtgatgacactgtcagatgtattgccatgggtactaccgacggacttgtgagaggaatggaggctatcgccaccggatctcccatttccgtaccggtaggagagaataccctgggcagaatatttaatgtactgggtcagccgattgataacaagccggtaccggcaggagtgtcttacgagcctatccaccgtgccgcaccgaccttcgcagagcagtctacggacacagaactgctggagaccggtattaaggtcgttgacctgctctgcccttatcagaagggtggtaagatcggtctgttcggtggtgccggtgtaggtaagaccgtactgatccaggagctgatccgtaatatcgcaaccgagcacggcggatattccgtattcaccggtgtaggtgagcgtacccgtgagggtaacgacctgtaccacgagatgcaggagtccggcgtattggacaagaccaccatggtattcggacagatgaacgagccccccggagcaagaatgagagtcggtctgaccggactgaccatggcagagtacttccgtgacaagggcggaaaagatgtgctgttgttcatcgacaacatcttccgattcacccaggccggaagtgaggtatccgcactgttaggccgtatgccttccgcagtaggataccagcctacattacagacagagatgggtgcgctccaggagcgtatcacatccaccaagaacggttccattacttccgtacaggcagtctatgtgcctgcggatgacctgacagacccggcacctgcgaccacgttcgcacatctggatgccaccacggttctgtcccgttctattgtagaattgggaatttatcccgcagtggatcctctggagtccacatcccgcattctggatcccagaatcgtaggtaaggagcattatgagaccgcccgcggtgtacaggagatcctgcagagatataaggaattacaggatattattgctatcctcggtatggatgagctgtccgaggaagacaagctggtcgtatcccgcgcccgtaagatccagagattcctgtcccagcccttcttcgtggcaggacagttcaccggtctggaaggaaaatatgtacctatcagcgagaccatccgtggattccgtgagatcctggacggtaagcatgatgatattccggagagctacttcctgaatgccggaagcattgatgatgtactggcaaaggttcatgcatagcatgagaggggagtacagatatggcagataaagaattcacacttcgtatcataaccccggaaagagtattctatgagggaattgtggatatggtagaattcaataccacggaaggacagattggtgtccttccgggccacattcccctgacggtgatcgtgaagccgggtatcctgcatattacggagaaggacggagagaaggaagcagcattgcattccggattcgccgagatccttcccgaaggagttatcattctggcagagattatcgaatggccgaatgagatcgatgaaaaccgtgcggaggcagcattgcaccgtgcggaagagagactgcgcagcaagacgccggagacggatattgccagggcagagacggcattgcagagagcaatggcgagaattcaggtgctgcgataagcttcgcagcacctgtttttcactttatagagagaaaatgcatatgttataaaaaagcatgaggcattttaaaatggtagcaagaccgttttttatgacattgcccggatatccggggagaatggatgaaaacgagatcttaaatgatctggaatatctgcagcagacctatcccggagaggtcagatgctgtcagcgcagaattgcggaaatattggacaaatacgactatgaaggaagcatgatctatgatgaatatccggaccgcctgagtctgttccggatagcggatacgatcagcacgatcctggaacaggaagcggaaaaagtatcaaaggatctgatccatgtgttggtgtgcaatgagatctacaaaaggagacacggtggacgacggggaatgattgcgttcttataggaaagcgtgctataatatgcgcaaaacatttgaaaaacaggataaaccatggaagaactgaaaatacttttacagaaaattttgaataaagatctgcagcagatcatcctgagcaacagccgtcatccggaacagacccagaaggtaaagatccgcccggtgctgatccgggaggaactgttgttccaggagactgcttacagaggaactcaggtgtttcacgagaattttacagcagaacagctgacggaccggatctgcaccgccttacaggagcagttccggcagggagaattctcagcgaagaccctgcaggccaccgctctggtcagcaaaaagggcaagctgacactgaaggtgaaaaacagtggcaaggcactacggacggagggggcggctgcttctgaagaggaggaactgcaggcactggctcacaaccgtaccaagcattatattttagaggaaggaaaaccggtggatttcctggtaggactgggcgtgcagaccccggacggccgggtgaccagggcgagatttgataaattccgtcagatcaaccggtatctggaatttatcgaggatgtgatcgatgaactgccgaaagaccgtaccatccgcattattgattttggctgcggcaaatcctatcttacctttgcaatgtactattatctgcatgaattacagcatagagatatccaggtgaccggactggatctgaagaccgatgtgataaaacactgcaatgaactggcggaaaagctggggtatgacagattaaagttcgagaggggagacatcagtacctacgagggcacagatgtggcggacatggtggtgaccctgcatgcctgtgaccttgccacagattatgcgttagacaaggcggtaaaatggggggccagagtcattctggcggttccctgttgtcagcatgaactgaaccggcagataaaatgtgatcctttaaaaccagtgttaaaatacggcatcatcaaggagcgcgtggcagcactgctcaccgatgctctgagagcaaatctgctggaacaacagggctatgagacccagatcctggaattcatcgatatggaacataccccgaagaatctgttgatccgggcagtgaaaaagaatggtatgcgcccgaagaaaagcgcagatatcggtactgtggaggaactgctccatgtggcaccgacactggaaaaattgctgaataatgaatgagtgaagaatcaagaatgaagaaaacgatcattagaattgccgtgtgtgttgtagtatttctggcatcagcactgatcatcggcaacattatgaatcagggacataacaatatgaccatggagatggctccggccactctgcctatgatcaccatggaaagcggcggtgtggcatgcaatgaactgcacggaaataccgtggagatggatgtggcttaccagaaggactgcattactctgctgggggagggcagacaggcgaatttcaccgtggatacgttcggaagagaaattacggggatctcgacagaggttcgcagcatcgacggcagccggctgatcgagaacagtgaagtcaccggatggaaggcaaatgggaaaagcttttccgtttcccttacgttaaaagacctgatcgacacgaatacacaatacagtctgaccctgatcctggaactggaaggggaacagaaggtatattattatacgactattttatggaatgatgatgtgcatatttcggaaattctggaatttgcgacagatttccacggaaaattatacgacaaggaagtggccaaggaactgacgaaatatctggaaccgaattccaagctgacagataacggcacttttcataaagtgaatattcacagcagctttcagcagatcacctggggcagtctggaaccggtccaggaggacgcggcttccatccggctgacacagatcagtgggaatgtggcctctctgctgatggattttgtggtatccaccggagagggcaaaaataagatctactacaatgtcgaagagtattacagagtcagatatacttcggagagaatgtatctgctggattatgagcgtaccatgacacagatcccggatactacccggatgtatgccaatgacaagatccttctgggaatcacggatgaaaatgtggatatgatggagagcgcggatggcaataccgtggtgttctccgatatggggcagttactcagctataatgcggctaccaacggactgacagtgatcttctccttctatgataaagataatgccgaccggcggactctgtatgacaatcatggcatcaagattctggatgtagacgagggcggtaatgtgaaatttgccgtgtatggttacatgaatcgcggaagacatgagggagagaccggcattcagatcatcagctatgacaattcgctgaatacgatcgaggaagaagtctatatcccatattccaagagctatgcggtgctgaaggatgagatggaacagctgctgtaccggaacagacagcaacatgtatattttttcctggaaaacggtgtctatgatgtggatctggagaatcgcagcgctgaacagctggtaagtataagacaggatgacagccttcaggtatcggagaaccatgagatcatcgtatggcaggaaggggatgacatcaaccacagcaaccagctgaatgtccggaatctgaataccggagaacagacagtgatccgggcggaggacggtgaggctatccggccgcttggcttcatgggagaagatattatctacggcgtggccagggagagcgacatccggacagagaattccggacagatcttttaccccatgtataaggtctgcatcagcaattcttccggagataatctgaaggaatacggacaggatggcatctacatcgtggattgcgccatcgagggcaatcagatcaccctgtcgagaatacagcgttctgagaacggcagctatcaggagatcctggatgaccagatcatgaacaatgtggaagaagagccgggacagaataaagtagtcacggcggatattgatatttatgagagatatgtgcagatacagaccaagacaaccattgataccaagactatcaaggtgctgaatccgaaggaggtcgtatttgagggcggaagagaactgacactggatgcggtcagcgaagtttccagatattatgtatacaatgcttatggggtacagggcatttacagtgctcccgggaaagcggtgaaggaagcctacgattccgccggggttgttgcgaacgaccgaggcattacggtatggctgaagggcaatcgtgtcagcagaaaccagatcatggcaatcaaggaagaaagtgtcacggaccagaagaacagcctgacggtatgtctggacaatatcctgcggcatgccggaatcacccgcaacaccgaatatgacctggcgcagggcaagacggcaatacagattctggaagaaaatatgacaggcgtacaggtactggatctgagcggctgtagtctggatgcggtactgtattatgtgaatcaggatattccggtactggcgatcctggaggatggcgaggcggtgctggtgaccggatttaatgaattcaacgttgtcatcatggagccgtccaccggaaagttgtacaaaaagggaatgaacgatgctacaacatggttcgcggagaacggcaatcattttatttcctatatgaaaatagataattaaatacaagtggacagcaaaaggcgcccggaacctgtgaaaggatccggacgcctttttggcgggatgaccgcttatttctgtacgtcaaaaatgtatttgcggtatttctgtaacacggtgcgtaacagcatgccgagcactccgcaggaaatgatctcaccgatacccacagtcagcatgaaataaggaatgccaccctctaaatgatacacataagccagcacgaaaggaacgatgatggtgttggcgatgatgggaggcaggggagccagccatttgttcttatcacgcagcagatatgtgccgaaggcaccgatcagggttgcgagactgccgaagataatgtcgagcagcatacagccggtcatggtattgctgatgatacatcccaggaaaagtcccggtatggcagcaggggtaaatacgggaagaatggtcagggcttccgagaagcggacctgaatggcataatttgccagtcccagagcgttggctaacatggtcagcacaacatagagagcagcgatcaccgctccgtgtacgaggtacagtactttcttgttcatttgttttctcctttagtttttatttacgtgtggaaggtcccgaacacacgaatggatttccgaaaagccttgatttcagggcgtttcagccttatcagtatatcagtattccggaaaaagtcaagcccgggtacaaggatttttgtaaatggtgaattttattgacgaaatcaaaagagagtgttaggataataaaagaaaagagtgttaccgtacagcaacggttcacctggtttttagttacagatcaagaaagcaacctattcctggcgagggcggttgcttttttgatgtttatgtttccgtgcagtctgtacgatactgataagcgttacgatgatactgatgatcgtaacaacaataccgacaatgcctaccactgtttccagcatcttatgtacctttcaatagatttcccatctgtatcacctccaataatactggaagctctcaaaatgtcatcattttggcgaaaggtgaaccgcttaccgttttggtaacactccatttttattataaaatacaatgccgggaatagatactttagattcggaaaataagtaacgaaatatgccatgcggaaattggctgttttcccgaaaataaaatttgtgcaaaataaccaatagttgcattttctgcgtaaaaatgcgaaaatataagttaacgcattgattgcaagaaagtaaggagaaagctatgtatattatcgcagggctgggaaatccaggcaaagaatatgaaaataccagacataatatcgggtttgatgtcatagacagattagcagaggaagaaaatatcgccgtcatggagagcaagcataaggcactgatcggcaagggctacgtggcagggcagaaggtgatcctggcgaagccccagactttcatgaatctgagcggtgagagcatccgggagatcgtggattattacaaggtggatgacaccgcggaactgatcgtgatctccgacgatattagtctggatgtgggacagatccgtatccgcaaaaaaggcagcgccggtggccataacggcctcaagaatatcatcaaaatgttagggcatgatacttttatccgcgtgcgtatgggcgtgggagagaagccgaagaacttcgatctggcagactacgtgctgggacattttccggcggaggaacgaagcatcatggacgaagcggcgaagacggcagcagaagctatccgtatgatcatcactgagaatgcggatgcagccatgaaccattttaacagtaagaaagcgtaacggttgtatagtaagaggaaaaagcgatgcaggcactgattgcgccactgaaagaactggcggaatatgatgagatccggaaagtgaccagacagggaaaaggaaccgtagctctgtcaggctgtgtggactcccagaaacttcatatgatctacggactcagcgatggcctgaaatacaaggtcatcgttacttatagtgacttaaaggccaaagagatctacgaggaataccgcttttatgacagaaatgtcatgctgtatccggcgaaggacctgatctttttccaggcggatatccacggcaatcagctggtgcaggagcggatcaagaccctgcgcagagtcgtggagggtaagccggtcaccattgttaccacctatgcggcactgatgacaccgcaggtattgtgggaggagaaagacatcatccgcaccgagcggggcggcagtctggacgagagcaaactggcatccagactggtggctatgggatatgagaaagcctatcaggtggaaagcccggggcagttctccatccgtggcggcattgtggatatctttgatctgacggaggaaaacccctatcgtatcgaactgtggggagatgaggttgagtccatccgcagcttcgacatcctgagccagcgttccattgagaagctggaaagcatcacagtctacccggccacagaattcgtactgtcggaagaacagatccgcaagggcatcacaaagcttgagaaggaagctgcaaagcaggaaaagatattccgagatgcccaccagccggaggaggcccacaggatcgccacacaggtcagtgaactgaaagaacagctgttggaattccagagtaagatcaatctggaaggatatatccgctatttttatgaaaataccgtaacgatgccggaactgctggcagatatggcggggcgttctctggtcttctatattgacgaaccggcgagagtgaaagagcaggcggatgccattgagctggaatttcgggagagcatggaacaacgtgccagaaaaggttatgtgctgccgggacagatgaacattctctacagtggcgaacaggtagcggctactttagagaaaaatgccgtggtgaccctggctaccatggagaccaagtacggatatttcgagaaagaaatgcatgtggatattgctgcccgcaacatcgccccttataacaacagctttgaagccctggtcaaggatctgaaaaaatataaaaagaacggctaccgggtgctgctgttgtccggttcccgtaccagagccagacgtctggcggaggatctgcggaacaccgaggatgccggactgacagcagtatacacagaagaccccatgagggaagtacagccgggagagatcctgacctattacgggcatgtgaacaagggctttgagtatccctggctgaaattcgtggtgctgtccgagagtgatattttcggagcggagaagcgtaagaaaaagaagaaaaagctctatcaggggcagaagatcaatgatttcaacgacctgaagatcggggattatgtggtacatgagacccacggactgggcatctataagggcatcgagaaggtagaggtagacaaggtcgtcaaggattacctcaagatcgaataccgggacggcggcaatctgtacattctggccaccggactggatgtgattcagaagtacgcctccgccgatgcagcgaagaagccgaagctgaacaaactgggcggcaaggaatgggaacacaccaagacgaaggtacgcagtgccgtcagcgccgtggcgaaggatctggtggaattatacgctgtccgacagcagagcgagggctatgcttttggaaaagatacggtgtggcagcgggagttcgaggaaatgttcccatttgaagagacagaggatcagctgaatgccatcgcggacaccaaggcggatatggaaagccatcggatcatggaccgcctgatctgcggagatgtgggctacggcaagaccgagatcgccatccgggccgctttcaaggctgtgcaggagggaaaacaggtggtctatctggtgcccaccaccattctggcacagcagcattacaacacctttgtgcagagaatgaaggattttcccatcaacatcgcattgatgagccgcttccgtacgccatcggagatcaaaaagacggtgaaggatctggaaaagggcatggtggatatcgtgatcggtacccacagagtattatctgcggatgtgaagttcaaggatctgggtctgctgatcattgacgaggaacagcgtttcggtgtggcccataaggagaagatcaagaaattaaaagaaaacgtggacgtgctgaccctgacggcaacccccattccccggacactgcatatgagcctgatcggtatccgggatatgagcgtgctggaagaggcccccaatgaccgactgccgatccagacttttgtctgcgaatacaatgacgaactggtgagagaggccattgtccgggaaatggcccggggcggacaggtctactatgtctacaaccgggtgaacaatattgcggatatcgcggcacagatcgcaaagcttgtgccggaagccaacgttgcatacgcccatggacagatgaaggaacacgaactggagcggatcatgtttgatttcattaacggagagatcgatgtgctggtgtccaccaccatcatagagaccggactggatatttccaatgtcaacacgatgatcatccacgattcggacaatctgggattgtcccagttgtatcagctcagaggccgtgtgggtcgttccaaccggaatgcctatgcttttctgatgtacaagcgggataagatgttaaaagaagtggcggaaaagcggctggcggccatcaaggaatttacggatctgggcagcggcttcaagatcgccatgcgtgatctggagatccgcggcgccggtaatctgctgggattaagtcagcacggacatatggaggccgtgggatatgacctgtactgcaagatgctgaacgaagcggtgcagaacctgaagggcattcatacggcagtggatttcgctacggtgatcgatctggatgtggatgcttacattccggcggaatacattgtcaacgagacacagaagctggatatttacaaacggatcgccggcatcgagacgataaaagagcgggatgaaatgaaggatgaactgttagaccgcttcggcaacatccccaaggcagtggacaatctgctgcggatcgcccttatccgtatggcggcccacggtctggacatgacggagatcaagggcaagaacgaacgcattaccttcaacttccggccggatgcgaagatcgatccccgcaagattccggatttcctgaaaaagcataaggatgaattaagctttactgcttacggcaatccgttttttacctataagtataaaaagacgggactggtggagaccgatgcggagcttttgatgggcagaaccgaggaattattggaagaaatgaaagaattggtgctggaaacagagccggttcagaataattaagagagttttataggactttaaaaatgatacctttttatcagaacagggaacgaaaggattctgataaggaggtattttttatgaaaggatatgtgactgccagcggatatatgggatatgtggagaatgaatatatcttatttgccagcgaggatgattattttgaatatgtggattcgttaaatttttaattaatgtccagtgtctttaccggggctgtgtatatgtgatatagtacaaatgtaaagaaaaaatgtaaggggtttcaacgctgcactgtaaggagtaacggtgaaattctgataaagcatttggcaaaatatgcagatgggagtttatattatggaactgactgagaagaaggaatttgacctgctctccctgggagagatcatgctgagattatcaccgcccgacaatgagcgtattaccagaggcgacagcttcagcaagcaggcaggaggcgcagaactgaatgccattaccggtgcggcaatgctgggattgcgctgcggtatcatttccaagcttccggccaatgacctgggtgtatatatcaagaaccgtgtacgtctctgcggtgtcagcgatgactatctggtatacgatgatgacaaggatgccagattgggcgtgtactactatgagaatggtgcttaccccagaaagccccgtattgtatatgaccgtaagaatacctccatcaacaagctgaccgttgatgactatgatgacaagatctacagcgatacccgctgcttccataccagcggcattacactggcgctgagccccgagctgagagcaactgccattgagatgatcaagcgtttcaaggcgcagggagccatcatctcctttgatgtgaacttccgtgggaacttgtggaccggtgctgaggcgaaggaatgcatcgaatccattctaccttatgtggacatcttcttctgctccgaggacacggcgcgtctgaccttcctgaaggaaggcgatgccaagagcattatgaagagcttcacggaggagtatccgatctccatcgtggcatccacacagcgtattgtacatagtccgaagcgtcataccttcggttccatcatctacagtgccaaggatgatacctattatgaggaagcaccttacaccgatatcgaagtcgtagaccgcatcggaagcggtgacgcttatatctccggtgtcctgtacggattgttggcacatcccggtgagtatcagagagcactggaatatggcaatgccatcagcgcacttaagaacaccatccccggtgacctgctgtgcaccgacttaaaggagatccaggggatcatcaaggagcacaagtccaccggacgtattgcggagatggaccgctaaagcatttacacttcttatctgatcgaacaaatagaaaacacaaagctctgccatgttaatttaagtgcatggcagggctttttctgtttatttttaacaaaattgaacctaaaatatattaaaaagtctgctgtacaagattaaattagtttgatatactaaagactgatatattactaaaagcaggatgttatcagacggaagattcgagaaacggaagggagacagcaatttggaaaaggaagaccatatccggcagaaagaacaatggaaacaactgtctccttctgaaaaatggcagtattttatggactattatctgtgggttaccataggtgtggcagcggggatcgctattgttattttcctgatcgtacattttgccaccaagaccagcttcgccatgggagtcatggcagtgaatacggacggagagcacatcgaagccaccggtccggattattttacggatttcctgcgcgaacacggtgtgatatccaaacgggatgtggtgaacctgaattatacgatctggatcgatccgaactcggattccgatgtggattccacgaatctcagcacgatccaggtattgttcatgacccggtcggtggatgtgtttttttctgacgaagagtttttgaagctcatgggcggcacggattatctggcggatttaagggattatctgcctaaggaactattggacagatatgaagatcagcagatcatggtgttaaataccatgacgggagaaacgattgtggcggggatccggcttgagaacaacgaatgggtaaggaagaccggatggtatcaggagaccgcagccgtggggctggcggatggcatgaagaatccggagctggcagtggcactgttggaggagatcctacagtagttccgtcacggctgcctgcgcctgcggcagatgatgcgctgtgggaacgtggatgacagagcacgatgggaacagaaagacatggagtataaatagggcatggaaaacatggacgcaaaaggaaatgacagaaaacactatcggggaatcgagaaacagacggataatccgtttttgaacctgtatcacattgatgccctgggacgggacggaacgccgtttcattattattttgcgtcccgaaatgatgaaaacaatatcaaacacaagacccatagtatgcgccccgagggcatggcggtctacgcagtgacagaggacggagagaaactggtgctggtgcgtcagtaccggtatcccgtgaatgattatctgtatgaattgccggcgggactgatcgagccggaggagaccgcttcggaggccgcctgtcgggaaatgatcgaggagactggctggaaactggaagtctacgaaggcggagaaccggctttccgaagaggatttttcctggcacaggggctgacagacgagagcggcagcatgatcttcggaaccgtgacagagaatgtgggacagcagatggaaaataccgaggatatacaggtgatcctggcagacagacaggaagtacttcgtatcctgcgggaagaacgggtgtccatgcgctgtggactgatgctgatgcagtttttgaagacagaaccggaagcaccatttgcttttttatatttgtgacagaacccttgggcgatttattattcggaaatgcccggaagaaccgatattgtgaaaacggctattggttattaatttttataaaggaagaggtaaattatggcaatcagatacatcgaacaggacagaaccttctggttggacacggaacacaccagctatcttctggcaattgtagatcaggagaattttgtgggacacgtatattacggtcagaaattgcagtataccgagaatacacctgcaccggtatatttgctgcgtacgggagaagcacccttcgttccgtcacagaataacagagagcgtgtgtcatttctggattccttccccatggaatatccgggaaacggactgggagattacagagaaagcgctatttccgtacgcacggcacagggacatgtgggagtgcagctacagtatgtctcccacgagatcgtaaaaaagaagcccacgctgcccggactgccctccaccttcccgggggatgaggactgcgacaccctgatcctacatctggcggatccggccatcggtctggctgcagacctgatctatactacatttgaagaggaagatgtgatcacccgcagtgtgatcctgaaaaatatggcagggcagcctatttatgtgacaaaagttatgtctgcctgcctggatctggactgcacggatgaaaagtatgacattcttacgctgcacggatcctgggcgagagagcgtcagatggagagaagaagtctgatgcacggcaaacagagtgttggctccgtgcggggagaatcttcccatcaggagcatccctttatagcactgctttctgcggatgctacgcaggatgccggtgaagtctacggtatgcactttgtatactccggcaatttcctggcgcaggcggagctttcccagttcgattccatccgtatgactatgggcattcatccggagaactttgtctggaaactggagcaaggcgagagctttgcggctccggaagtcgttatgacctattctgcggaaggtctgggaggcatgacccgccattaccacgatatgtaccgcaatcatctgatccgcggagaataccgggataaaaagcgtccgattctgatcaataactgggaagctacgtactttgattttaacaccgataaattattaaagattgcaaagcaggcatcaaagcttgggatcgaaatgttggtcatggacgatggttggttcggacaccgtaatgatgacagcacgagcctgggtgactggaaggtcaatgagcagaagctgccgggaggtctgaaacttttggtggatcaggtaaatgccatgggacttaagttcggtatctggttcgaaccggagatgatctcgccggattcggatctgtacagagagcatcccgactgggcaatctccattccgggtcgtgtaggaaacctgtgccggaatcagtatgtactggatctgtcccggaaggaagtcagagatcatgcttttgaaagtgtggcggcagtgctgcacagcgccaatatcgaatatgtgaaatgggacatgaaccgtcagctgtcggatctcggaagcatggatctccctgcagaccgtcagggagaactgtatcacagatatgtgctgggtgtgtatgaattacaggagagactgctgcaggaattcccacatctgcttctagagaactgctccggcggcggagcgagatttgatccgggtatgttatattacagcccgcagatctggtgctccgatgatacggatgccattgagcggttgaaaattcaggagggcacgatgttattgtatccgctgtccaccatgggtgcccatgtatcggactgccccaaccacacggtgggaagagtcacacccttcgagaccagagggcatgtggcgctggcaggcacctttggctacgaactggatatcacgaagatcccggaggaagaccgacagcagattcccgctcagaccgccatgtatcacaaatacaacgatctgatccgcagaggggattattcccggattgcatcatttttggaaaacggtaattatgactgctatcaggtgacatccaaggatcagaaagaagcgttggtaacctatgtacaggtactttcccgaccgaacttccacagtaggagagtacgtctgaaaggcctggcaccggagaaacagtatcgcatcgaggagaccggggaaatctttggcggcgacgtgctgatgcaggcaggactgctggtgacacctctgtggggagactaccgcagcaggctgatccacctgaccgaggtgtaaaattaaggcagtgacatgccttgacaaacgatttttagaaatctaatatggaagtataattgacgatttatcgggaaatgtgtaaaaaacagcgataaggagtacaagattatggcaaaagcagtaaaattagcagatatcgcagagagagttggagtcagcacagtaacagtgtccaaggcactgtccggacaaaagggtgtcagcgaggaagtccgggagaagatccgcagtattgcggaggaactgggctaccagcagccgtcagcggcaagaaaaagtcagaaccagaagagctacaatatcggtattctgatctctgagagattccttgataaatatgaatcgttttactggcagatgtaccaggcggtagctaccagagccacggcaaaggaatgttttaccatgctggaagtcattggatcggtggaggaagagagcagcagaatgccgaagctggtacaggaacgcaaggtggatggcattatcgttatcggtaagatgatggatacttacctgcagcatctgaatacagaagccgggatcccggtgatctatctggattattataacggaagggaagccagtgactctgttatttccaacagttattacggcacttatgaactgacctattatctgtaccggatgggacaccgcaggattgcttatgtgggaacgctgcttgccaccgagagtatcacggatcgttatttcggttaccagaaagcattgctggaactggggctggaacaaaagagagaatgggtgctggatgaccgtcatattgagaccggcaagatcgataccgtgaacatgctgcagattcccaaggatatgcccacggccttcgtatgcaactgcgatctgaccgccagcttactcatcaagaagctgagagagaacggataccgtgtgccggaggatatttccgtggtaggttttgataactatctgtatcccggcctcagcgacatccgcattactacgtatgaagtagatatgggagagatggcgagaagagcccttcataatatgatcaagaagatcaccagtgataattataagtccggagttaccgtggtggaaggccgactggtactgaaggacagtgtgtctcacgtatagactgcggtgcattctgccggtagacgaagggtgtgacaccggtgtgctttttgaacaggtggatgaaatgattggtattgtcgatgcctaccatagcccccacctcgtgaatcggattatccgtagataggagcagtgattttgctgcttctatttttttcccttgaagatattgcagcggggaagtatggaatgtagcggaaaattcccgacacagacggtagcggctgatgcccaaagtctgctcaaagtattctaaagagtgattttcagcatagttttcctcaaaatccgctttcatggacagcagataagcaggaatgggcttcacatcccgggagacggacagggcggacagcatcagttctgcgaacatgtcggtcagctcccggtgaagctgtatctgctctgcaggagtcgggatgaatgaaaatttggtcagctgctgcatccgctgtgaaacgcaggagccgatgggaatcgggtaacaacaggtaaaagcagcctgaaatatgctataataagaagaaagctccgctccacttaagaaaaacatttgaaaacgccactttccctgcaacagccggagggagaagccctgactgcaatctaaaaacaacagatgctcgtgatccaggaccacctcactgtcccgggtggtaaggagagcactaccctctaaggtgtagagcagcagataagaaggaaatgggttccattcataataaaagggatctgacaggcggaattctccaccggccagaggcagtaaaaagcctttttcttccagggatactttgtagatctgtcccagcaggatctccggggaacgctgcccctccacatcggaggaagtgtgcttcaatgcattgagaaaagtggtggaaatgttcatacaaaaaccttgcctttccgcaatcttcaaacttcggctgctttagcagcttgtgcaggaacaaaacttcatgtgaaaaatttatttttcacactagaaacatgcttttttgaaaaaattaattaagcttaaatacattataagccattatttgagctgtttcaatgacaaaggatgcaaagaaaacaaaattagttaattaaatcagctaatttaactcaaattaattactttgattgtataatatgtacaaaacataggaatagaacttgtgaaaatagaagataataacgaaaatagcaagaataagagattaaaaacaagaatagttgatgattaattaatgtgatcatgtataattaaattaagttacaaaacagtaaacgctatcaaatgtaacaaaaaacaaggaggctaaatcctctcctcgtcagaggactcggattttccttcggaaaactaggaggatttcttatgaagatgaaaaagtttttagctctttccacagcatcagtcatggcactgtctatggcagcatgtggaagcacagacaacggcggcgccgctgagagttctgcagtagcaagcaccactcccgcaaccgcagaagcttccagcgaggctgcagcacctgcagaggttaccagcctgaattacgcagagcttactttgggtgaggattacaccgaccttaccacgaccattaaggtcctgactaaccgtaccgacctgttagaggacggcgcagcagttcctttccagacttacattgatgcattcaacgagatgtatcccaacatcactgttgatattgaaggtatcaccgactatgcaagtgatacgctgcttcgtctgcagggtggtgactggggcgatgttatgtttatccccgcagttgacaaggctgacttaagcacatacttccttcctcttggaactactaccgagatggacggacagctgaactactacaaccagatgtacgaaggcactgtatacggtgttccttacaccgcaggtgttagcggtggtatcgtatataacaaggcagtattcgaagcagcaggaatcactgagatgcctaagactcccgaagatttcatcgcagcattaaagcagatcaaagagtatgacagctccatcattcctctgtacaccaactacgcagctggctgggcaatgggcggccagtgggatcccgctatcagcggcagtgctaccggagacagcacttatatgaaccagaagttactgcacacagccaatccttttgctgatcccggcgacggaacaggcgcttacaacgtatacaaagtaatgtacgatgcagttgctgaaggccttaccgaggaagactactccaccacggactgggaaggttgtaagggtatgatcaacaatggtcagatcgcttgcatggttcttggctcctgggcagttcctcagatgaaggaagccggtgacaacgctgacgacatcgcttatatgcctttccctattaccctgaccagcggtaagcaggcagcatctgtaggccctgactacagctttggtatcaatgcaaacaccaccgaagacaatcaggcagcagctctgtgcttcgttaagttcatgacagaagaatccggattctcctatgactgcggcggacttcccgttgctatcaaggataccagattaccggatttctacgctgcattcaagggtatcgacttcgtagtggatgagcctgcgatcgaaggcgaagaggatctgttaaacgagctgaacgctgaaagtggtcttaacatcaacaacaacggtgagaccaagatgcaggagctggtagagtgtgcagcagatggttccaagacctatgatgagatcatcgacgagtggaacgaagagtggacttccgcacaggagagctgtggtgtagagatccagtaattaataggtaactaatttaatcttctgaagtgagagggaaccatttatccggttccctcttatctaagagagaagggcatggaggtatttcgatgggtgcagagacaatgaagaaaacaaaaaaacccttcagcatgaaaaaatgggtaaagagcaggaacggacaacagaccatcgtcatactgtccttcatgatcattcccctgcttttgctgttcgtgttcacctatcttccttttggagagatggtaaaattcagtttttataaaatgaaatatgctaccccggtagacaaaagacagtttgtaggatttcggaactacatcgacgtatttaagaaagatgaatgcttcagtgctttgaagctgagcctttattacatggcaggcgcaatggtgcagctggtacttgcgttgtacctggcaacgatccttagctttaagaccaagtttggcaatatgttcaagggattcatgttcttcccttatctgatcagcggtattgccattggatttatcttcaaattcttctacaccagaggatttgtattcgatacggtattacagtggtgtggatttaacttagaaagtcttccgttctggctgaaggacaagagcgttaacaatatctctttggtggcttcctcggtatggcgttattacggcaacaacatggtacttttcatcggtgccatcatgtctgtggactccgagatgtacgaggcagcagagctggacggtgccaataaatttcaacagtttatacatattatcttacccagcattaagaccatcgttacgctgaacgtgatcctgtctatcacaggttccctgagtgctttcgatcctccctacgttatcaccaagggtggcggcggaaccgcaacctacttcgtattgatggacaagatcgcacataccaaccagcaggtaggtctggcgtctgctatggcggtggtactgttactgatcatttttgcagcaacaattttacaaaagcttttcttcaaactggtatttagaagctccgatgcggacaatgaagaatacaccagaagaaaacgtctcagaagagagagaagatggaagaaggaggcagtgtaagatggcaaagatgaaaaccaaccacaaacattacagtgtaggcgctgtcatctggatcgttattaagtattttagtctggtattcttctccttcgtggcacttttgcccatcgtatcctgcgtcatcacggcgttcaagaccgatgcggaatatcagagcaccaatgttatgacattgcccgagagttggttgaacttctccaactttacggatgcttttacccgtgccaacatgggaagagcttacatgaactctgcaattatcctggtattcgtactgttaggatccatcctggtaggaacacagcttgcttatgtactgaaccgattcaagttccccggcaacggcctgatccgcagcctgttcctgtttgcaaccctccttcccggaattgccatgcaggtctctgtataccagatcatgagtaacctcggatttatcaaccatctgtacggttacatcattatgagtatgggtacggatgttatctctatctacatcttcatccagttcatggagaatatttcggtatcgttggatgaatccgcatttattgacggtgcttcctactttaccatttactggaagatcattcttccgcttctgaagcccgccattgtgacttctatggtattaaagggcgtaggcgtgtataacgaatattattgcgccagtctgtatctgcaggacaagaggactctcggtgtggttgcaacctccctgtatactttcaccggacctcttggaagcaaatacaatctgatctgtgcaggtgtactgatgtctctgctgcctgccctgatcgtattcctgctctgtcagaaacagatctacagtggaatcacctccggcgctgtcaaaggttaaattcaaaggagagtgcggaacatgaaaaatgcggaaaccatgaaaatgagagaagagatcaaaaagcatctgaccgaaggaatcattcctttctggaaagggatgcgggatgacgagttcggcggttattacggttttctggactacgatctgaatctggataaaaaagcagaaaaaggctgtatcctgaacagcaggatcacctggtttttttccaacgcatatacactgttgaaggacaagagtctgttggaggaagcaaagcacggctacgctttcctgaaagaccattgtctggacaaagaatatggcggtatctactggtcgttaaactatgacggaaccccgaaggataccacaaaacatacctacaatcaggcattctgcatctatgcgctgtcctcttactatgaggccagcggagatgcggaagccctggaactggcaaaaaagctgtttgcgctgatcgagaccacctgtatggacgaggtgggatatctggaagctttcaccagagattttaagcccgaatccaacgaaaaactgtcggagaacggtgtgctagcagataagaccatgaacacactgcttcatgtatttgaagcctatacggaactgtaccgggtatccggcgatgaaaaagtgcgcagacgcctgctttggatcatggatctgttcgctgaaaaggtctataatcccaggctgcacagacaggaagtattttttgacaagaattacaataccattctggatctgcattcctacggtcacgatatcgagacagcatggctgatcgacagaggctgcaaggtactggatgatccggaactgacgcagaagatgtatgccatcaccagagaccttaccgcgcagatctataaggtggcattcgacggacactctctggccaatgaatgtgacagaggtgtcgtgaatatacacagagtctggtgggtacaggcggagaccgtgatcggtttcttaaacggctatgagaaagagccggagaaaacggaatatctggaagccgcagagaaggaatgggcatttatcagagatcatgtgatcgataagagacccggttccgaatggttctgggaagtggatccggaagggaatccttatcccgacagacctatcgtggagccttggaaatgcccttaccataacggcaggatgtgcatggaggtcctgcaacgtattcctggataggtcgtgtaacgaagacctccaggaggttatgaagcgtattccagaataattgatttattttaagagaggatacctaatatgttagagcgttattacatagaaaaagagaagcaggagaagctgctttcccggaaaaatgtaaagtctgatttctacaacggtatttatgaccgttatgaatatccggttctgaccagagaacatattcccctgacctggagatatgatctcaatcccaagacaaacccctatttcatggagcgtctgggtatcaatgcagtcatgaattccggagcgattgaattaaacggtaagtattatctgatagcccgtatcgagggaaatgacagaaagtccttcttcggcgtggcggagagtgacaacggtgtcgatggattccgtttttgggattatcccatcttgttagatgacacctgcccggaagagaccaatgtctatgacatgcgtctcaccaaacatgaagatggttacatctacggtgtgttctgttccgaaagcaaggatacttccgtaaatgatctgtccgcagcagtagcggctgcaggcattgtaagaaccaaagacttaaagcactgggagagactggagaatttaaagacccttcgttctccccagcagagaaatgtagtgctgcatccggaattcgtggatggcaagtatgctttctacaccagaccgatggatgatttcatcgagaccggaagtggcggaggaattggtttcggactgtgtgacgatatcactcatgcagtgatcgacgaagagcgcatgaccagtctgcgtaaatatcacaccattaccgaggccaaaaacggtgcgggcgctacccccatcaaaacagacagaggttggatacatatcgcacatggagtacgtaataccgcagctggtttacgttacgtcatttatgcttttgcaacggatctgaaagatcctgcaaaagtgatcgcagagccttcgggtctgctgatcggtcccagaggggaagagagagtgggagatgtttcaaacgtagtatttaccaacggtgctatcgcgaatgagaagggggaagtctttatctactatgcatccagcgatacccgcatgcatgtggcaactactactatagacaagcttgtggattatgtattcaacaccccttctgatccaggaagaagcgtggagtgtgtggcacagagatgtgaactcatccgcagaaatgaagagttcttaaaacaggaagcaagataaataatacagaaatgaggtaactcgaatgagcaaagttaagatgatcagccctgcagtacctaatgtaccctggcaggataaaccggaaggacataccggtgcaccggtatggagatacagtgagaaccctattattggcagaaatcctgtagaaggagtagccagaatcttcaacagtgcggtaatgccttacggtgatgaattcatcggcgtgttccgcggtgaacaggtcaacggtattccctatatttatttaggacgcagcaaggatgctattcactgggattttgataagaataagatccagttcgtagatgaagaaggcaagcctttcatgccgatttatgcatatgatcccagactggtaaaggtagaagatacctactatatcatctggtgtcaggatttctacggcgcagccatcggtattgcgaaaaccaaggatttcaagacgtttaccagaatcgagaatccgttccttccttttaaccgtaacgccgtactgttccccagaaaagtacacggcaatttcatgatgctgtcccgcccttccgacagcggacatacgcccttcggtgatattttcgtcagtgagagccccgatatggtattctggggaaaacacagacatgtgatgggcaagtcttccgaatggtgggagtccttaaagatcggtggcggtgcagctcccattgagacttccgaagggtggctgttgttctatcatggtgtgagcggaacctgtaacggttatgtctattccatcggtggagcgatcctggatattgacaacccgtccatcgtaaaatatcgttgtgagaacttcctgctgacaccggaagagtggtatgaggagagaggatttgtaccgaatgtatgcttcccctgcgctaccatccatgattccgagagcggcaagatcgccatttactatggcgcagcagacagctacgtagggctggcatttacgaccatcgatgaagtggttgactatatcaaagaacacagcgtggttacaacaagcgatacagaagaaggcagaagatagaatcgagggacccgcgatgagcgggtcctttgcggttttggagacagcgtatgatggaaaaagaggaattatatgccagagtggagacaacggaaagcttttcgataaaactggaacagatcctgccctggcaggacggtcagtatgcagaggtatttctgggcatccgggattacgatgagatttccgcgaagatgagtgaggaagtgaaaaacagccttctgtaccatctggggacgcacattcaaaagcacctgaagggacaggaaatggtgtgccatgtgaaaaaggatgagttcctattgctgttggacaatcatgtggaagctgcttgggagaaaatcggtcatattatgatcatgttcgaagctatgatcggagataaataccccgatgtatcgatcaacctgtacagcggcatttattatctggagtccagaggataccgcccggaggaaattttccgcatcggcaagactctgaaaaacaaggcgaaacgttattgcactctggaaaacagcatctatgagaaccgcaagagtgcggggaacatcattgataaagaagccggaatcctgaaccggggcaacctgaccagactgaaaggttttatgaaccgtgcagccaaaggagagcggcttacggtaggatttatcggcggttccattacccagggattttccgctacggatccggacaaatgttatgcggcaaggacatttggctggctgaaaaaggtatttcccaatacggaatttgattatgtgaacgccggaatcggagctaccgattcccagttcggcgcggcgagagtacaggaagacctgcttcagcggctgccggatctggtatttgtagaattttccgtgaacgatcacagtacgccgcatttctgtgagacctacgaaggcctggtgaggcagatttatggcagtgcgagcgcaccggcaatggtgctgatccataatgtctattatgataccggtaaaagtgcggcatattatcatgcgcaggtaggacgacattatgatctgccctgtatcagtatacagaacagcatctatccggcagtggcagcaggaagacttccggcagagaagattactgcggatttcctgcaccccaatgatctgggacatgaactggtggcatccgtgatcacgaactttctggaaaaggtgatccatgataaaacgcaagagccgcaggaaattttcccggctccgctgacagaaaatgcctatgagcattgcatgagactgcaatattctaattccacaccggggaagagtgtttttgtagaagatatgacaccgcagagagatatcacggatattttccgcaacggatggagcgccggggaaaaaggagcttatctggagttcgcttttcggggaaccggtgccgccgtgcaataccgccgagtgaaggacgggcctgcacccattgccacggcagtggtggatgagaaccctgagacggcgtgcgtgttggacggaaccttcgatgagacctggggagacaaaatgcagctgacaacggtggcagagcacctgccttatggggaacaccgggtgagaatcgagctcacggagacacacgagaacgataaggccggattttatctggtgtcattgattgtatccggggtaagaacagaaacagaagcggaataggcatagtacggaagtcaggtagacagatcggaagaaatgtgttacatatcagatagaatatttttccagaaacggacgttgcaaagctaagtagcggaataacgggaaagatgcagtgcaatacatagtaagtatcatgggaaaggatagatgatcatgaacaaagatattatttttttaacaccggtgtgtacccacaatatctggggcggtacccggttaaacagagaattcgggtaccccatcgaaggagacgatatcggtgagtgctggggtatcagcgcccatcctaacggagacggcaccgtggcaagcggcgcttataagggaatgaagctgtccgagctgtgggagaagcaccccgagttgttcggagacacgggaatggatcgtttcccgctgctgatcaagatcattgatgcaaaggacgacttaagcatccaggtgcatccggatgacgcttatgcgaaggtacatgagaacggatccctaggcaaaaccgagtgctggttcatcctggattgcaaggagaacgccacgctggtagtcggccataatgcgaagacaaaagaagaactggaacaaatgatccacgaaggcagatggaaggaattcatccgtgagatccccattaagcccggggatttcatccagatcgatcccggcaccgtgcatgccatcaagggcggtacactgctcttagagacgcagcagagcagtgacattacttaccgcgtgtatgattacgacagattgagcaacggcaagcccagacagttgcacatcgtacagagtatcgatgtgatcacggttcccgcaaaatccgcagagaacagtgtggtgcataccgagaagaaggacgatgccattcagcagctgatccaatgcccttactacaccgtataccgcattgatgtggaacaccgtgtggagacctggcaggataagccctttgttctcatgagcgtggtagagggcgaaggcaccctgaacggtactcatttaaaaaagggcgatcatctgatcctgcccgatggctacggcaaggtagagttacagggcaggatgcagattatcgcatctacgatctaagtttacgccagatcaaaagccggtaaatgacagctgtctttaaaactgatttactttccaagtacaacggatagcttgatttctttttctgtttcgctcaggtcgagatcaccgccgtcggagacggtcacgcgcagctcatagagcacgccgtctgtcagctccgtcacatttgctccggtctcgtctgtgagcgaccacagttcagagccaaccttttccagcttgccgtctgcaccataggcgtagagcgtcagatcggaggcactgccggacaggttgttcatgcggaaggctaccatggtgttgggatgcacgttgcagatggtcgcggtgttgtgccagcttgcaaccgtaccttcaccgccatcctgctcaaactgatcctgcgaaagaacatttcttgcagcctgatcaagatcaacctcacggtacggaagctctggcaggtacacaaagcgatcctgcaaacgcagcagttccagatagcctgtcgggcagtagagcgtatttccgttgctgccggtgtacatgccgatggccatattattgtagccgtatttgttggacacatccatcgtgaagacggtttcgcctgttgcaaagtccaaaataatgtactgccacatgccggtatccaaatcctgtacgtaaccgtagatatagcctgttgcagtggagagcttcatgatcgccgtgtcgcgcaaatcgttccggctccagacgctcttcatttcatagccatcggcggtttttagggtgtccacccgctcaacgcccggggcgatcataacattacccttcatcagccagttctggtcataaatgttggcgtagctctgaatcgaagagtcattgtcagggtcggcaagccctgcgttaccggcgccgaaccagttgcagacgatcgtgctgacggtgccttcaccgtcgtcataaacgatggcagagttctcaaccgccacctgatacccatcgggcagatcatccaaaacaggcatgctggctacgacctctccggtcttcatgtcgagcgcaagaagcttaacggggtctgcgttgtcggtgaacagtacaaggtttggtgtcagtgtgggcgagcagccgccaccccaggcaaggccgccgccggtagtcttatcgccatcatgactgaccttcgcaccgacactctcatatggcgtgcaccacacaacgttcacaccttcttccgcgcgcaacaggtagcagttctggttcgtcagaatgaccgcaccgtctttggaggcagcaatgccgttttctgcgccctcgccaggggtcagcccgtaaacaaagacagcctttgaaagatcgggttgttcgccgttcagaatggattctatcgctgtgtgggcaatgtagccgagaacgccctgctgctgccgttcgggatagatccggaagcctcctgtggcgaaccaaaggtttccgtcgtagtcaaagaccacggacagaagattctgtgtcagttccttgccgagcgcagtctcagcagccgccttgatatcgatatccagaaccttttcgaattccggaatgacgctgccgtcgtcctccgtcgcacgcagtatcagtacatggttgttgcttgtcgggcagacgatacggttttttgagtcaaggaatgtgtaggaactctggatgacgtaaccgccgccatcatgctgcatcggtgaaaaatagccgagcgtcttcgtctctgttgcattcagatcacggatggcgatgccgccgagcagtggcacgaccgcgtgaccgtagttgtcaaagtaaatcgcgggtgaggcgttcgggttcgttgtctcaaaggaaacattgatttccggatagatgccgagcggcagaatttcatccgttgagtcggtgttgtagccgtcgtgatggatgtttgcatcgctttttgccatataagggttttcatctacgtgtttgggctgtaaagccttcacgggcagtgcaccggataacggtgcagaagatgttgtttcgtcctctgccggtgtgggcgttttaccgcaggccgccatagataggcacagtgttcccgccagaaggaaactaaatacagaataaatcttttttctctttttcatcaatcatcctcctcattgttatgtttgttgtgatctacccggaataaggcagacgtttttttcccatctaaccatgtagaaagtccctgctgaaacgcttcttctgttattggctctaacagaaaatagtctacacgcagccgaaacgcatgcagggaaaaatccagattgctgcaccagatgatgcgcatttcgggaaaaagcgtccgcagatgctccaccgcattcaatccttctactcccggaagtgcgatcacagtgcaggttggcgcatttatacgcgccacatcaaagaacaactcctgtccacggtaacagtccattttgggaaacagaccgcgttcaaagcagaaccgcgaaagctgctctatataaaaggcttcctgtgtttcactacttgtcagcacggcaatgtggtacacagcactccctcctttctgccggtgttgatgctttctgcttgtcagtatacggatatgcaaacgcttttcaagacgtttggcacgaaagcctcaattctgtcacgaaatctgatttttttcactgtgccggtgttggacaggtatgatataatttggttggaatcttttacaaaggagtcagtccggtatgagaatagcaatcgtggatgatatcgagaccgaacgtgcgctgttgaaaatgcggcttgagcgacagctgagcttgtacggtgtagagacggagattttagaatttgacagcagcgagagctttctcgcagcagaaaaagaacagcactttactgtggcatttctggatatttacatgaaaggattaagcggcatggatgccgcaaaggaacttcggaagacagacgcagactgcattctgatcttcaccacaacatctaccgaccatgcactggagggatttcaggtgcgggcatttcactacctcgtgaagcccttttccgagggagaacttgccggtctgcttgctgaactgctcgctaaacttccgcgtcctgagccgattctgacggtgaaagtcagtggcagcgacgttcgccttcgctatagggacattatctttgccgagcattttgctcatatgatcaacatccgcacgactgccggtaaaacgcttgccacgcggcaaagctttaaggcatttaccgagccgctgaaaaaagatccacgcttttttgtctgcggccgcggtacgattgtcaatttagaacatgccgctgattttcaggccgccgctttctgcatgaccgacggtagccgcgtatatgtcaaccaggaacttttgaagcctgccaggcaggcatttatggaatttctgctgcaagggggtgtatgagatgaaagatattctgcgtccgatcctggagttgtccgtcgtactccccggtcttttgcttgcatatttccctgtaaaatcttatctgaagcagtcccccggaaagcttgccgcccggattctccccctgatggcaggattatgtatcggtggtggaatcgtctgctatcagctgcatgcttccactgcgtctgccctggcagggatcacattgcttgcaattgggctatataccggaacactccaaatctcccgctggaaatccggaaccattgcactgactgtctgcgcagtatttgcatgcatcaacagcttgtcccgggctatcagcgctgcgattgctctgcatatgcagctgccatcggacgaaccgtggttctgccttgcagcctgtgtattatataatgttgtttgctggattttcgtgctggctgcgttctatccgtcaacccatgcagtgcgtgtgatggttgaggacgataattttgcgcaaacgtggtatgtgttctgggtcttgccgctggtgttcattcttttgaacctttttatgatcccgcgctatcagacgacgcttaggatcggtcgtgtattacagggatatattgtgataagtattgcacttcttttgcttttgctcttgttcaacgcaattttcctgctaatggccaccagtcttaaccgcaacgcgagattacagcaggaaaaccagcttcttttcctgcagcagcagcgctatgagaatctcaaagctgccatcgaagaagtgcggcaggcgcggcatgatatgcgccatcaactgaatcaaatttctgcactggctgagaccggcgatctggaaagattgaaaagctaccttgaaaaaaacatttcccgcatcccggatctcggtatacacttctgcgaaaactgcgcagcagatagcgtcatcggctattattgtgccctggcaaagcgcgaaggcattcccttttgtgcaaagctcgatctgccgcagactcttccaatcgatgagatcaacatgtgtctggtcttgtccaacttgttggaaaatgcgctcgaagccagtatccgcactgcaccagacagacggcagattaaaatcactgcatacctgcatgccgggcggctgcttctgatcgaagttgagaatgcctatgacggcgaaatcagggagaaggacggtgtttttcaatcctccaaacgaaagggaaacggcgtcggcatccagtcaatccaacatattgcagaaaaaagcggtggtgcaagtacgtttgcctgtcagaatggtgttttctccgctaaagttatgctctgcggataaatgcacgcaggataagccctttgtgctgatgagtgtggcagagggagaaggtaccctgaacggcaccagactgaaaaagggagaccatctgattctgcccgatggatacggtaaggtggaattacaggggaagatgcagatcattgcatctaccatctagaaatttcttcaatgaaaagagggattgatttctcaacccctcatagtgtataatctacttagaaaggtggtcggaagtgaaaattccgattcgccctcagttcagcttaaaaagaaatagcattcactttggtcgggggatgctatttctttttgttattatcgtcaccatgtctgtcgatgtatgatagagctgcaaagacaactaacaacagagtaagtacttccattgtattcatgggcatcccctcctttgtattactagagggcatctaacaatcggaaaatcgcatccgctttcgtttcgattacacaataacattataacacaaatcgaacaaatgttcaactcgagatatggtgtctttcggtgcagtctatcgattcactatgaagtgattgataccgccttgtctatggtatatactatggatataccgtatgcaaggagacattttttatgataatctatgattcatcatagattatcataaaaaatattgatcaaaaaatagagacaataaaagagtgagttatatcatggatacaatcagaggtaaatttttcaaacaacatttattatcagatcaattcctcgatctgattgagaaaaacaagcgccccatggacgaactgatgtcgtattatcagtgcgccatcatggaggtggagacgaaattcaaggttttgaatcaggagtattccctggaatacgaccgcaatcccatcgaagggatcaagaccagagtcaaatcgtatgacagtattctgcgtaagatccgtcggaaaaatattcccatgacgctggaaggcatcgaagagaatatccgggatatcgccggagtccgggtcatctgttccttcccggatgatatttacgaactggcggagagtttcttacggcaggatgacattactctgatcgagcgcaaggattatataaagaatcccaaggagagcggctaccggagcctgcatctgatcgtgcaggtgccgatctttttacagaatacgaagaaactggtctatgtggaggtgcagttccgcaccatagccatggatttctgggcaagcctggagcacaagctgcagtataagaaaaacattccggaaagtcagtcgaagtttttaaaggatgagctgtatgactgtgcgcagcagagcgcagcgctggataagcggatgcagaatatccggaatgtcattgcggcgagtgagaccgcagaagaggagaaacaggatttcctgccaatctttttgcgggaaaacaaagggtaattacgtagcctgaaggtatgtagatgatggaaaggcgagaagaattgtatgaagatcagagatattttgaataaagatacagcaacgctctcttttgaggtatttcctccgaagaagagtacggatttcggaaatgtggaggcagcagcactggggatcgcggcattgcagcctgcttatatgagcgtgacttatggtgccggcggtagtaccaagggacataccattgctttggcaggagagattcagaagcagcacaatgtgcctacggtagcgcatctgacctgtgtctgtgctgacaggagcagtatcggcgcagctcttacagaaatgcaggcggcgggaatcgagaatattctggctctgagaggagatattccgaaggattttgatggggaggtatttacagattttacccatgcatcagatctggtacgctttatcaaagagaacggagatttctgcgtaggaggtgcctgctacccggaagttcatcccgattctgctaacaaaaatgcggatattcagggactgaaggcaaaggtggatgccggatgtgagtatctgacgacccagatgttcttcgacaacaatatcttcttcaacttcatgtaccgtgtgcgggaagcagggattaccgtgcccatcgttcccggcatcatgcccattacccgcggcgtacaggtgagaaatgccgtaaaactgtccggctgtaatgtgccggagcgctttaagaatatcgtagaccgcttcggagacaacccggaagccatgaaacaggcaggcatcgcctatgccaccgatcagatcatcgacctgctggcgaacggagtgaagcatgtccatgtctattccatgaacaagcccgatgtggcggcagggatccagaggaacctttcggagattttgaaggcgtaaagaatttctactttggtagattaaagctgtcaggttaaaaagaaaatatatgctataaacacaattaaataaaatgatgattaaacgcttagggaatgttctctgagcgtttttatttgaaaaaatagcataacacagctttacaaaaaatatagtagaggatataattagatataagattttacaacaaggggaggaaaatatatgaattataaaacaggccttgaagattttattggaaaagaatccttatcaaagacattaagaaatgcattgattcctacagagagtacaaagatccatatggaagagatgggggtcatccgtgatgatgaattgcgagcagaaaaacaacaggaattaaaggaaatcatggatgactattatagggcatttattgaggaaaaacttggtcaaattcaaggaatacaatggaattccttattccaaaaaatggaagaaacgatggaggacatatcagtacgaaaagatcttgataaaatacaaaacgaaaaaagaaaagaaatctgttgctattttaccagtgataaaagatttaaggatctgtttaatgctaaattaattacggatatccttccaaactttataaaagataataaagagtatactgaggaggagaaggcagagaaagagcagacacgggtgttatttcagcgttttgctactgcatttactaattattttaatcagcggagaaacaatttttctgaagataatatttctacggccataagctttcggattgtaaatgaaaattcagaaattcatttacagaatatgcgggcgtttcagcgaatagagcaacaatacccggaggaagtctgtggaatggaagaagaatataaagatatgttgcaggaatggcagatgaaacatatatatttggtagacttctatgacagagtattaacacagccaggaatagaatattacaatggcatttgcgggaaaataaatgaacatatgaatcaattctgccagaaaaatagaattaacaaaaatgattttcggatgaaaaagctacataaacaaatactatgcaaaaaatcttcctattatgagatcccgtttagatttgaatcagaccaggaagtatatgatgccttaaacgaatttataaaaacaatgaaggagaaagaaattatttgcagatgtgtacatttagggcaaaaatgtgatgattatgacctggggaagatatatattagtagtaataaatatgagcagatatcaaatgcgctatatggaagctgggatactataagaaaatgtataaaagaagaatatatggatgcgctgcccggtaagggggaaaagaaagaagagaaagcagaagcagctgcaaaaaaagaagagtatagaagtattgctgatatagataaaataatttccttatatggatcggaaatggatcgaacaatatcagcaaaaaaatgtattactgagatttgtgatatggcaggacaaatttctacagatccgctggtatgcaatagtgacataaaattgctgcaaaataaggagaagacaacggaaatcaagacaatattggattcctttttgcatgtatatcagtggggacagacttttatcgtaagcgatataatagaaaaagatagttatttttattctgagttagaagatgttttggaagacttcgaggggattacaacgctttataatcatgttcgaagctatgttacgcagaagccatatagtacagtaaaatttaagcttcatttcggctctcctacattggcaaacggatggagtcaaagcaaagagtacgataataatgcaattttgctgatgcgggatcaaaaattttatttgggaatttttaatgtaaggaataaaccggataaacaaatcataaaaggccatgaaaaagaagaaaaaggagattataaaaaaatgatttataatcttcttccggggccttcaaaaatgttgcctaaggtttttattacttcacggtcaggtcaggagacatataaaccgtcaaaacacattttagatggatataacgaaaagagacatattaagtcatcgcccaaatttgatttgggatattgctgggatttgattgactactataaagaatgtattcataaacaccctgattggaagaattacgattttcacttttcagataccaaagactatgaagatatcagtggattttacagagaagtagaaatgcaggggtatcaaattaagtggacgtatattagtgctgatgagattcaaaagctggatgagaaggggcaaatatttttatttcagatatataataaagacttttccgttcatagcacaggaaaagataatctgcatacgatgtatctcaaaaatttatttagtgaagagaatctcaaagatattgttttgaaattaaatggagaggcagaattatttttccgaaaagcaagtataaaaactccggttgtacataagaagggatctgttttggtaaatagaagttatacacagacggtaggtgataaagaaatcagagtttccataccggaggaatactatacagaaatatacaattatttgaaccatataggaaggggaaaattgtctacagaagcccaaagatatctcgaggaacgcaagattaaaagcttcactgcgacaaaagatattgtaaaaaattatcgctattgttgtgaccactattttctgcatcttcccataaccattaatttcaaggcaaaaagtgatattgcagtaaatgaaaggactttggcatatattgctaaaaaagaagatattcatattattggaattgacagaggggaaagaaatctactgtatatttctgtagtagatgtgcatgggaatatacgggagcagcgttcctttaacattgttaatgggtatgattatcaacagaagttaaaggatagggagaagagcagggatgcagcaagaaaaaattgggaagaaatagaaaaaatcaaagagttaaaagaaggctacttatccatggtaattcactatattgcgcaactggttgtgaaatataatgcagttgtagccatggaagacttgaattacggatttaaaacaggaagatttaaagttgagaggcaggtttatcagaagtttgaaacgatgttaattgaaaaattgcattatctggtatttaaagacagagaagtatgtgaagaaggaggagtgttaagaggttatcagttaacttatattccggaaagccttaaaaaagtcgggaaacagtgcggatttattttttatgttcctgctgggtatacttctaaaattgatccaacaacaggatttgtaaatcttttttcatttaagaatctgacaaatcgagagagcagacaggattttgtagggaagtttgatgaaataagatatgacagggataagaaaatgtttgagttctcatttgactataataattatataaaaaagggaacaatgttagcttcaacaaaatggaaagtgtatactaacggtacgagattaaagaggatagttgtcaatggaaaatatacaagtcaatcgatggaggtagaacttaccgatgctatggaaaaaatgttgcagagggcagggattgagtaccacgacggaaaagatttaaaaggtcaaattgttgaaaaaggtattgaagccgaaattattgatatttttcgactcacagttcagatgcggaacagccgaagtgagtcggaagacagagaatatgacaggctgatttctccagtattaaatgataagggtgagttctttgataccgcaacagcagataaaactttgcctcaggatgcagatgcaaatggtgcatattgtattgctctgaaaggtctttatgaagtaaaacagattaaagaaaactggaaggaaaacgaacagttcccaaggaacaaacttgtgcaggataataaaacatggtttgattttatgcagaaaaaaaggtatttgtagatggaagattttatgcccggcctccatatattttcataaattatatggaggtcaggacaacctgacctatcagaccgaagcgcagatgaacggaacaaatgcccataaagtgattcggacataggatacaatattctgtgtttgaaattgacaatagtgatcgaataaaggataatataattacagaaaatacaaacctagcctcaaatatctgtagataggtttattgtaaaaaaaattagtgaaataataacaaaaaagagcataaaacataagcatattaagccccaaattgtgcaataccacaaaataaggggttaaataataagaaaaaatttctactaggataaagtctatataatggtgtaaattacaaatctatataaaaagagccaagtgctcatctttcagtt

SEQ ID NO: 5504 - DNA, 4531 bp, Unknown
  gut microbiota DNA sequence
agaatacgatcctgtatagagtgttccggttcttcggaagattctgcaagagagttttccgcggtattgtgaaattgatccgcgggattcctatggtatggagaacagcacttttgtgccttgcagtctgcgtggtagagtttttcggtttaatgctgttttataataatacagatgtattactctttttctgggccatagagaaatttattctgtgcggtgcgattacttttgtggcattgatgtgcaaagaactgcaggagggcagtgaagcattggcggacggagatctgaattataagctggatacctcccatatggtattgtccttcaaggagcacggagagaatctgaaccgcatcggcgagggaatttccgcagccgtggaacagaggatgaaaagcgaacatttaaagacggagctcattaccaatgtctcccatgacattaagacaccactgacttccattatcaattatgcggatctcatcggaaaagaagtggaagagaacgacgcagtcacagggagcagcccgacggatccggattctgaaaagaaacagcggatctcggagtatgcggaagtgttgttacgccagtccaagaagttgaaaaaactgttggacgatctgctggaggcttccaaagccaccacaggcaatctggaagtacacccggaagtctgcgatgtatcggtactgttgtcacaggcggcgggggaatacgagcagcgattctctgacaagaagctggaaactatcgtaaaacagccggaggagaccgtaaaggtcatggcggacggcaggcatctgtggagagtgtttgacaatctgctgaataatatttacaaatatgcccaggcaggcagccgcgtctacctgaacgtggaacatgacggtcaggatgtgagaatcattttccggaatatgtcagccttcccgctggagatgtcaccggaggaactggaagagcggttcaccagaggagacaaatcccgccacatggagggcaacggtctgggattatccatagccaagagcctgacggaactgcagaatggtgatatgcagattgtcacggacggcgacctgttcaaggtggtgatcactctgccagagacagagtaacagttgttcgttggattcgttgggtttacgaatgtaagtatgtgacagtacggataagatttgtaaattttctaaaaatagtattgacaaaatagaaaatagagattattctaagacacataaacaacattcataagtttaccaaacctgtgaggaagagtagtaagccttagggaattttacagagagccgtggatggtgggatcacggtaaaggaactttcgccgaatggacttccgaggctggcccgagaacagatcagttttaggcgtcagcgggattcggacccgttatcaagccgatggatatgatagtatccagagaaaagtggacataattctcagggatttgtcaaattgagtggcaccacgatgatgagcaggagcttattaccgtctcaaatgtatagcaatatacatttgaggcggttttttgttatgaaagtctttcaatccacatgacgcttgtatgcaaatacgaatgtgggtacagatgcgaaagcatctggctttcatgacagtgaaaggttcagtaatcttatgagcaaactattttatggtatgcgctgcatatcatggtacgcaggacgtgcagaaagcgaggaataagattatgaagaagagaattttggcagcagtattaaccgcagttatggcaatgggtgccctcaccggatgtggcagcaccgcaggcaaggacaattacaccattggtatcatgcagtacgccgtacatggttccctggacaactgtcgtgaaggatttattcaggggctggcagaggaaggtattgtagagggtgagaacctgacgatcgaatatgtcaatgcacaggcagacaacggaacttccgccatgaccgccagcaacttcgtaagtaagaaagtagatatgatctgtgctatcgcaactccttgcgctatggcagcatacaatgctacaatgaatacagatattcccgtgatctacactgcagtatctgatcctgtggaagcaggtctggccaatgaggatggtactcccgtaggcaacatcaccggtacttccgatgcactggcagtagatgcacagttgaaaatgatccgtgaggtacttcctgaagcgaagaccatcggtatcatctacaccaccagcgaagcaaactccatcagtaccatcgcagagtacaaggctctggcaggcaactacggattcgagatcgtggacagcggtgttaccgcaatgtctgaggtagctctggcagcagcggatatcgcatccaaggtagactgcattaccaacctgaccgacaacaccgtagtaagcgcactgcagacggtattggatgaggctaacaaggcaggcatccccgtatttggttccgaagtagagcaggttaaggctggctgcgtggcatccatgggtctggaatacatcgaactcggcaagcagaccggtaagatggcagcaagagtcctgaagggagaggcagaagcttccgaactgaatttcgaagtgatctccgagcccagcctgtatgtgaactttgcagcagcagagaagatcaacctggaacttcccgagaattacaagaccgatgcttaccagtcctttgatgagatcgtagtacagtaatcaggaaatagctgccgacaggcagaaaataatagagtaatccggatatacaggattttaagaatggagaaaaatatggcgttattattaagcgtactggaacaaggaatgatctacggcatcctggcactgggtgtctacattacctataaaatactggattttccggatctcacggtcgatggcagcttcccctttggggctgccatcactgtgcgtctgatcaacggcttcggcgtaccggcaatcctcacccttcccattgcattcttaggcggagcactggtgggaatctgtaccggactgatccatgtgaaattaaaagtcagagatctgctctccggtatcatcatgatgaccggtctgtataccatcaatctgtgggtggcaggctccggctatgtagctatttttgataaggaaaatattttcaacaacagctttgtgaatagtattaccccgggtttcttggtaaatttcaaaaatgtgatcattattttcctgatcaccatggtagcaaaatatctgttagactggtacatgagcaccaagtccggatttttacttcgtgccgtaggtgacaatgataccatcgttaccagcctcggtgtggataaaggactggtgaagattgtggggctgtccattgccaatggtctggtatccttaagcggttgtatctatgcacagcagcagagaagttttgagatttccatcggaaccggtgcggtagtcatcggtctggccagcgttatcatcggcaccagcctgttcaagaaggtaacatttttccgtgtgaccagcagtgttgtggtgggatccattctgtataaggcatgtgtggcagtagccatgttcgcaggtatcagccctaatgccatcaagctgatcacagcagtcctgttcctgatcattctggtggtcagcatggacagaaagaaggtgaaagcatgctagaacttatcaatatcaacaagaattacaatcccggttcggttaacgagctgtgcctgttcaaggatttcaaccttacggtaaaggacggagaattcgtatccgttgtaggaagcaatggttccggtaagacttccatgctgaacatcatctgtggaagcattgcggtggacagcggcaagatcctgatccacggagaagatattacgagacagaaggattatattcgtcagcgtcggatcggcagagtctatcaggatccttccaagggaacctgccccggcatgacgattttagagaacatgtccattgcggagaataagggcaagccttataacctgggacgtggtgtgaataaagcaaagctggaagagtatcgcgagatgttacgtcccttaaatctgggactggaagataagatgggtgtgcaggtcggctccctctccggaggacagagacaggcactggcgctgctcatggctaccatgacaccgattgattttctcattctggatgagcataccgctgcgctggatcccaagactgcggagatcatcatggagctcaccgatcaggtcgtaaaggagaagaaagtgaccactattatggtcacccacaatctgcgctatgccgtggaatacggtaaccgcctgatcatgatgcacgaaggaaaagccatcctcgacaaagccggagaagagaagaagaccatcaacaccgaggagatcatggcgatcttcaaccgcatcagcgtagagtgcggtaactaaatggaaagttagttaaatacattggcaaaatccacgaactcccggagcatgcgatacacatgtctc

SEQ ID NO: 5505 - DNA, 67041 bp, Unknown
  gut microbiota DNA sequence
gtaggctcctcggttactaccggcgtaggcgtaggctcctcggttactaccggcgtcggcgtaggttcctcggttactaccggcgtaggcgtaggttccggctcatccggttcgcacggacagtgaatctctccaccctgcttatacttatccgctatgatgcctccgacaacagttccgccattatagacagttgcattcggagccaaaatatatccgaaaatagaatttacattaacttctgttgcattgccaaagttccaaataattctgtctgcccacagctgatgttccaatgcttgcttttttgcaccatgcgcattcatccagccggtaatattcacagttccggaatcacttacatttaccacaactgtttttccataaaaagctgcgccggtgatctctttgtcatagtcttccatcctggtatttaactcagcacttgttacattcaataccagttgtgtatcgttattttcatccgccaaagcatacaagtcgttgcttttctgtaccatattacctgccaggacattgctgatctcagatgcaatatctgtatcccatacctcacagttcttcagaagatttccagtatataatttattttcaccagctataatattataaccctgtccagtcacttcccgctcaacagagttctgtgttccgtcagaattagtaagcggaattatcagttccttttcgtctgttctgcctgacgctgtatatttaagaatctgattcggagcagaaagatctcccagataagattttcccccatagcttaccatggaaacctttaattctctaattgcggcatttccctcaatatggtccagatttgaggatacaaattcatttgtatataatacaaatgaaaatggatcatttaaatccgcacctgctgcctgcacagtaatcccctcgttccctgcgacggaacctgctaccagtgctgctaccagaacctttactactttttcccttacatacttgctaaatctgctcatctgatttctccctcaatgaaatccaatgtttttcacgttttacaacgttttcgttcctctttacaactattaagacggaagtgctttcaaaaagggttcagattttttattaaaaatgtgattttttgcttattcttgtcctctgcttatctgtttgtagtactatattcctaataatcggcagtttctgtcagtactccatggatcagagcccgcctttttgtaccggatgagccgtagcaggtagacagggatacgatatttcccctgtcacttaagtccgcatccgaagcatacagggaatgttccgtggcccactgcacataatcatcataggaggcatctgaggtaaacgtggcaaaacggtcactggtactctttgtttcataataggaaaaaatctcataaatgtagactttatcttccgtgtatatatagaagtaaggattctcctcgcagcttgccgtccccttcagcaaatttttaaaagccccaaacatgctctcatcccgcatattatgtccgaatacaaaggtattcctgtctgaccagtctgctgaagccccacagtccatgaaaatgcatccagcattcacactctccccctcaaaggaatgcttcagataatagtcattgtcctccccctgtaccaccggataactgatgtccaatgccgggaaatagagccatccacgaaaatccgggttggtcctgataagttcggcaaagtcgatctgcagctccggatgatttttctccgcaatctcttcctgtgtttcccccgccgtaggctctgccaccacctcctggcggatggcatcgtattcattttttgctctctgctctgacagataagaatgcagactcattcctccggtcaccagtaccgctgccgccagcactgctgtgatcgcattttccgcttttttatttttcatgccagtttccccttcctgcaagaatcgttataatttgttaatgattataccttatttttccgcattcgtctttacgaaagagttattttttgatatttttaaggtatgactttaaattaagaaactattgggggaataaaatcttatgatacatctttttgcactgctttcactgcttttgtgcggtgtctgctatactggctttcagaacagttctcatttccgcaataccggcagccggcgttctcttctgttgcttgtatttggaggtgccctgcttctgcgcctgctccttgcatacaccacccacggcttcagtaatgatatcgcctgttttgcagcctgggctgaccggatcttcactttagggccagggcagttctattctgccgagatgtttacggactatccgcccggtttcatgtatgtattgtatctgatcggagcgttacgatctctgctgcagattccttattattccgatctgcatattttactgttaaaattacccgcaattctctgtgatattgcctgtgggtttctactctacagagaggcggtaaagcgactgcatttttccgatctgcagggaatctttgctgcctctgcgtatctgttccagccggcggtcattctgaattcttcctgctggggacaggtggattccgtatacacgctgatgatcatccttatgtgcctgttcctcatgaagggaaacctgcttcctgcctatgctgtctacggactgggtgtcctgttaaagccacagatgctgatcttcacgccggtactgctggcagggatctgggaccatgtgttcttacaggatttttcctggcggaaattcttctataatttgtgcggtggtctggttgtcatctgcgggatgctccttctgtgcgctcctttcggattaaccgctgcgatctcacaatatacttcaacgttgggatcctatgaatatgcagccatcaatgcctacaatttctggggactattaggaatgaactgggtcgaccagaacacgattttcctcttcctgccctgtaagacctggggcactatcgtgatcctgctgatcgtactctttaccttccttattgcagcccgctgccggaaagagccttcaagatatttctgtctcggtgcctttatcatcctgacgatgttcctgttctccgtccgtatgcatgagcgttatatgtatcccggtctggcactgttgcttttctgctgcctgtaccggccctctacacctctctggaaatgcttcagtggatttgcagtgctgcatttttacaacaccgccaatgtgctgtaccattacgatccgcagaattatgaccgcaaggctcccatcattctgctggtatctgccggaatgttgtgctgcctgtattatttctataagatcatctggaaatattatgttcacgatgaaacagggactgccaccaatgcgaagacgcagaccgcaacaggccgcagagcttccgggcatactgcttccacaagatctgccgcaggactcggacaaagacttcgagaatattttctctctccccaggagcccattccttccgaagagagaatccgtttcacgaaactggatctgtgcctgttgctggcaatcggtattctgtacagttgctttgccctctatgatctgggagaccgcaaagctccgacaacaacttatgatatgtcgggagaattacaggccatcgagctggaattccccgaagatgcgctgcctgtgactatggccagttatctggctccctggcaccagagacattttgggatggatgtcaaaagtaatgccgaagactcctggacttatctcggtgagatcattttaaacaatgtcttcacctggcaggatgtctccctgcaggatctgctgacacaggccacagaaaacggtacttctgatgtgtctgccacaaccagatatctgcgtctgtcattgacggataatgatgcctctctgattgaactggtcttcctggacgcgaatggcaacatcacacgcccgttgaacgcagatgcctaccctacactgtttgacgaaagcgatctgtacccggaacgctattccttccgcaacagcatgtatttcgatgaaatctatcacgcacgcacggcttacgagttccttcacggcctgccgacctacgaaaatacccacccgcctttgggcaagatcttcatcgccctgggtgttgccatctttggaatgaatcctttcggctggcgtatcatgggtactctgttcggcattgccatgctgccgtttatctacctgctggggaaaaaaatgacaaggaatactcctgcggcagctctggcctgcttcctgtttgcctttgattttatgcattttacgcagacaaggattgccaccatcgatgtttatatcacgttctttgtgattgcaatgtactattttatgtactactattgttctatgagtttttacgatacaccgttgtataagacctttgtgcctctgggcttatgcggcatctgcatgggactgggaattgccagcaaatggaccggtatctatgcgggctgtggactggcactgctgttttttgcgcatctgctgcgacgctaccgggaatacctctatgccaaagcccatcccggaaaaagcaccaacggcatggagcatcagcagattgtaaagaaattcccagattatacggtaaagacgatcgacttctgcctgacctttttcgtgctggttccggccgtgatctatctgttgtcctacctgccatttgtagacaattcccatccgggactttttgaccgtatgctgaccaaccagacttccatgttcaactatcacagcggcctggaggcaacgcatccttattcctcttcctggtatcagtggcccactatggtccgcccgatctggtattattccggttatgtgactgatgccgtcaaggaagggatcagtgccttcggtaatcctctggtgtggtggggcggcattccggcatttttgtatgtgctgtatctgcttgtcacccacagcagtttcctgcgtgccctgacaggcaaagctgacgcttcctctgcgacaactcccctgtcccgcagagaatatcatgctgccgcatttctggtggttggctacctggcgcaatatctgccctggttcttcgtcaccagaatcaccttcatctaccactatttccccagcacaccatttgtggtactgatgatcgtgtacagcctgatgcagctgaaaaagcgggtatccaaccgcacttttgcagtcatctgctgtgcctatgccgtgctggccttcggtctgttcctgctgttctatccggtactttcggggcagccggtggatgtggattttgtagtaaaatacttacgctggcgggatacctgggtgttgatctcgggttaagtcctctttataaaatacttcatataaaaaacagtgccgatcctggcactgttttttatagtatatctattcacttagccttctgcgatggcattaccggtatacaactggtaatatctgcccttctgggcgatgagttcatcgtggttgccgcgctcgatgatgcggccctgttccagaaccataatgcagtcactgttcttgacagtagaaagtctgtgggcgatgacgaaagtggttcttcctttcatcaacttatccatgccgtcctgtacaattttctcggtacgggtatcgatagagctggtagcctcatcaaggatcagtaccggaggatccgctacggctgctctggcaatagaaagcagttgtctctgaccctggcttaagttcgcaccgtcaccggtgaggactgtgttgtaaccatccgggagctgacggataaaggtatccgcgttagccagttttgctgcggcaatgacttcctcgtctgtagcatccagcttaccgaaacgaatattgtccataacggtagcggtgaacaaatgggtatcctgcaatacgatacccagagacttccgcagatccgcttttttgatcttgttgatattgatgccgtcgtaacggatcttaccatcctgaatatcataaaaacggttgatcaggttcgtgatcgtggtcttgccggcaccggtggagcctacaaatgcaatcttctgaccgggctttgcatacatctcgatgttatgcagcacgatcttgtcatcattgtagccgaagtccacatcatcgaatactacttcaccctgtaattcaatataatctacggaaccatctgcctgatgcacatgcttccatgcccacataccggttctctcggtacactccacgatcttgccgtttaccttcttggcacggacgatggtcacatatccctcgtcggtctctaccggctcatccagcagatcgaagactctcttggcaccagcctgtgccataacgatactgttcagctgctggctgacctggctgataggcatgttgaagctcttgttaaaagttaagaagctggcaagcttacccagcgtcagtcctgcgaaaccacccagcgccatggcaccaccgacgatggcacataccacatagcttaagttacccagctgggcattgatgggtcccatcaggtttgcgaacttattcgcattgtatgcgctgtcgcacagttcatcattcagagccttgaactcctccagactcttatcttcatggcagaatactttgactaccttctggccttccatcatttcctcaatgtaaccgttgactttaccgatattcttctgctgctttacgaaatattttccgcttaagcccgctaccttaccagtgacgaacatcatcagtgccaccatgatcagactgactgctgtcagaggcacacttaataccagcatacttcccagggtaccgactacggtgatgaagctggaaaatacctgcgggatactctggctgatcatctgacgtaaagtatcaatatcattggtgtaaatggacatgatatcgccgtgggaatgggtatcaaaatacttgatcggcagcttttccatgtgttcgaacagatcatcacggagattcttcagtgttccctgagttatggttaccatgatacggttgtaagcataagtggccgccacaccgaccagataaaaaccagccacacggacaatttcccggaacagattgccaaagtcaggagtcttctgtccgatcatgggcatgatatagtcatcgatcagtctctgcatgaacagagtaccctgaatgcttgccacaacgctcagtacaatacagatcaacacaaagataaagtgaatgccataatttttaaagatatatgccatcagtcgtttaaatacttttcccggattctcaatacgtgtaccgccctgcattcttctgccgggtccacgcattccgccgcccataggtcctggcattatgactcacctccattctcatcaaagtcgccgccacccgtctgggtctgggcttcatatacttccttatagatctcattagtacgaagcagttcttcgtgaggtgcaaatgcatcgatcttaccgttatccataacgatgatacgatctgcatcctgaatactggagatacgctgtgcaatgatgattttcgtcgtaccggggatctccgtggcaaatgccttacggatcttcgcatcggtagcggtatccacggcactggtagagtcatccagaatcagtaccttcggctttttcagcagtgctctggcaatacacagtctctgcttctgtccgccggatacgttacttccgccctgttcaatataggtattgtatttctctggcatcttctcaatgaattcatcggcgcaggccagacgacaggcacggatgcattcctcttcagtagcattctcatcgccccaacggagattctctaagatggtaccggagaacagcacgttcttctgtaatactacggatacttcgttacgcagagtctccagatcatagcttctgacatccttaccgccgacatagaccgtaccctcatttacatcatacagacggctgatgaggttcaccagactggtcttggaactaccggtaccacccagaataccgatggtctctccggctttgatctcaaagttcaaatcatccagtaccggcttctcactctgtttgttatagcggaaggtcacatgatcaaaacggatactaccgtctgtcacatcgtagtcaggctgttcaggattggtgatatctgccttctcttccagtacttctgcaatacgccttgcactggctgcactcatggtcatcataacgaagatcatggctaacatcatcagattcatcaggatactcatgcagtaggtcagcaggctcatcagttcaccggtggtcaactggctggcaacgatcatgtgagcgccaagccagctgattccaaggatacagccgtatacggtaaactgcattaccggccatacataagtcatggtacattctgcttttttgaacatcttgtagatgttgtagctggccttatggaacttgtcgatctcatagtcctcacgcacataagcctttaccacacgctgtgcggctacgttctcctgtacgctggcatttaaatcatcgtatttcttgaatacttcactgaaatacttggacactgctctcataataaaaatgataacgattccaaggaacactaccgccaccagataaatgcttgccactcttgcattgatcaggaacgccatcagcatagcacagatcaggctgaccggtgcgcggaagcacatacgtaagagcatctggtaagcgttctggatattggtaacatccgtggtcatacgggtgaccagtcctgccgtggagaacttatcaatgttggagaaagagaaggtctgaatgttctcatacatggcctctcttaaatttctggcaaaaccggtggatgctttcgcaccgtatttaccacccatgacaccggcgaacaatccgacaatagctgccaggatcatgtaacaaccgatgacaaaaatatgtttcatatctcccgcctgcacgccgtcatcaatgatggatgccatcaggagcggaatcaccatttccatggctacttccaggatcatgaaaataggagttacaagagatgcactcttatattccttgatctgttttgctaatgttttgatcatagctggtttcctttcttgtatttttctatcctataataaatgttttgtaacctctctgttatgcatgactgccagcatcactcgttccggcatggcccgttacaacgtccggtccgcctgctgtcctgtcccagattctgcatcatcttatctaaaatagttaagaatgtctgcttctcttcttcggtaataccgttctccagctctcggttgaaatcccggatctgctcttcgatcagattgtgatgctcgattgctttctccgtcaacaggatccttttcagtcgggcatcctccgtggatgccacccggacgatatagcccttctgttccagactttggagcattaccgttgccgtggatctgcggattcggaattccttctccacatccttctgatatacatcgccgttccggctcttgtgatacagatatcccaacagcggcccctgcattccgttgatttcatttccttccatctgagcaaagatcgcatcgatcttccggcggatcatgttgttggcggccttgatctcaaatccaagctgacggttcgtcagtacacttgtctcctcgttcatcctgcctccttatctcctatgcctctaatgcggtgttcgtcaaatcctcatgccagcatgggattttcctctctactcgcgataacttgagaaacacgcttcgcgagtttctcaagttatcgcggcagtcgccaaagtctcgtgcaagcacggactttggctcgttgctcgcgtaaataaaaatgttagatagctaaccatttttgttagccatctaacattataacgcaatcttttatgtttgcaagaaaaaaagtataaactctttataaactccgtcaatccttcagtacccggttcaggacttcatcttccagcaccagtttctttgctgctttgcggtattcttcctcgtggagataggtatggcggtggggtttgatggtgggagccatgtcgatggctttgaggaaatcggccttcttcatatgtaaggttgccacgtaatcccagaatccggtatctttaagtaccgtgctgacacggatgtaacggtgatcctgtacctttgccatgatataggtggcaatacctacctggatgccatgaagctgcggcacttccaggatcttatccaatgcatgggaaatcaggtgctcacttccgctggtaggggcactgctgccggcaatctcgttggcaataccgctcatggccagagaatccagcagttcttttaggaacagctcgtccttgatgctctcataaggggtacgaacgaagctgttcaccgctttctttgcgatcatcacagcaaaatcattcacctcaccgcagccggccttttcttcgaaaatccagtcatagagtgccgtgatcttggaaatcatatctccgatgccggagtaaatgaacttctccggagcggtacggatcacctgggtatccacgataatgccataagccagtctggcagggacagaagtacgctttccctgcaccagaagagatgcgctggcactggaaaagccgtcgcttgaactggaagtcggcacactgataaaaggaaggttccgcagaaatgccgcatattttccggcatcgatgaccttgcctccaccgatagagatcaccgcctttgccttgttgggaatggcgaaagccagcgtaatgatatcgtcaatatccaccgtatccaattcattgtattccagaacattcacgtccgcttccttcagtgaattcatgaccagctctccgaacatatcgatcagtccgttaccgaaaaataacactacctgatccagaccttccgtttttaaataaccaccgatcttacctaatgccccgtttccgatcttcaggatggacgggatcgccatctcttttcctatctgcatggtaatctctcctttaacatttcataaaaaaactttgcccgaaactgcgtccggacaaagtcattttacactgttttctatttcagttcaacttacaattggatcccgaacatctgcagcacccagcagatcagtcccaatgcccagctggcgaaaattccgtacaggatcacaggtcctgcaatggtgaatatcttgcagccgataccgaatacctgtccttctttctggtattccaccgccggggctgtcacggaattggcaaagccggtgatgggtactaaggctcctgcacctccccatttgacgatcttgggataaatatgcagtgccgtgagtaccaccgatgcaaacaccaggatcagggaacaccagctgcctgccgtctggggatccattcccagcacattgccggtatagttcaggattccctgcccgatacagcagatgatcccaccggtcagaaacgcttttcccatctgtgcccacagattgtgggtgggagtcaccgatttgacatactgttcgtattcctgcttctgctgtacatccggttgtgccggattcccggacatatgcggggtctctttctgcatcttctgctgattgccctgttttgtgtcttcctgtttcatagatgtaccatgcctttccgccgcccggccgcttgcacggcaggcagactctgtgactgctctctctgataacagaatgtccgttttcactctttttatgtatgcttctatttacaaattttcttttaacacagttttcttccataaaaacagacttctcaacagctccgcaacctctgccacggcggtatccatatcatttccggtatccgtgatctgttccgcatccataagattatgatcttctgccagtgtcttgtgcaccatatccggtgtcgccaccatctgctgcaatttcaccgcatcataataataccccggtgtcacattcaccggaagccatccaataccgtcgaaatagacctccgcccagcaggatcctgcggccgaggaacgcgttatccgcattctgttcccgattctctgttgtcgttttctcttcgatactgccttcctctgccagaggcagctgaaaaaacacggtgaaatccgagcccttatctttcagactctctacgacgatttctccgcccatgagctgtaccagctgatccgtgatggccataccgattccggtgtcatgtacccggatcatgaggtccacaccgttttcctgtaaaaaagtcttttcttctttcctgtggttctgactgtccaccggattccggctccccatctttttccgaaaaaaagaaccagaattttgttttttctttggtattttttcagattgtaagcaattacactgtttgacgctctctttttttcatgcgataatggtcgatgagtataaattttatttcatgagggagattattatgaaaaaaagaacaaggaaaaagttacgggccctttggggtctgctgctggtccccgtggttctgaccgggtgccgcatccgtaccacgcctatgggcgtatttgcacagatcctggaatatgccgggcaaaacaattcgcaggcatcctcgtctcacggtcatggtacttaccataccgaatcacagccgtcttccacccctattccccagatggattacgactcgctggatgctatcggtgaggtccagaccatcatggtctatctggtaggctcagatctggaatccgattacggtaatgccagtctggatctggacgagatggaaacggccggagtggacacagcgcacaataatattctggtctatgccggtggtgcatccgaatggcaggaccgcggcctgtccagtgacgaatgcaccgtcctgctgttgaccgacaccggtttcgtccccgtggatacctatccggcggaaaacatgggggatcccctgactttgagcagctttttaaattacggttttgatttcttcccggcagattcctacagcctgatcctctgggatcacggcggcggaccagtgctgggctacggcgtagatgagaatttccgtgaccttctgacgctggatgaactgtccgaggcgctggaagattccgtgggtgcacacatgacaaaactggaatggatcggctttgacgcctgcctgatgagttccctggaagtggcttccgtgctggctccctacgccaactatatgattgcctcccaggagaccgaacccggttggggctggaattacgattttttgtcagagctgtccgatgaggtgatcccgggcgatgtcatgggggaatatatcgtggattcctacatggattacggggaatacgtcttcgacatctatccgaatctgtattccgacctgacgctctcctgcgtcgatctgaacgcctatgctgaagccgaagaagctctgaacgattattttgcggaactggacacttctctggatgtgcagaattaccccagactggtgcgtaaccgtgcacgggtgagagacttcggtacttactcctccgatatgaattacggcatggtggatgtcctgcatctgttagaactggtggggaatgattctgaagccgcacaggctgccacagaggccgtagaaaactgtatcgtctattccgacaccaacatggacaatgccggaggaatctctatctgctatccttaccagacggatacggattaccgggatgcctgcattgaaatgttatattatctggactttgctcccaattacacccgttttctggaagatttttacgccattgaaaacggtgacaccctgctggcagatcgagagatctccaatgcggagacttccgtcaccacccagaacgacggtgcttacgatgaatccgacattaccttgcagctgacccccgaacagcaggcgaactttgcctccggcggctactacatcctctgcaaagccagggacgaaggctatattaccgcggaggaagacgaacgtgccgatgatatgtatctcttcattcagggaagtacccgtgtgactctggatgaaaatggtttcttacatgctgcttacaaaaataacgctgtctacatgcaggatcaggacggtctctccgatattcccatgatcctgacagagaccgatatcagcgacacagagaatcgttatctggcacatgcggtgctgatgaattatactgacaactgggaatcccagacggcgaaagtacagatcgtcgtcagcgacgaatatcccgatggtatcatccgtagtgcgattcctctggatcatgacgatgcggaattgcagagtgccagcaagcagttgatccatctggatgactatgagactatgtccttagtggctagatgcagctacgtgacccgggatgataacggtaatctgttgaacttcttcgactgggaaaaatccggctggatgatgggcttcgatgtggatctgaccggcgattatcataccgtggtacagccgctggatcacccggaaaattacgtatgcatcttcttcatgaaggattcccaggggaatacctcttattccgaaatgattccgctaaaataagggaaggtcagctttccagctcttttccttctcttcctgcttgttcgatcagggtcttatccacgtcggtctcgtagtttttgatggagacttcgacgggggtaggatccttggtcaggcgcctgccaccgacatgattgaagaaaacgataatgccagctgccagcccaagagaatagaatacttccaacgtattcaagcctccgggttcagcacccatggccatccggtacacttccgtgaaaacctcattgatccccacatcattatggtaagccatgatcgtataggctgtaccgaaaaagctgatcaggcacacaaaagcagccttgatccactgctgccagcctttgtgtctgttcacacagatccattccaccagcacatctgtctctccaaccacctgcacatcgatctccggacagatttcttccataagacttaccagtttcagacaactgatcacacatcgtttttcgccgtccttgggaaaatgataaattttgatggcttttagttttgcctgcaataccggatcctgacagcgaatctctgccacatctttcaggaaaacatcctgtgcctgcacctccgcacttctgtcacatttcagataaaccgtctgctgcttcatataccctgtcccttcctgccgtttctgctctgcatagacatattttcccagattgtccatattatttgtgtgcttgctcctccggaagaattcccctgcttattgcacggtccgatgcagttctgtggcaaaataaaacagtgacccgcagatctttcccgctgccatccccagaatggccccgcccagcccgtggcggaaagagattcttctggcaaaaataggaatactgtccagcatctcagcaatggccagcgccagacagccgatgaacattccggcaaacagcccgaaaaccgcctgtgctccaatgcccgctgccgtccacagcctcatctgttccgggaagtgttcccgcagataatttccccactgactgtactctgggaaaatcgtaacaaaacatcccgccagcgtcccgaaaatgaccatttcctcatagagaagtacataacgtgcggtatgggtcttgcctgcgaaccgggggatcagccccaccgccaccagcactgtaaacactccggctgccgacagcaggccgtaactggccccggttactatgagcaataattgtctgatcagcatctccgttcccctttcgcaaagttctgctcccggcagttatcaaaggatctgcaaatgatctttttctgcacacaatagaatatcccaaaaccgaaaatcatatacggatggcacttttttccaaaatgtgctatactatctttatatatgtgcagacgctgccccacttactgtttgcgccgttttgagtgaagaattttagatttcaaaatatatgtgaggttttataactatgaatacagcagatacgactgaaaatacagaaaaaaagacgagtgcacttcccgcgaaaaaagtctccgattccgagacacatcagctgcatgtggtcattcatccggatattaacggtttcgggcgcttgttcggcggacgactgttagagtggatcgacgaagtagccggtgccaccgccagacgtcactgcggcagagacgccaccaccgtagccatcgataacctgtattttaaatccggcgcttatctgaatgacattattgtgctgatcggtaaagtcacccatgtgggacatacttctatggaagtacgcgtggatacctaccgcgaagagcaggacggcaccagacaccctatcaaccgggcttattttgtcatggtagccatgggcgatgacggcaaacccaccccggttcccggcctgatcctggagaacgacggggaacggatggaatgggacaatgccattaagagaagagagttacgattagttcgtaagaaagaaggattctaaatccgattctcgtcgcatccgcagatcggagaactcagaaatctccgatctcacggataatggatcagcggttcgatcacattatggtaattttcccgatacaggtcatctctgatccagaagatttttccgtaatcctcatgtatctgaaaagagataaactttttcatgattcttccttttcattctctgaaagcacgatcaccagccgctttggcggcaatgtatccgcatcgggattatcctccataccgattccatatacgggcctgtcatcgtatttctccggtatgtcatctctgtacttatacatttcaccggaccagttgtctctgtccactacagaaaaatatccgaatatctgtaaataaggtttcaaatcccgaaacaaaagctttccttccgtactccgggcaatatctcggggtttctgatacaatacgatctccacccggtcgatgtagaaataattcctgtacataaatatcctcctcccgttttcaggcgtaaaatcgctcttttgtctccagacagagacaggcaagtcttccaccggcaaagccacatccgcaatctaagagatatacgttatgtctgtcgttgcaccagatggaattgcccggctcgtccagatatctcctgtccttcttccacacaatgctgtccgtgggcgtatgaccgcacatggagatatatccatcgataccttcaaagaaaaagcagtcaatatccatcgtcccccgcatgtaatatcggtcctcttcccggacatccggatgggaagtcatggcatgggcaaacagatatttctttccctccagctccagttccttctgtagcggcagtcccttgatcagatcagcaatgttccgcatgtctacttcggtaatacgctgtcgcagcagttcaaaactgttgtaaccatagggagctaatttgtgccgttttttctccggagtattaaagtacttataagtataatttgccagccagtcatcgtggttgcctcgtatccaggagcactttccctgcaagccggcaagggcacaatatactccgaaggggtccgcagtttctccaccccggtcaaacacatcaccaaggacgatcagttcatcatccctggtgatattgatctgctttaggatctgtttcagtttcttcaggtcgttatgtatgtcgccgataacataatgcatatccttcctccttttctcatttccttcggtagcacttctgatatctgtcgagctttctggaagcgggatcgctccttgcttctgtttcccttcgcctcatataccggcgtatgcttatagcttctactcattcaggctccttaatatactttgtcccatatagtttctgcctcacccgcgaacccggtgtgctctctgcttctcatcctgcacctcttccatctccggaaaatctgcctccagatgtccgagaaatctttcccttctacggcctccatgccaaaggggattcggaaaaactgatattcaaagcggtcctttctctgggaatccacccgctcctcttcctccgcaggaatctcgcaagaatcccatgtcagacattctccaccggctttatgcatgctgttcccgctgcttattcctatgcattcctccctgccgggaagttctggctgtaatatattatgtggtgaaaaccggggaatcgcaatatgctcttcctcacactttttactaccatgtctgcgagccgtttcataatccgcgaagacacgcctgctctgcatattatgtatattcagagccgttaatcagttccttcaaatacttcactgccagccgtctgtttcccgtaccttctctgagtgtcaccgggatcacatatttttgaagctgcggcagcaaagaataggaaaagcccatgtcttttcgacttatctctagattctatagagttgagataacagttcctgcaaagtactgtaaaatcaatgtttttgtaaataagtggtagtatatttagaaaataaaatgatttttggatatggggatatggataaggttataaaaaatttctggctacataaaacgagacggccgcaaccgtctcatttaaagtcttacttttaaaaagtatcattatttgtattataggagctatattcgcaagtgaatgaatatctattcaggctttcaatttgtctctttcttcaatcattctttttgcgttttcgaaatattccttccaatccttatccgttgcgtttgctaatttactgggaccataactccaaaatgggattatttccttacgcggatccttatccacaaaataacactcaaatttattggtctttacataatcaacccacgctttttcttcttttatatacttctcatgtatgtttttcagttttgcatcccaattatccaaggcaccacccctggatgtcaccgctgcacttgtcatattgcccacggcataaactgatccaaggaaccccataaatgcatctataacgtctttttctattttttcccctgttttttcatgccgaatttttgataagctttctcggagttgctcttcatccttccccataggaatccgttccaataagacttcctccaattctttccttgattttttcattaactccttcttatttcccaataaaaagattttagtcggagtccaccagcttgtcatgatatcatttctcatcttttcatcactctgcttcggcatcagtgaggcatctgctacgctattttcaacatctccaggatataatttagaaaacataagagaattatataacatattattgttgtcccaatccttcgacagcttcacaaattcgtccagtaatgtccttctacagtctttcatctagatcttctctttcatcgtaatcaccctttagaagtccccgaaccagatattcagatccacttcctcattaataccgtccacagcacctttttcgctgtactgccataccttataggcatacggataatacagatcatcattataataagcgaaccacttatcgtactgttccagctgtcccagatccagcatcagtgttcccatctccatgttgtgatagatcatgggcttatagccggcatcctggatggtctggcagaacagggcggtcaggcgggttctctcttccacgctcagttcgttggcacggcccttgccgccgctgactttttccacgtcgaagacgatgggcagttcgatgttataaggttttaccttttccagtaccagattggcttcttccaacagttcctcgtctgtgatggcctgagagtagaagtagacacctactttgattcctgcctgtaatgctcccttgacattctgctcaaagtattcgtcctccaccagcttaccctcagtgccgtagcctctgaggcctacacggatgaatgcgaattccacaccgtctgcggctaccttggtccagtcgatattgccctgatgcttggagacgtcgattcccttgtgggatactacctgaccgtcctgcatatactgcacttctccgtcctcgagaatgttcaggttctccaatacataatcatttttctgcaaatcatcacgaatgggtacgaaattaaaggttccgttgctcacaacgaccagttcattgggatagtaaggacgcagggtctctaccatggtagtgccggaggtcagaccatcacggatcccggagaggatcttgttctcttcctcgtcctcagcctgctgctttgcttcagcgatcagggcatccacttcctcctgcgtataggtcttcaccacttcctgtgtgctctcttccgtctggcttccggcttccgctgctgccgccagatcgttggcattattctggaacttgctgtcgatccaggaatacaggattcccgcaacatacgttaccagtactaacaccaacaggcatccggtcatgaccagaatggatgctatggtgttgtttttcttacgcttatttgctctgctcagacgatcctcggggatccgtccgttttcattttgttttttcataagtacccctgctctcctttttcatgctgtctctctataactatgcagcattgcggtctataagattatatataactattcagagccgtgcaagttatggcaatatgtacgtcgaatgcttgcattcgtaagaacatttgacataatttatacggcgaaataaccacataagcaaaaagcaagctctgaaagagcgtttttgcgaatgcgggctgaatagttccttcatataatataatcgaatttccgacggaaaggaagaggaaaaaatttgttttatgaattattaatgaattggcccttatccggccatctcccgcatttcccgcaggatctttttctccaggcggctgacctgcacctgactgattcccaggatcccggcgatctccgtctgggtcttattctgaaaatagcgcatacggatcagctcccggtctctctccggaagctccccaagcaactgtgccagcagcatctgatctagcagcctgtccttctccacatcattttccaccgcaccgctgcttcccatgctggctcccacacagccgtgggccgcggccaccacccggtccgccagacacagctcgctgccgtcctcctgcccgctgctgctatagagggattccacctccgctccggcctccatggccagaatcacatcttctctgtccagctgtgcctcctcggacaattcttgtaaggtgggctccctgtgcagtctgctctgtaaacgctgtcttgccagtctgaccttcagcccatcctccttgatggtacgggatacctttaacagaccgtcatcccgcagaaaccgtttgatctccccggtgatcatggggacggcataggtggaaaaccgtacctccagcttcaggtcaaatttatcgatggctttcatcaggccaatcacgccgatctggaacagatcctccgggtcataacctctgcccagaaatcttttcacaatgtgatgcaccagtcccagatttttctcgatcagtacttctctcgcttctttatctccgctttgtgactttccgatgagtactgatacttcttccatgcctcagtcctcttttccgatccagtctccgcagcgcattttcttccacatatgtactcttgtgcccttgcccgggatgctctccacttccagctcatccatgaaggcttccataaaggcaaatcccatgccggaccgttccagttccggcttcgtggtaaataacggttccatggctctggccacatcctcgatgccttttccctgatccgatacctcgatggaaagcgtatcgttctcaagaatgcagtgcagtcttacctttcccggatggataatgctgtacgccgggcgcatctccccatgcttcgtataaccggacagattctcgtatccatggataatggcattggttactgcctccgatactgcggtcttgatatccgccagttcttccagtgtgggattcagatgggtaatgaaagccgccaccgccactctggcaaagctttcattacaggagaccgcgtcaaatacgatctccatctcattccggctgccctgcgttctctgctgcaaaagttctttttcttccgtcacctgaatgttttccctctctgctaccatgttctcctcatttctgcgcctattattgcactgtttttcataattttttgaataatttctttcattttcgacagaatcttccttccaacgtttaaccaggcaggatctcgacgatcttgtgaagcccggacatacggaagatccgctggatctgccggtctgcatggatcgcatagacatgtccgccgaagcaggaaatcttgcggtaccgccccatgatgatcccgatcccggaagaatccatgaaccgggtatcctcaaaatcaaacactacattttccacgttttccctgaccaagagcctgtccgccccttcgcagatataggaggctctgtggtggtccacttcctccggcatgcgcaccatcaggcagttatcaatgatctgaaagtcttccatatttcctcacattccgctgttttccagcatttttactcaaaagaaaagagaacccgcgctttactttacgcaagttctctttcgtgtgttgtgtgtcattgtctgatggtatgttgttcttccctactgtgccgtattctctgccagctgggaacgatatctctgggcacttctggccgtttccgtatccgggaacagctctatgatcttgtcataggtggtgatggcattctgggcatcgtcactcttacggtaagagttgcccaggctcagccaggcatccttgttggtctcatcgtaaatgactgccttggacaggttctcgatagccgtcgcgtaatcctcactgcggtaagcattgtagcctgtctcataatactgtgcggacagctgcggcccgatcaggccaagcaacgtcttgtacagcttctggaatgcttcggaagtactgtccacatccacggatgccgaaatgctttccaggttagccgccgtctgggtaatatcctgcgtctccagatatgtggtggctgccgctaacaggctgtcgatggtctgtagcgtaccatcggttcccacatacccctgcagttcctgattcagcgtatcattctctgtctgcagtgcctgcatctgggtctccagttcctggatccgggaggtcttggtgtctaactgattgccgatgtcggtgatggtcttctgggcctcattgttggcattggataccgctgccggaaccaccagaaaatacatcacggccagaccaatgatcagaccgatggcaatattgatcagggaagagagacctgcactcttctgctccttcacattcaaaggctgaatgatgatctcattgtcactctggtagcgaaccgcatcatccttcttccgccggccggtctgcttgctattctcgtccggagtcagctgcatctcaacttccttcagataccgcagggtcagcgtattgttgcggtcgatgtccatgcacttacgcagttctctctccgctctgtcccactgttcactgtccatataaagcagggctaacagctgatgtgcccggatgaacttcgggttcagggacagtacctttttcagctggatgatagccagatccttgctgtcctgattgcaatagaccagtgcctgattgtatttcttgatggtctggttaatggcatccaggcgggccgcattggactgcagcatattgatgtaatcgtccgcgatatttttctcaggccgcatatttttgctgatgacccattcgctcagtgccgcaacgacctctccggtctcaaaatacaccagtcccagcagatttctggcttcgatattgttcttattaaatttcaggctctgccgtaagctgttgatcgcacctgtgagatcccgtactcctgctttctccagaccgtcattgtagaaacggttggacatacacatgatcttcttgtagagggatacatctgctccgcaggacgtacagaaatcgtgctctgacagatggcagccgcagttataacaaaacatgctctccctccttatttctcttctttttcttcggattcttttatcattttcaccaacagatccgccgcatcggtcagatcctgattgtagatagcttcctcagcgtcttccacttccaggctgggatgaaatttcttcagttcttcttcaaaattgatcatggtccaaagactcctttatttccccgacaagatacaggcttcccgcgatatagagccgttctcctggctgtctgcccgagacttccgtccgcagtgccgtatccgcttccgtatacatagtaaaccggtcttccggataagctgccagtaaacctttcagttcttccagcgaaagcgacctcgccgtccgcatatgcgtaaaagcgatccggtcgaataatcccgacgtgatcaccctctgtatcatatgcctgcaatccttatccgccgccacaccaaataacagtctcctgccctccgtgcagccgtcctgttccacggtatccagaaaagcccggatgccgtcatcattatgcgcaccatccacgtacacctccggaagtacttcttccatgcgtccctgccagaagcagccaaggattccctgtcggatctcttccacagtgggacacccggatgcggcacacattctgccgtcaggcatgtccatactgcgaaacagcacttccacggcccgcactgccaatgccgcattttccatctggtagcgtgcaatggtatgcaaagtaagactaatataattataatactcagagcgcaaggaaaaatcaatgtatttcttccgaaatccaaggaaagtatagtcctttttcgacaccggtatctgtatcgcaccaagttctgacgctttgcggcaaattaccgcactggcatccgcatccccgtccagatacaccaccggaacaccggggcgcaggatccctgccttttccgcagcgatcttcgctgtggtgtctcccagatactgtacatgatccagactgatccgcgtaatgacggtcaggagcttattgtccacataattcgtggcatccagtcttccccccaggccggtctcaatgatgcaataatccggcttttcttctgcaaaacagagtaatgccatgcagaataggtattcataaaagttgagaacgaattcctgtggcgcttcttcccctctctgcccgtccccagtattagaagaattggtctcctgcaaagcgtcccataccgcaagaaacccctgtaaaaaagcttcctctgagatcatttcaccgttcacgtcaaaacgctcccgcatatccaccagatgaggtgaagtgaatacagccgtgcgatagcctgcttcccgcaggatcgaactcatgtaggcacagacggagccttttccattggtgcccgccacatgaatgatccgcagatccttctccggatttccgagtttttttaaaaaccatttaaggtccctgctgtccgcaggattttttttaacagtaaagcggggcatatccttcagatatgccaccgcttcttcaaacgttatcatgtcattaccgaatctcatcgtattccttatgctttacgttctttttattctgtacgtttcgttgcagatcatgccagctgttctaagcgctttgtcacctgttccatcatctgctcgtattttgccagcttttccttctcctctgcgatcttcgcttcgggagccttggacaggaatctctcattggacagcattcccctggaacgtgacagctcgccttccagtctcttctgctccttcttcagtcgctcgatctcctgtgcgatgtctaccagctctgcaaacggaatgtacagggttgcaccggggatcactacggataccgcatcctctgcgattccggtcttgtcagcctggatcatgatctcattcgcataagcaaggcttgcgaagaacagcttaccttcctcaaaaatcctgcggatctcgtcattttcgctgactacatacacacttgccttacggctgggtgctacgttcatctcagtacggatgttgcggataccgcgaacggcttccttaatcgtttctatggccttctcctctgcggggaatgcacgatcctcgctgtactccggccacttgctgatcatgatggactcttcttcattctgaatggtgcagaagatctcctcagtgatgaacggcatgtaaggatgtaacagcttcagggcgtcgatcaggacagtcttcagcgtccacagtgccgcattctggctgactgcatcgtcggtgctgtacagacggggttttaccatctcgatgtaccagtcacagaactcatcccagataaagtcatataccttctgtacggcgatacccagctcgaagtgatccatgttgtcggtcacatcttttaccagagtatttaacttggacaggatccacttatctacgggctgtaaatctgctgccgcaggggtggtgatatcttttccggtcttctccaacgcctgctccatgttcatcataatgaaacgggaagcattccataccttgttggcgaagttacggctgttctctactctctcatagtagaaacgcatatcgttgcccggtgcgttgccggtgatcagggtcagacgcagtgcatcggcaccgtactggctgatgatctccagcggatcgataccattgcccagagatttggacatcttccgtccctgactgtcacgtaccagtccgtggaacaatacggtcttgaaaggcttctctcccatctgctcgtatccggagaagatcatacggatcacccagaagaagatgatatcataaccggttacaaggacatcggtgggataaaaatacttcagatcctctgtctgctccggccagcccagggtctcaaaaggccacagtgcggaggagaaccaggtatccagcgtatcgggatcctgcgtaaagtgggtgcagccgcacttgggacataccttcggcatctccttggctacgactacttcaccgcagtcatcacagtaataagcgggaatcctgtgtccccaccacagctgacggctgatacaccagtcgcggatgttatccgtccagttgaaatagttcttctccatacgctcggggatcagcttgatctcaccatttttcactgcttctcttgcaggtttgatcaattcatccatcttaacgaaccactggtcttttaccataggctcgatggtggtcttacaacggtcatgggtacctacgttgtgtacatgatcttcgatctttactaacaggcccatctgatccagttcttccacgatggcttttctcgcctcatagcggtccatgccctcgaacttgccgccgtttttattgatggtggcatcatcgttcaggatattgatcacaggcagatcatgacgcttgcccacctcaaagtcattggggtcatgagcgggggtgatcttaacgacaccggtaccgaactctctgtctacataagcatcctcaacgatgggaatcacacggtttacgataggaagcagtacctttctgccatgcagatgggtgtaacgctcatcatcgggatggatggctactgcggtatcacctaacatggtctcgggacgggtagtggcaaaggtcagaaactctgtggtgctgggcgttccgtcctcgttcatcagcggatacttgatgtgccagaaatgtcctgcctgttcctgatattctacctctgcatcggagatggaggtattacatacgggacaccagttaacgatacgggcacccttgtagatgtagcctttttcgtgcatcttcacgaacacttcggtcacagccttgttacagccctcatccatggtgaaacgctctctgtcccagtcacaggaagaacccagctttttcagctgaccaataatacgtccgccgtattccttcttccactcccaggctctctctaaaaacttttcacgacccagatcgtgcttgtcgatgccttcttccttcagcttctggatgatcttgacctcggtagcgatacttgcatggtcggtgccgggctgccacagtgcattgtagccctgcattctcttatagcggatcaggatatcctgcatggtgttgtccaatgcatgtcccatgtggagctgtcctgtaatatttgggggcgggatcacgatagtgaagggagtcttactgtgatctacctccgcatggaaatactttttgtcaagccacttctgatacagtctgtcttctatgccgctggggtcataggtcttggctaattctttgctcattttgtcctcctttttttgcatttgctcctattcagacctcatgcgcaaaatcgcatctacgatgctttccttttgcttattgaggttacttcgccctataaatccgcatggatattcttacgaatgcaagcattcgacacctatccatgtgaatttacatggctctgaatagtcgcaaaaaagccctctgccgactctcgtcagcaaagggcgtcagtaacgcggtaccacctttgttcacagcttgcgctgcctcgtgacttcttacaaagtcctatccggtaacggggataactcgtgagaacttacgtccagaatatccggtctcggctctccggcttggaagctaccttccacattcctgtcttgaagcagccttccagcgcatacatgcagccgctctctctggtaaggggaaatgtgtactcctcttcgtcattgcctttaatctgtaaaactactaataagaaatatagtacaggaagcaatcctttgtcaagaaaatcttgttttcctgcagatcgtattatcaacgcccaaaactggtatgataaaaaaaacacattctggctcttttaagcaagccactttttctatacactgaatcctaacatatcccaccgaacaaatgggaattatgaaaaagaaattaaaagaggagatcatcattatggaaaagaaaaaatcatacggtgtattgatcgcgggagccattctcctgatcctgggaatcgtcctggcagtcattacccacaataacagttatcaggaatccgttgcttatggcagccagttaagcgatgtcaaggcacagctggaagaagtagaagcttccatcgaggcagtcaccggcggcacagcagacggtgatctggatgccctgaatgcgcagaaggatgaattgtccgctcagaagtccactctgtccgaccagaagctgtccgcagagcgtccttactcctacagcctggttctggtattcttcgctatcctgttaactgccaagggattgtacaatgccatcgcaggcgtaattcccgcacagaaggcggatgtgaagaagctggcgcaggcaggtctgttagcagctctgtgctatatcggatttgctttcttcaagatcgacattcccgtgggtcccgagaagaccgcattccatctgggcaatgtattctgcgtactggcagctctgctgctgggcggttactggggcggacttgccggtgccatcggcatgaccatcgccgatctgaccaccgcttatgtaaccagtgcccccaagaccttcttattaaaattgtgcatcggtctgatcgtaggactggttgctcacaagatcttccatctgagcaaagagcattccgtaaaatatgtgaccggcgtaacgattcttgcttctgcctgcggtatggcatttaacgtggtagcggatccactggttggttacttctataaaatgtatctgctgggtgtgcctcaggatatttccaaggctcttgccaagatcagcaccgtaactaccggtgtcaacgccatcgttgctgtgatctgtgcttccgtattctatctggcacttcgtccggcactgaagaaagcaggattattccatgacatctaatttcgatacttctgatagaaatgcacaaaaaggcggggatttcgttccccgccttgctatgatcaacgatattgccggtttcggacgctgctccaccaccgtgtccctgcccgtgatcagcgtaatgaaggtacaggtatgccctgtgcctacttctgttttatcgaaccatttaggatttcctctctgccattttgatgactatacctctcatatgcgagattatataaaagtgtgggtcgaactgggacttaccttcgatgggttatactgtggattcttaggaaatgaagagcagatcgacattgtacgggaattcgtggaaatgttccggccgcccctgtttttgctggatccggtcatgggagaccacggcagagcctactcctccattacagagacccatgttcagaagatgaaggagctgctgcctctggcggatattatcacgccgaatatcacggagtcctgcctgctgaccgggactccctggaaggatggggaatggacgctgcaggagctgtccggattatgtgaacggctggctgacatttatcaaacagcttccattacatccgacgaagcctccacgggcactactgccagtggttctgacggggggtccgttggcgctgtctccaatggctccgccggtgcatccatcgtcatcaccgggatccgtcagggcgattctctggtaaatttcctgtgggatgacggtgtctataccactgtagccacccccattgccggagcctcccgccccggcaccggagacatcttcgcctccattctcgccgccgatgccgtccgcggggagaccttactatcctccgtgcagaaggcagcgaacttcgtaggtctgtgcatcgccggaagcgaaaaggccggaacgccggtgcaggagggtgtggtgtttgagaagtatcttgcggcgctgttgtaagaatattaaagctcaatgatttagttgacttttcatttcatctcttttatattttatatagaaaaggaattgtggttgttctcaagaatgagatcccgtatagcaaatgcttaaacggtgtgctgcgattctttttttatattatactggctatcctccatctggaaagggggcattaaaattgagtaatttgacacatactgattctatgatgaatgaaatcagagaattgttattaaatgcacgtcagcgcgtggcggtacaggtaaatacggaattgctgtctacctactggaatgtaggaaagatcattgttgagtatgagcaggaaagcaaagatcgggcagattacggaaagcagaccttaaaggaactttctaaaggattgacaaaagaatttggaaagggattttctgtttccaatctatacaatatgcgcctgttctatatgcaccatcaaaaattccagacagtgtctggaaaattgtcgtggtcgcattattgtgagctgttgacgatttcggatccagacaaacgcagtttttatgaaaaggaaaccatcaactccgggtggtcgatccgagaattaaagcggcagatttccacttctctctatgaacgattattgctgtcagaaggaaagatgaacaaggaaacggtacttgccctcgcggaaaaaggtattgaaatgactacgccaagcgacattatcaaagacccttatgtttttgaatttttgggtgtgccggaaaacaagcccctgctggaaagtgatcttgaaaaagcactggtcgcgcagattgaaaaattcctgttggaattaggtcgcggttttatgtttgtagggacacagcagcgcattaccctgaacaatactcactactatgtggatatggttttctataataaaattctccgggcgtatgtgctgattgaattaaagacaaccaagctcacaccggaagccgccggacagcttaatatgtatctgaactactacgccgcagaagtaaatgatgaacatgataatccacccatcggtattatcctttgtacagacaaagacagtgtagctgctgaatatgctctcggaggtctgtccaacaacatctttgcttcacgctatgtttcttatattccaaataaggagcagctcatcgcacaggtagaagctgttttggatgaatggcacaaaccggaaaaagaataacaaaagaattctaacattaccgcctgagggaatcacaactccactcaggcggtaataccaagaaatattttatttaaactccaccacaacgctgcccatagcacattccagctccatatttttagaagcgttgttgttgatttgtttctcctgtgccaggccgttgtaactgtcatcaccgactttcagttcacccatgccgcagcttaagtcgtagttgaaatctgtctgcgttcctgccagtgtcagcttcagctctcccatggagcactctccgtccaagcgttcggtcacatctccggtcagccggacagaacccattcctacggacacctctgccacgcgactgctcagttcttctactgtcatctgaccggcaccacagtctaactctgcctgatcagcatccagtttttcaaacgtcatcttgccggcacccacattggcttccagcgccctcgtctgcaattcctctacactgaggcttccggcgcccagatccaaagaggtattttcaaaatgatatccctcaggcacatacaggcagatggaaccgcccagattaccgtcactgttgttgcttgcttttgaggttccgctgatctccatcgtaccgccttccacatatccctggaactttcgcattccgtcggcttctacccggaagcagttgtcctctgacacccgaatcttcatgacacagccaccggcctgcacctgtagatccgtgatgccctggttgtcatcccccagaacatacagctctatctttcccgactttacttcataatctgagtcataatccaccttgtcctccagatcatagtgcacatcgcccatattttcccggatctgctccgtcacaccgtcactccagtcatctaccttttcttcggagattcttcccagggtaaccgctgacaggatctcccccggcgaaaaatgcgtggagccattccccaggcttccgctcactcccaggatcagtcccaataatataaatatcaacgctgtgatggcacagcccttcataaattttctcatgcttctgctttacctcttttctggaataatcctccgatccaacaacagatcgccggtgtggcgattcccgccatggccacggtcaacatcaggaacagaagtccgacacctccgcagatcagtccggcaccgatcagccccattcccacgaagggatgcgtaaacagactgatgatccctgcaaccaccagtgcgatcagaatcagtatcagtgctgctgccgttgccccgaaaccaacgatcagaccgagccatgcagcgatcagccccgctgccacaccgatgcctgcggaagctactcccaggatcaccggagatgccaaaatacataaaattacgatcaacacgatcataccggtggacattccttctttttcccgagaggacactgctccagctgcctgtacttcattttcctgcccaaagcctgcctctccggcaccgctctccgcgccggaatccgccggataagtgatcaccgcacggttgtccgcattgatcttctggtaaatattctctccataaccgttcccgaaaatgtcctttttgatgttttccgccaccttggcaggatttcccaaagcctcaataacgttctgttcattttccggacccgcatcattaaaatattcattatagtattgtaatgcttcctcccgctctgtagcggaaatattctgcaacagactttccagctgcctcataaactccgttctattcattctactatgttctcccatctgcgcctgtttacgcctctgacctgtcacttagttttccttcaaacaatcccgtgatcttatcgctgtagctgcgccactcactttcatataaatgaagctgcgcccagcctctgctggtgactttgtaataacgcctcgttctgccactgcattcccggtcatagacttccagacattcgtccttctgtaatcgccgaagcacgggatacagggtggattccgacaattcgatcacctgccggacctcctgggtgatcttgtacccataggttccttccggttcccgggcgaccaccgccagcacgatagcatccagcagagctgctcctgtattaaaaagcatcctatcgctcctctctgaaatttgcggctatccgcctttccttacaatattatatgccgtatagtattgctctgtggctatactatacggcatataatatcatgcgtcaatatagagaaaccgtaagaaattctaaagactttccaaagattccacaatggctttgccatcatgaccggggatgctctgttagttttccatcagccagaaatatgcactgtacgccggcagaagactaccgccgccaaagtcatgtttctctccggtgatcagatccaccgccgtgccgcagccggcatcaaaatgcgccatgaaatccgctccatccgcattgatagccaccatgactctctcatgctccgactttctttcgaaaatgcattgcttattggtcagcagtactgaacggaaagcaccgtaattcaatgcttccgaatgcttctttgcctctgtcagcttgctgatccagtcacacagaccattccactccggcttatcaaagtagggacgcagagcgggatcgccgtcttccttgcggcccttgaagccccattcacttccgtaatagacacagggaatgccgggcataccgaatgccatggcatagatcagcggcagatgattctcgttgttcaaaatacttgccacacgggtcacatcgtggttgtccacaaaggacagcagatgcttgcccttatacagggtccagttctccggtccgaactgacgtaacagggaatgtacgatctcgaacatattcatactgttgaaactgctgtaaagtcccttgtagcactcgtagttcgttgcggaatgcagcatctgatcgttcatcagacggttgtagtctccgtgaagcatctctcccaataagaagaaatcctgtttgtaagcgctggttacttcccgcagtcttctgacgaaattttcatccagactgtaagccacatccagtcgcagaccgtcaataccgaattcatcgatccagcccttgacactgtccagcagatagttcaccacatcgggattctgcaggttcagcttcaccagatcaaagcagccttcccagccctcataccagagtccgtcgttgtaattggaattgccaccgaagtcgatccggtagaaccagttcacatacggtgaattctcccggttgcggatcacatcctggaactgggcaaagcctctgcccacatgattgaacacaccgtccagcacgacccggatcccggccctgtgcaatgcgtcgcagacctccttaaaatcttcgttggttcccagtctcacatcgatcttacgataatctctggtattgtaaccatgagtatccgattcgaataccggggagaaatataccgcgttcactcccagcttctgcatatgggggatccagtcctccacacgtttgatctcatgtctctgtactccgtcattttcaaaaggaactccacagaatcccataggatagatctgataaaaaacactttcataagcccacatattagtcaccatacctttcattgactgatccagtaccgttttgtttttttatccacaacggttcttttgctattatacaccatttttgaaccgtctgtcgttttttctgtgtaaaaccacgaataatccacaaaatccaccgacttatccacatatacacatgtgtcatatgtggttatgtggattgtcatatcggatatcaactcgtgtatcacattgaaaatcatcccttttgccacaaccaggcatcccagaagcgctccacctttttggctaccgtatccacggtcacaggctgcacctgttcccactctctggggaataatctccggtaggaatactgctgaaaccgatcatccagcagaacaatgatacccacatcctccgccgtccggatcacgcggcctgccgcctgcaatactttattcattcccggatagcggtaggaataatcgaagccgttctctccgtcctcatcaaaatagcccttgaggatttcccgctcacagcctacctggggcagtccggttcctactacaatgactccgatcagactgtccctcttcagatcgatgccctctccgaagattccccccagcacgcagaagccgatcagcgtctgctcctcttcctcctcgatctccataccgatgagactttgcaggtcacattcctcattgccccggaagcgattcaggaagtattcacgctcttcctcattcatggattcctgttggacgagacattcttcttcctctgtcataaaatactgttcatagatctcgtaaatatgattcataaaggaataggacgggaaaaatatcatgtaattgccgtgccggttcttcaccacttcgtgaatgtaacgggcaatattgtagtattcttcctgggatcttctgctgaacttgctagtcacatccccggcgatcagtatggtacgcttctcgggatcaaacaccgagtgggcatacacctcgtaatcctccttctcaccgcccagcaggttcttgtaatactggatgggcaggaaggtagcggaaaaaaggatcgtactgcgtcctctgagcatgcattccttcaggttttctctgggattcacgcagaacagcttcagttcaaagctgccatcctcacacaatctggtatatttcacatagttttcatcttgtctctcgtaaatatccagaaaatgactgagcttgaaatagaagtccagcaggttctcccgtacttccaggctgaccttctcctgctcctccagataatcactgatcacagcgtgcagtctggtcaagggctgcaccagcatgtcaatatcatccaccagccggtacccgtcacagtcccgcttcatggacagcagctgtgcgttgcatttctccagcagctggctgatccgttccgcatagccttcccgcacaaaggtactctttccgtcagactttttccctttgtgtccccttacatagagggaatcggtaccgtctgtttcctccagggtaatctcctgtggcagttgttttgacatacctgtcatttctaatgtcatctgcccggaaatcccgtctttatcacgctttttctgggctgcttcttccatttccgacgtgattgtctgtttgatctcccgcttgagttccaacagatcttccttccgtagcggtgcactgtacatctcccggccccgctctaagaggttatgtgcctcatcgatcagaaatacataattaccctgactgccatctccaaagaaacgtttcagatacacatggggatcaaagaggtaattgtagtctccgatgatgccgtcagcgaacaggctcagatccagtccgaattcaaaagggcatacccgatatttcagggcatattcttctattttgcttctggtaaagctctcttcgtgggtcagaagatcatagatagcctcattgacacggtcaaaatgcccctttgcataagggcactgctccggattgcactccgtatgaccctgaaaacagatcttctccttggctgtcaggataatgctcttaaagcgcagtcccttctgcctgagcaaagaaaaggtgtcctccgccaccgtccgggtgatggtcttggcggtgagatagaacagcttgtctcccatatcctttcccatggcctttaccgtgggaaagatcgtggatatggtcttaccgactcccgtaggagcttcaataaataattttctcttatgataaatggtctggtacacatagctgaccagctctttctgtccatcccgatagtcgaagggaaactgcagctcagcaatggactgctgccgcaattctctccactgccaggtatagtccgcccatttgcggtaatcactgatcagctgctggaaccaggcttccagtctgacgaattcataatcttcataaaaatagcggatatcttccgtctctatattgcaataggtcagccgcacccggatatagggcagctccttttgcaggctgtacatataggcgtagcatttcgcctgggcaatatgtaaaggcaagggtgccttcagcttcgacagatctctataggttcccttgatctcatcgatggtggtctctccattctgctcgatgatgccgtcggcccgcccttccacgatgatgacatagtcctccgtgggatgggtgtattttaatgccacttctgcctgatactccgcacccatacggcgctggatcatacggtggatccggctgccctcctgcatggcattctccggggatccctgcctcctgtcgtcgatgtcgccactgcgcaggatgaactctacaagattacgtaccgatattctgacttctcctgccatgtgacttcacctccctcaaacaagtccctacgatacccagatgcctacggcttgttccgtgctgcgcactctcacaagcctccccactattcgcatatcgtgggggcggggctaaaggtctttcatccacttatgagcaagctcaagtggatttagacctttgtcccctggcatcatataataaaactacccaggtaaatagtactctatcttacctgggtagtcaaatgacattctgttgttgagaaatactgacctgtcagtgcattaacatgcaatcgcacactgcttcagcatctcttcgaatttatcattgtagccgtcataggacacggtcaacggcttcgtgaaatccaatccgtacactccaaggaatgatttggcatcgattacgtatctgttatagcatatatcaatatcaaaatcacactttgaagctacatcaacaaaatgtttcacgtcttcaggtgtcaaacggatcgtctttaacatttcttgttccttcctttcaatagtaagttcgatcgtaagtaaaataatacaccgggtactttcccctcacatctgaaatcattactattatagccaaccatccccaaatgtaaagcggtttttttcttccagaaaacgcacattttgggcatttttaccactctgttatcattttcacaatatatgttcgccgtatggaaaaccttttcggcgttttgtatatttgttgcgttaccgcggtaaaatataaatcccaaattggcgaaatctaccgaaattccaccatatattcttggaacctcagcggaagcatatttcgttgcagatccctgttttcacgttcttttatggctattgtatgacagaaggaacggaaaagttcccggtagtgctgttccgcagcggacagtttctccgtctcagatcttactttctcccaggcatccttcccttgcagcgtataccagggctttcccgccggatgtattccgaacagataccggcctgcatcgaacaccagaaagtcttccatgggaaagcggtctgcaaaatgcaccatcagaaaggtcagaatattattcttcggcgcgatcttcgaatagaggattgtattctccaattcttcaaaccgcgtaaatcctttcagatggtgatactcatttccggcgcctctggccaggctgaaggtctggtttacatacgtgtctgccatggcatccagcagatgtcccggcggacacttctcggaaagcccctttgcaatggtacggtataccgcctgggccttttccggcttcggggatgaaagagccagacacaggctctcataatcttcctccccaaatctgcgtttcaatgtccggatcaccttcaccgtcttctccggatccggcaccacctccacagactcagagaacaacagattctcctcgatggtcgtgaccatggtgtcccgagcgggagaatgatcttcataagtattataaatggcagtgaatatcccttctaacgaatcctcgcaatgatatattttcatataataagtttcacctcccgctttttctgttctcttccccttctgccgctgtcaacctatcattttgcattgccttgcttctgcaaacggccgtcatctaccggtacaggaccttacgtttacctgccaatgcaggcagtcaggaaatgtttccctgtacgctgtgcgctacagttctcccactgctgcaggcagcacttcctcctgccgtaccccgttcgggaacatcccatcatcaaacaaggtcatctgccggtaactcatgccatcgctgccgaaccggatccgttccttcggatccgtcagattccgcacgatatagtcctcctccagcttcgtgggatacatcatcctgccaccacaggtaataaaataaacagcccgtttcatcaccacgcccagcttcttcagatcctgaaacgtaagctttgtgctcctcctggcactaaggatccgtctggcgcttttcacgccgatccccggcacccgaagcagatctgcataaggtgcccggttgatctccaccgggaaacattccagatgccgcaccgcccagtcctccttgggatccagcatcacattaaaaaacggtcttttctcgtccaacagttcctccgccttaaacccataaaaccgcaacagccagtctgcctgatacagacgatgctcccgcagaagcggcggccccccgggaagcgccggcaggctcttgtcctcattgacctttacaaaagcggaatagaacacacgctttaactcaaacttctgatacagattctctgctacatttaaaatctgataatccgtctccggggttgcccctatgatcatctgggtagactgcccgccactcacgaaaacagggctcttgcggtacaggatcagttcctccttattcgcatgaattccattctggatctgccgcatgggcgtcagaatatttttccggtgcttgttcggtgccagtgtccgcagcccctccgccgtgggcagctccaggttcacgctcatacggtctgccagataccccatccgctccaccagctcgggatccgctcccggaatcgcttttacatggacatagccgctaaaatggtattgattccgtagcagccatatggtccgatacaacaattccatggtaaaggtaggatcctgtatgataccggagcttaaaaacagtccctcgatataattacgccggtaaaactccatagtcagtgtacagatctcctcaggggtaaaggtggctctgggaacatcattggactttcgattcagacaatatttacagtcgaagatacattcattggtcatcagaatcttcaacaaagaaatgcatctgccatccgaagaaaagctgtgacagatcccggccttcgtgcagttccccatgtgcttcccgtcacccttacgttccactccactggaagtacaggccacatcatatttggctgcatcggtcaggatctccagcttctgcatgatggacaattccccgttttgtataagatattccacattatcaccgccttttaccgaaaatttccagaatcagaacgtttgttcttgtgtatattcaagttagcacatatgttcgatttttgcaagtggttattttttccgaaaaaaggcttgcaaaatcgtgcatttcgcagttaaataatataggaatattttgtaacacacgccgcccggcggcagaatgagaggtcagtatgtcagatattgtcatacctaaaaattataagtctcagctgaacctgtacgagacacaggttgccattaagacagtgaaggactttttccagggattgttagcagagcgtctgcacctgctgcgtgtatctgctcccttatttgtggatcctacatccggactgaacgataatctgaacggtgtggagcgtcccgtgaatttccatattgcagcacagggagaccgtgaagcagagatcgtacagtctctggccaaatggaagcgttatgccttgcagaaatacggttttcagcccggcgaaggtctctacaccgatatgagtgccatccgtcaggatgaggagaccgacaacatccattccatctatgtggatcagtgggactgggaaaagatcatcacgaaggaagagcggaatctggagactctgaaagagaccgtccgcaccgtatacaaggttcttcgcaagaccgagaagtatatgtccatccattacgactacatcgaagaaatccttcctcatgacatcttctttgtaactaccagtgagctggcagagatgttccccgactactccccgaaggagcgggaatactacattgccaaggcaaaaggcgctgtctgcatcatgcagatcggtgagaccttagagaatggcaagcctcacgatggccgtgcaccggactacgatgactggtcgctgaatgccgatatcgtggtatattatccggttctggacattgctctggagctgtccagcatgggtatccgtgtagacaagaaggctctgttagaccagctacagaaggctggctgccccgagcgtgccgaacttccttaccacaaggcagtcattaacggtgagcttcctcttaccatcggcggtggtatcggtcagtcccgtatctgtatgttcttcttaagaaaagctcatatcggcgaagtacagtgttccctgtggtccgatgaagtgatggagactgcaaaagagaacggcttacagttgttataagacatttccattcagacttcaaaatccccggaagatgaaaatctcccggggatctgttttctgtttttattcaaaaatcacaaatttctcattttcaaaggttttctcgtatccatatgcatccatgaactcaccgatcaacaaaagcttggcattatccacgatgagactccgttctctttccgtgggctgtaatgcttccagggcatcctctcccgcttccagatacacagcatattttttctctaacagtatcaccggacggtaagtcgcatccgcgtccatccgctcctgcatcttatgcatatcctcttccagctgtgcgatctgataggaatccagatccggccagggattgaacgctgcaggcatctgtaaataataagacagcgccgggatctgtccgtagatcagtacatctcttccggcaagtccccgttcattcacatactctgagatcccctgcatccatccggcccgttcctcgctcatccacacaccttttaatgtctcattattcgtcacctgcgcatcgatgtcctgtatgccggtaccttcggcaaatgcaaagtttctgccgaacagtcctacctggacaaagaacaacagaaagaaaccgcccaagagacattttaccggcatagcagatatggtgatccgcttccaccgaaagctgccaacatatttgcagaacctgtagaactgccagtacatatagggcaatgccagaaacagattgttcatgctggggtatagcttgttgttactgcccagggaagtgatccatacgatcaggaagatcagtccgctgatcagcttttcttccttcggcgcagagggcgtaaagatccgccacagggtcaccaccagagtcaatgtcaaaaacgtcactccgggccagataatggcaccgtaattcgtatattccctggcacagaagccctggcggtacagccagaacaccatcacagccgccagtgcgatacttcccgcccattccaggatccgcagaacctttgttactgtatcttttctcacgtaggagccgatgagttccaatactcccacagtgacaatccccactacaaagaacacgcacatccggatctcccagtacagattctgaaaataccagtcgaacatgcccatgatcatggatgcagccgtatagtccgttgccacctccgtcatggaaaacagtcgcagaatgcccttcacatattcatccatgccgtagcagatctggatataaccgaataataccagcagtgctgtcagataccccgccagacacatgccggtatcctgtaataatttcttacggagtttcacccccgctgcctttttccgagcttttattttttccgcagtttctgtcgtctccccagcctgaccgagactctttccaatctctttgcgcgcttccagccagcagatgattccgtaagcccacacgcccacgatcatggccgcctccggcagattggagaatcgggacagcacattacagcccagcgctactccggcggcaaacagccacccctttttcccccgggcaaggcccagatacagacagaccaccgataccagatagaacacgtaggtcacataattgtaaaaagagcccgtggggcaccagcagaagctcaccgccgtaaattctcccaggaataccagaagtgccgggatcttcagtactttcgtgcagaaataatacccaagcaccgccagcagactgatactcagtccggtataaaagttcatgccgatcaaagtcccggccccgggcagcaaactgaaaaaatgtccgatggctgtggtcagataggtggaaaacagccacatgggatccatatgctgcgtccccatatattcaaagttcgcatagccgtaaccggtatcccacagatccagtccccaggcaatatgccgcagaggatacagcaccaggattgccacgaatacaaattcccagagacgtctctgactgtcaatacccgcttttttattttttattatctctgtcactccattacctctcttttgaacatagtatctacgtcccgtattttctctgtcagactgcgatagggacggatatgcaggaatatcttatgcagtccgtcgcagatagctttccgcacaaaatccaccagaattcccagtacaaatactaccacaacaacaagtaccgtccacaacagcaacggcagtacaccgtcgatttgctccacaccaagccacttctgccaggcatagcgcacacccagattttcatgcagcagatacactcccagcgtatagggcgcgatcctcaccgccacactgccgatctttccctgtatgctgctgtccaaaaacaggcagaacagccccagtgaagccagaaacgggaaaatatggttatactcatacggaatcttcaggatcagctccagactgcctgttttcaaataaaacaggtgcaaaagcatggcttctccaaaggttccgaagataccgatcagatacaacaataatgcccgggattttttctgtaaaaacgggattccaaatcggcgcaggtaagccgctgcgcagaatacacacagataccagagacaatcatagcctttaccgtcttcttccagccggaagggcagcacagattttaacaggcagaaggtgacaaacagcaatactaatgccacctgaaactgctgcttcgtcatccgccgcagtcccattcccacaaaggggagcaatatatataagaaaagatacgctgtcaggaaccagtaatgtcccatagtcaccgggaacaacagggtcagataatagtgagtgctgacttccgccgcgggaacgatcccagtcaccaccgccagcacaccgatgcccacagaatacagccacagctgcagccacagtgtaagcagcctgctcagtttaaaagagctttcgcataaaaagtatccgctgatcatcatatacacattcacagctacaatgcagcatgcttccaacagccaggctaccatatcctgcaccgataaaggcgccgtcagatccggcaacagtcctcccttgcccagatagtgcagcaccacgaccatcatcattgccacacagcgcagtacttccagatttgccatacgttcttttttctgcatatcgattcccgtttccttcctgccattgcttcgtgctacgcactaccacaattctacccaaggtctttcacccacttatgagcaagctcatgtgggcttagaccttttgaccctggtatcattatattactttgtaacatattatgtaaagcaaaagcgattccgcccagattctgcctgataaagatgttaatttaggaaatcgttttcatattgatgtagatatttgtgtaaaactttggtaaaatgcatctatcaatactaatctgcatcggaggtgtctgttttgacaaaaaataccaagaaaaaccctattcctctctggaagcggatacgctttaagctgatcttcgcttttctgatccctgtggtcttcatcattgtcttaggcttcgtatcctatcagaaggctaccactcagatcattgcaacctaccgtgactccgtagaccagaccgtcagcatgatgaatcagtacctgacgctttcttttgacacggtccagtccaactacaagggatatatgaatgaggataccctgaagcagtatctgaacggtctgtatgataacgatgccactaccttgtacaatactccaaacacctatgaagacacctttatcaaagccgtgaccacggatgccctgctctccaatatttacgtgctctccgacaaagagcggacgatctctaccacgaaaacgaaggagaccggtctcttaagtgcgtacctggaaagctcccaggggcagattttatctgcggacagggcaaaatattaccttttcggcaaccagtccgaggtcgatgcaaagcttggcacggattcctccaaatacagtgtccgcctcgccagatatttctccaacgctccggcgatcctgatcattgatttcaaaccgagtgtcctggatacctccttatcctccctggatggcggtgagggcagtctcgtaggctttgtcacctgcgatggcaacgaatacctctcctcccggtccgatacagcggcagaaaatacgtttgtcggcaaatcctatgtagatgaagcatttgcctctgaggaagacaacggctcctcctatgtggaagaggcaggcgaagaatatctttttctctattccaagatcggtgcccgtaatgccatgatctgtgccctgatccctcaggcaaatatcatcggtcagacagcggagattaaaaatgtatctctgatccttgtcgttgcagcaagtgccgtggcgatcctactagggtctctgctggccggacagtatggcggctccatctactattttatccgccggctgaaaaaagtctctgacggagatctgacgatcgaagtccactccaagcgcaatgacgaattccagctattagctgatggcatctgtgatatgatcgcacacatgaagaagctggtatccgggctgaaggatgtcaatgaagaattatcccgggctgccaccgatatgtctgcggcttcctcacatttcctggcgacctcccaggatatccagaatcaggtaggtgaaatgcgccagggtatcgaaaaactggatgaaagctctgaggactgcctgcagcagatggactctctgtccgacaccatcggcagcgtatcctcacattctgaccagatcagtgcgcttgccaccggcaccaccgctgcgatccataccggtatcgaatccgtggaacatctgaaggagaacacctcttccaccatgctgatcacctccaacatcgtagataccatcggcaggctgaacgagaaatccaaagccatcggctccatcactgaagccattaatgagattgcagagcagaccaacctcctgtcccttaacgcttccattgaagctgccagagccggcgaatccggaagaggcttcgcagtggtcgctcaggagatccagaagctggcggatcagtccctgcactcctccggtgagatctccaggatcatcgaagagattgagattaccactgacgaagctacgcaggttgccagacaggccgagggcattgtagcggatcagaaccagtccgttggcagtaccacagactccttccgtgagatagattccaaggtaacagagcttctgaaattcctgcagcagatcaatgcaggcgtgtcggaaatggaacaccagcgcaccactaccctgtccgccatctccggtatctccgcagtatccgcagaaactgctgccgggtcctccaatgtacagactgctgccgaaaaacagctgcaggctattcaggatctggacaaagccacctccgcactggcagcccgctcagaagaactgactacgattctggaaggtttcattgtatagaaatggctatacaccctggagaaaatatgttatactgataacatcttttgacgaagaaattcttaggaaaatacatatagagaggtaatcttatgagcaaaaaaagagttgtcgtatctctgggacacgatgccctgggttataccaccacagaacaatgggatgcagtaaaagtaaccgcgaaagcacttgccgatctcgtggaggctgattatcagctgacgatcacccacagtaacggtccgcaggtcagcatgatccataaggccatgaccgagttacgccgtgtgtacatcgactatacccccgcacctatgtgtgtctgctctgctatgagccagggttatgtaggctatgatatccagaactctcttcgtgcagagcttttggatcgcggcatttccaagccggtcagcactatcctcacccaggtgaccgtagatccttatgatgaggctttctatgagcccaccaaggtcatcggtcgttacatgtccaaggaagacgctgagattgaaataaagaagggcaactatgtcaaagaagatcccggaaagggcttccgccgtgtcgttgctgcccccaagcctatcgatatcgtagagatcgaagccatccgtgcgctggcagccgcagatcaggtagtcatcgcctgtggcggcggcggaatccccgtgatcgagcagaagcatgcgctgaagggtgcttccgcagtcatcgagaaggatgctatcgccggtaagcttgcttccgacctaagctgtgacgagctgatcatcctgaccacagttccctatgtctataagaatttcggcagggaggatcaggctgcactggagactctcaccgtagcagaagcaaaggatctgatcacagcaggacagtttgaggaaggcaccatgcttcccaagatcgaggcagcgatctcttacctggagaaggttcccgccggcaaagtcctgatcacttccatggatcacgtcaaggatgccatcaggggcaaggccggcaccgtgatcaccgcttaattttatatcagaagcagttaaggcaacacaaaaggagatatccgccacggatacctcctttttacatgtcatgattctaatatctctgggttctatatctctgatctctatgcttcctttccggtcagatggttcgacaggatattatacaatgtcttcgggttgatgggcctggacaggtgatagttcattccggcctccagcgtctttttcttctcctcttcaaaagcatccgctgtcatggcaatgataggtaccgtttgcaatctccacctcggcttctgccagcggcacatacaggtctacgataaattctgtacccttccccagttcactcttcacagagatcgtaccacccataatgtcaacaagactcttcacgatgggtagtcccagaccggttcccttgaccttgtctcccatctcggaacgctcctgtatagttctttcatctgtaggataataatattcatcatgcagcaaagtcttattaacttcatcctgtaatttaataacaggtttcaagtctctttttggtttctttatctcaatccttcttattgataaatcaaaatattgactcatatgaaacctccatttactccggcttttttactcgtatttttccagatagaaggaatacaggatcctctccttcacgggcagctgcatcagcttcgtcagtgcctcctcatagtattggatctggacgctgtagcggttccagagggcttgcagggaatcgatcacatcggtcttatagtccaacaggacgatctctccgttttctataaagaagacatcgatgataccctgaatgagaaccttttccccttcaggaaggtcctgatccaggcgcttcgcatcaatgcccagcacgaagggctgctctctgtacaaaaggccctgttcgaaagctctccacatgcggtaggccagctcctgttccagaaaatgccggattttgggaaggcttacggcctgcgcatactcctctgtcagtcgtagggaagctgtctcccgctgcaggaattccttcagacgtacctgtaaccggtccgtatccaggccctgacggtattcctcataagtcccagggcatccggcaaatagtccggattccataaacagataagaaaagtccaacagttccatggtccggtggaacgcgttaccgcggacggctccgctgaccttttcctgttctctgcggaaagccgggatataaggcaccacttctttttcttcgaaggtatgaaatgccgcttcatccttctccgccatggccgcaatcttcagttccgataccgtggtcttggtatagagcttctgcaggccgggatacggataggcataggcaaatcgctcccgcagtttcgcaagctttcgttcgttctcctccgggtccccaggcaaaggagtctcgccgtccgtcacacgctgcaacagttccctgcggtctcccatgcgcagttgttccctgatctcctctgccgccaggtcttctgttcccagcgttgttactgcaattcctgtcttaggcaggattggcagcagaaaatccatatagctccccgcctcacagaaatccagataggtcagcttctcctgtcctgtcatccgggacagctcccatttttcctccgccttatccaacaccgctgtcaggatcagtttttctctggcacgggtcagtgccacgtaaagcacacgcagttcctccgccagattgtcctccttcattttcgctgacagaacagcccggcggagggtcttatttttaatgcggcggccggaatccacatagtccaccgctactcccagatccatatccacgatcagggactggttcgcatcctgcatgttgaaacgcttcgacagcccggagacaaataccacggggaattccagacctttactcttgtggatgctcatgatccgcaccacatcggcattttcgtccagggtatccgcctcaccgtaatccacatcgtatttttccaactgttccatataacggatgaaatggaacagtccaaaataactggtcttctcaaaagcagaagccttcgtcagcagcatctccacgttggcccggcgcttgctgccagcaggaagtgccgtcacatagttcagataatcgtaatcgtccaggatccgctgcagcaggtcgcggatggaggtgaagggagtcagatcacggtaatgatcaatacgttgtaagaaagtatctgccttttgggaaagttctgtctccggttccatgtcctccggtactgtggcagcttccaatgcgcgctgccagtactgtccggccccggcggtttcttccccggcgctttcgcccgctgatgcctcttctcccgcttccgccatccgtccactctgcgccacttctttcaatgcctcatacagtgtcattctcttccgggaatgccctttgcttccgctgcggatccgggcgatttcttcctgggtaaagcctccgaagatcgactgcatcacgctgaacagcggaatatcctgtctcgggttgtccagcactcgtaaaaactgcagcagttcctgtacttccagggccccgaaatatccggtcttggatgtaatgtagacagggattccctgctgttccagtactttcttgaattcctcatcccagccactggtggtacgaagcaaaatcaccatatccgagtaccgcaccgggcgcaattctcccgtagccttctccatgactttcagactgcccttcagctgcttgatacgtgccgcaatagccagtgcttccagctgtcttacgttgtcatagtccacgggacctcttgccccgtcgggacgctgttctccgctgccgccttccgcaccatcccccttctccggcttacggatcagtaatagttcactgccgtatgcaggatcctctgtggcgggatatgtggccccgggatacaatgctgccttatcatcataggcaatgccgccgatctcccggctcatgatgcgggaaaacacatcgtttaccgcatccaccacctgcacacggcttcggaagttcttcgccaggtcgatccggcacagatccccactctcctgataggtgtcgtatttttccaggaaaagttccggtctggccagacggaatttataaatactctgcttcacatcacctaccatgaagcggttataatgtccctccgcttccccggagatggcacttaacagatattcctgtaccagattactgtcctggtattcgtcaatgaggatctcctgaaaatactggcgatactccaatgccacgtcacttggcacaatgtcatatttcacaccggtgctgtccattcctgtatcaccggcgctgtccgtccctgcatcgccggtctcttccactttttcccgttttagcagaatctgtaacgcatagtgctccatgtcggaaaagtcgatcagatgtcgctcctgtttggccgcaagaagccttctgtcgaattccagcaccaggttaagcagcatccggagcggctccctgcaggcttttccctgttccaccaccaactctaacggtgtcttgaaatattgttccgtcagatccgccagcgtgtcttttacgctattacggatggatttcgccagctcccgtttggcgggatccacgctctcatccttcttggaagaaagacggccgaaagtcactgctggaacctttgctgcctgttccttcaaatccttgcaggcagccaggcgttccagctgttcgctctccgcttctgtcagttctccatacatatatggaccgtccggcagctcacacagctttttcacttccaccagtttttccagacacccttgcaggacacggctcacacgctctgccagatattgtccgtaatcactgtgcagcagggcatccagatctcccgccgcataatcgtttttacgctcttccagccattctgcgggccagggaaaacttccggcatagcgggacaggttcaggatatgctgttccagcacgctctctctgccgccggggcagaaatattccacacaggcgtggaaacgttcccgtgcctcccgggatggatccccgctgtcacgttttcccggaacctcttccgcaaaatcattccctgacgcttccttcggtatcatcgctccgctgtcacggttttcccgggacgtcggaacatcatccggaacaaatttccccgcataggcatcctccagcagctgtcccagcacctcctgctgcaacagcttgatctcaccctcgtctgccacacggaaatccggatccagaccgatctcattaaaatgattccggatcaggaacaggctgaagctgtcgatcgtggtgatctgggcattgtgtaacagggcggactgcttctggatatggtcattccccggatccgcttccagtctggcggcgatcccggctgcgatacgctcccgcatctccgcagccgccgcattggtgaaagtcacgatcaacaggcggtcaatgtccgccggatgctccccctcacagatcatacggatgatacgctctaccagtaccgccgtcttaccgcttcccgcggccgccgataccagaatgttgctgttatgcagttcgattaccttttgctgttccggggtaaaattcattcccatacgctacctctgttcctgtttcttttctcctgttgccgtcctgttcctccgggcagcgggtgctttctcttcgagcttcctgtcaggcacacactcccgccgggcaccctttgccctaagcttccacggtcttctgcatccgctgcatcagcgcctgcttatccagatcttccagctgtctcttctcatagcccggaatactgccatcgaaaccgcagacctttttataggcgcaataagtacaagcctcttcattgcctttctcatagggattggctgctatttttccgtccaggatctcccgcccgatgctgcggatcttggcatctacataagaagatatcagctgcatctcctcccggcttaagacaccggatctggcactgaagcttccatcctttttcttctccaccggaatgaccacagacttatcctgcatatagcggtccagccgctccacgaccccaggatcactgtttactacaccgttcatacgaagctttgcaaggatctgttcattgatctgctcatccgtgagctccaccggtgtctctatggtgggatcatcgatgtgataatacagaagtgccgccggaacgatctccttgtccggatgctttcggctctccatctccatggctgcattcatatataccaccagctgcaactgcagaccgtaatacaatgccgccagatcaaatttccggttgccggacttataatcaatgaccttgacgtagacatgctctgcatcttccgccacatcgatacgatcgatccgtccctgcaaatgcatcttctcgtcctcagacagatccacatgaatgctgtccagatcctccgcaaaccggaaagaaagttcataatcatctggctggaaactgccctgtttcaaatgtttctgcaaggtcagcactgtgcgggtcaggatcctgctcatgcgggtaatggcatattcattccgcgcagagctgtataataccgtctccccgtagattgccgcataggcttccacggattctttgacggctttggctgcaaaatcctccgtaaaatcccaccatgtcaggttggattctgcaagttttcctgcaaagttttccagtactgcatgatataccgtacccatatccgaagcctcgaagccgaattcttcccgttcctgcagggaaagaccatattgcaaaaagtgtctgcaggcacaggcagcataagtttccagacggctgacactgttttccagctgctgtccgtacaatgctctggccacgatccgggacagaccgctctccctgtatctgcgaaatgccgcccgggtcagcaggtctctgcccgccgcatccgcctcgtaggcacggtacatgagatagaagtcctgcctctcttcttccggcagggttccttccacatattcccgcagttcctccgccagatatctggcaccttcctgtctgccctcgatctgttccaggcggctgcggttctggggatactccacgctcattgccgggaacagcttccgcaccgtatcgatcaggtaggacggtcttatgccctttccttcactgtttaccttggcataggacagatacagctgttctgagggcttggtcatattcagatacagatataatctctggatatacatctgctgtctcgggctgggtgccatctctgtcccggattcaatcaggaattcccgatccatatccgaaatgatcccgcccttggaagcatttttcggaatatttccgtcatttactcctaggaaaaacaataccttcacctgtttcagacgggttcgctccatatcgcccaccacgatacgatccacgttctgagggatcgtaccgacagtgatctcgccgaaaccggcctctaaaatatccgcaaattcctgtctggagatttcttcctctcccaacagttcatagacctgatccagcagatccatgaccagccggtaaatctgtgcatactctctggctctggataagtctccctctttttcaaactgctgctgatagttcaaaagcttttgctgcacctgattctgttccaggaaatcgtacagatggctgacatagtctccagccttttcctggcttcccatgtgcagaatctccaccgcatccatgaactgttgccggatacggttcagacgctccatggtcttctcttccgcctgttcgctcccctccgcattttcctgcagttcttccgttctgcgggtaaacagacggctataggtccgatagcctctcgccccggtgcggatcacatagttttccagctcatcaatctcttctctggaaatatccgacatgccgctgcgcagaaaatgaaacaccgtatcataggaaaaatccttaatatacagctgcaatgcgctcttgatatattcgatcatgggattcagcacgatccctctggtacggtccaggaaacatgggatctccagctgtccgaattctgtttccacataggaagcgtatccttccagatctccgatgaccacggcaatgtcccggtaggtcatcccctgctctctgatcaggtgccggatgtacagcgctgtctggtggacttcctctctgggggaaagggcttcaaacatatggatctcttgctgttctcccgcatacggttcatactgataccggaacagattctgttccagatagtgtaatgccggtgccttggcgaagcgattggccccccccttgacaaagagatcctctccccgctctacctctgcctccgctgccagcttttccagatccgccaccgtcttcttgctcagatggaacagcttctgttcaccatccattttatacggatcctctcccactccaatggtcacggtaacgatggtctctgcgcacacgcgcatcagttcctggatcagccggttctgtatgggagtaaatcccgtaaagccgtcaaacaccactacactgccctttaagatctttgatttggacagggatctgcgcagtacatccagtgtctcctcggtggtgataaaatgatccctgatataatcctgaaagccccggtacagagtctttaagtctttcagtttcatggccagcgcgccacgcttctgtgcactggtgatcagcttgtccatatcctgtgtgctgataccgtattgcatgaactcggagatcgcacttttcacctcatggatatagccctgcttgtgcaggagacttcccatggccggaagctgttccttcagatccgccgccactttttgcagcaccaggcttttgccggtgtcatccagtaccggcatctctttggtccccacttcctccagaatgcggtggctgagtcggccgaagctcaggacatcgatattcaggatgccatcccggtcactgcgcatgaccagatccttctgggtctgcatggtgaactgatccggcacaatgatcaggaaattcctgcccggttcctctgccgcccgctgcatgatctcttcatagattctgtggcttttgcccgacccggaagggccaaaacagaaacgtaagctcataagtctcctccgttatgctgtccgtttatttcagatccagttcaatgggacaatgatccgatcccaaaatttccgtgtggatcttcgcatccgccagccggtctttcagacactccgataccacgaaataatcaattctccatccggcattttttgctctcgcctggaacatataagaccaccaggaatacaccccggtcaggtccggataaaaatagcggaacgtatcgataaatccgttctccagtaccttcgaaaagcaggctctctcttcatcagtgaagcccgcattgccacggttggtcttcgcatttttcaggtcgatttcctgatgcgccacgttcaggtctcccgcatagatcaccggctttttctcttccagcttcttaagatacgccaggaaatccgcttcccactgcatgcggtattccagtctcgtcagctctctctgggcgttcggtacatagactgtcacaaaatagaactccgaatactctgcagtgatcacccggccctcatggtcgtgttcctccacgccgatgccgtaagtcacctgtatgggctcttcctttgtaaaaattgcagtgccggaatagccctttttctctgcgtaattccaatactgatgatatccgggcagatccagtgcgatctgtccctcctgcaattttgtctcttgtaagcagaaaatatctgcatccgtttcctgaaagaaatccagaaatcccttctgcacgcaggctctcagcccgttcacattccatgagatcagtttcatattttccctacctctttcctgatttgtcttatgccatcttatcccggtcataatttttatccgcttttctgtcatctattcgttctatccgccgtgcttttccatccattcacattccttccgggcagccttcagagacgcttcgtaccctttcaggatctccataagtctctgtacatcgatgatgccgctggctttattttccgggtgatccatccatggatgctgtttttccggcggataaatattttctatggtattttccccgatccgataccatttcttctgatagcagatcgtgttgtccgccgggtttaaaaaggtttccagttccgtcagtggatagatctctgccggtgtccggggattaccttccagacctctcacggcagtgaccttcacagttccaccctccggtactacacacagccacatgggctctgccggttttttccataatttatccagtataaagttcaacggtcccagtaacaggatcgtcatgaaaaccgccagcgctcccgtcagttccggaatccagtcaccccacaacagcatctggaacagcagatggtcactctcccgcacaccccagaccttcatcactaccagcacggttgctaccatatagatcagtatagtgatcagggcaaacggcatcagtactttttcttttttcatgccccatgcggcataagccttgcattcatcgtccgtaaaaagcacgggcagttcatagctctctgtcatgctccgcttctccctcttttgctattctccgagaataatatgcaggaaccgcttgtccagcatcaacgtccggttccagggattcaggatcacaccctcgatatcatcggcagtcaacgtcatgcggaacagctgctccatatccgtgagaaaagtggacattacgctgccgcttccctttaattcttcctcaaatccggtgaaggccgaccaccattttttcccatcggaggtctgcaccgcctgcaggcgcatggcagttccggcggcctgtgtcaccgcttcctgcacatctgctgagggcagttccaccgccacgataagctgtccctgctcccgcatacgtctgcgcaccaccgtcagggcatgcgccagaagttcttctgtcggctcctgctgtaatgccagaattgcctcctctattttctcatttccctgtaaacctttatctttcttttcgtccataaccgtaatgttgtcctttttaattgtagtcgttaaatcacttcatcctatttcccatgtcccttgcgcaatcttgtatgcaatctgtcgaattccataagagccacaggcaacacagctcatgcctatgcccatcataccataaatgcctccgcaattccactcacgtttccctccagaagctgtcttttccttgacagtggggatattcgttgctaacatgaacctgagcgtttgatgcttagaaatgaggataattatggatacttttgacccgaagcacatttacagcgatgccgcaaagctggctcgtctgaaagataaaaagcttttcctgttcgatatcgacggcaccattgccgtaggcgataccttgtatgagggaagtgcggatcttctccgctacattcaggccatcggcggcagggcttattacattaccaacaattccacaaaaagcggactggactatgtgaaaaaattccacgatgcatttcacctggacagcacggaggatcagttcatcacctccggctatatgacgctgcgttttttgaaggagaattatgcagacaagaaaatcttcgttctgggaaccgcttcctttgtggcggaactgcgaaagaatggcctctgggtaaccgaggtctgcgaggacagcattgactgcgtggtcgttgcctatgacagtgaattaaattatgcaaagcttaccgaagtctgcaagattttattcacccaggatgttcctttctacggcaccaacccggatctgcgctgccccatcgacttcggctttatccccgattgcggtgccatctgcgacatgatcaccgccaccacagacaaacagcccatctatctgggcaagcccagcaaagaggtcgtaaagctttgccttgaagtctccggcttcactcccgaggagactctggtggttggcgatcgtctgtacaccgatattgcctgcggcatcaacggtggtgtggacacctgtgttctcttcaccggcgaggcacaaaaaaaggatattctgactcccgagggggagccgaatacccaatatctgccggactatgcttttgaaaatgtgcaggaattattaaatgcctgccagggtgaaataaattttaaatagctctcttcacgacaccgattcccaacggataaggtccggtgtgtacgccaatggtggcaccgatctggatgatgggaatggtgtcgatgtcgtatcccttttctttcagtctgcctgccagtctgtcgcggaactctacggcttcttcataatcgtagccatatcccacgcagacgctgtaattggcaatatctgccttttcctctgcaaaatatgctaacagcagatcgatatttttatctaccgtcttgcgacggcttctgccgataccggaggggaagatttctccctcttttaaggtaatgatgggcttgatgccaagcaggctgccggccacgctggctactttgccgatacgtccgccgtgctttaaatattccatatttcctacggtgaaaaagattctgccggagctcttgatctcattcaggcgatcgatactctcctggtaactcttccccgcatctctaaggcgtaccgcttccaatacatagatgccctgcaatacggtattcacagtagagtcgcagacataaatctgtgcattgggatattcctcttccaggatcgcttttgcattcagagcagactgcatggagccgctgaacttggtggtgatacagatgcagataatgggagttcccgccttgacaaaaggaagaaatgcatctacataatcctgcacggaaggcatggaagacttcggatatacatccgggtgatccaccatttcctgatagaactcacggacaccgatctctatcatttccttctggtatttcccctcttcaaaagatacataaaagggaactaccgtaatgtctttttctttggtcagctccatgggaagatcacaggaaccgtctgatataatatgaaatgcttcgctcattatcgcatacacctttctacttgtttgcagagtttagcttaccacgttgtggagtaaaaagcaatgagtttttgctattatatttcatttcgtggtgttttatgttgttttatgtagtttttattactacatgtatggaaaatccgaattacgcgatatttgtcgatgaaagtttgtcaaccaacatacaacattcgttgacaatgggcagttctctcgatatacttgagttgttaaccattcattcccccagttaacattttctgcaggaatgaccccctttcattctctgcaaacccaaaaaacagcccggcaggatctcctgtcgggctgcgttattgtcttctattattcctatctttatatggagtaatccagattctccaggcgcttgttccgtcgttccaccagatccgcaatggtgactccgtccactaccttgttcactgcatcatacaattcctgccatacctccagagtctcacaggtatcacatcgttcgcagatatcagcgccttcctccagacatgccaccggagccagtgagccttccgtcagtcgtaagatcattcctacagtaaaatctgccggatccttggcaatacgataaccgccctgggcaccacggacgctttttacataacctgccttgttcaaaacagcaatgatctgctccagatacttttcggaaatcccctgtctggcagcaatttcttttaccttgatacactctccgttgttgttcaatgccagatccagcatgacacgtactgcatatcttcctttggttgaaattttcatcctatcctcatttccgagcatcttcctgctctgtttcacttttaatgtccgccggcttataccaaagcgattctgaactgctccaaattttccacggtttccacagattctatcttcttttctcttttcccagagttcatataggatttgtggaaacaacagaaaaatcaggagagcacccatgaatgctactcgatggaatgctctccggatttcgcattactttactgtcgcttcatcttacttgtaagggataacgccaccattataattgtcattgatatactgcttgatctcatcagacttcagggtatctaccagtgccttgatcttaggcagattctcgttgccttccttaacagcgattacatttacataagtagcggctgcttcggaatcatcgctctcatacagcagagcatcgtctgcaacagtcaggcctgcttccatagcatagttgccgttcaggacaccgaaggatacttccggaagggttctgggaacctgtgctgcttccagctctacgaaggtgatgttgtgagggttctcaacgatatccttagtagtagcggtcagacccacaccatccttcagggtgatgtaaccgttatcctgtaacagtaacagagcacgtgcctcattggtggtatcgttgggtactgcgatagttgcattgtcaatgttgtctaagctggtctcggttccgggatacagtccgaagggctcgtaatggataccgccggcatttaccagatgggtacctttctcctcgttgaagctctccagataagggatatgctggaagtagttcgcatcgaactcaccggactctactacttcattgggctgtacataatcatcaaatacctgaacctccagagtataaccctgctcctctaacagaggctttgctgcctccaggatctctgcatgaggtactgcagttgcagctaccttaatggtcttgtcgtcggctcccttgctgccgcagccggtcagtgcgctcacggacaatgctgcaacggcgatcaaagcgattactttctttttcataatatttctcctcctaaatcattcgttcataatattaactttattgaatcaggtgatctgcacctgtctcaaccttttatcaaaccatcttatctggttctcttgtccagctttttggataacttcattccaacatattgcatcagctgtaccagcactatcagcaataccacagtcacccacatgatgctactatcgtaacggtagtaaccgtaacggattgcgatatcacccagtccgccaccgccgacgatacccgccatagcggagtatcccaggatcgtaccaagagcaatcgttacattgacgatcagggaagtctttgcctctccgatcattactttccagatgatggtccagaggttcgctcccatgctctgtgccgcctcaataacgccgtgatccacttccaacagagaggactctaccattctggctataaacggtgccgctgacagtgtcaacggaacgatcgttgcggtcggtccatagctttttcctacgatgatccgtgtcaaaggctgaatcacgatcagcaaaatcaaaaacggaaagcttcgaacaacattcacgaccacatctaataccttataaataatcttattcggtcgaagtcccttcggtgcggtaattaccagggcaattcccatcggcagtccgagcacataccccataaacgttgttgccaacgtcatgtacaaagtaacaaagatgccttccaccaccatcatagtcgttgcattatcccacatagtctctcaactcctccacttccagttttctctcctgtaaataatgaaccatcttgttcgccgccatttcatcctccggcagctgtaagatcatctgtccatgggcgataccgccgatgtccttggtatccgctaacaggatattaacgggagccttgcactccagcaccatattggcgatcacaggttcaaaagaagaattctcagtgaaaacaatgcggatgcagcgtttgccggacatttcctttgccttgggatccaccatgaacaccagctttcttgcggctgcggactggggtctggagaatacctcctccacagtaccgtgctctgccagttctccggcatcgataatggctacatgggaacagatctcctgtaccacagccatctcatgagtaatgatcacaatggtgattccatactgtttgttgatatcctgtaataatttcaggatctccttggtcgtggtgggatccagtgcactggtggcctcgtcacacagcagaatcttcggagtgttggccaatgctcttgcgatagccacacgctgcttctgtccaccggagagctgggaaggataagcgtctgccttttccttcagtcctacgatctcaagcagctccatggcacgctttctggctgcctgttttttcacacccacgatctccatggggaagcacacattgtcgagaacacttctctgcatgagcagattaaaatgctgaaagatcatcgcaatgcctgtacgaaccttacgaagttctgcctcgctcagtgtcgaaagatcctgatcttctacgattacggttcccgtggtgggcttctccaggtagttcaggcaacgcaccagggtagactttccggcaccactcataccgatgatgccatagatatctcccttgttgatatccaggctgatgcctttcagggcctctacctgattatccttacctataaaagtttttgttacattcttgatctgaatgatcggttccataagttcctccattccaggttcgtgcttttaaggggagaaaagcgcgaattccttgaattcctagtaccatgccatacattctaacacaagaatgcaagtctgtaaagttcttaggacatgccttaggcttctgcaaacatcggggtggacaggtatctgtcaccggaatcgggaagcagtgccacgatggtcttgccggcattttcgggacgctttgcgatctgtgctgcggcatacagtgccgcaccggaggtaattcctaccaggataccttccttatgagcgatcaggcgtccagtggtaaatgcctggtctgtggtaacggtaaagatttcatcgtaaataccggtgttcagaacggaaggaacaaatccggcaccgataccctgcagcttgtggggtccgggctgtccgccggaaagtacgggagaatccgcaggttctactgctacgaccttcacattggggttcttggattttaaatatgtgccgataccggtcacggttccgccggtacctacgcctgctacgaagatgtctaccttgccatcggtgtcttcccagatctcgggaccggtggtagctgcatgtgcagcggggttcgcggggttatcaaactgtccgaggatcacggctcccgggatggatttctccagctcttctgccttggcaatggcacccttcatgcctttggcaccttcggtcagtaccagttctgcgccataagctttcaggaggttacgacgttctacactcatggtctcgggaagggttaaaatggtccggtagcccttggcagcagctacacttgccagaccgataccggtgttgccggaggtgggctcgatgatggtggagccttcctttaagatgcccttcttctcagcatcctcgatcattgccagtgcgattctgtccttaacgcttcctgcgggattgaaatactccagctttgccagaagttctacaccttcgatgttctggtctttcaagtaattgtttacttttaaaaggggtgtatgtccgatcagctgggttgcggatgtgtaaatcttactcataatgaaatcctccttatacttgaaaattgtgttcgctttccatttcctacttatctgatagggatgttatgaatttatgctatactattccgctaggaatgtcaacaattattttatattttttttggaattgtgctagaggagagaagatggtatgatttatacaattagtccgtagcctccattggggccaggagccgcttttgcgtctccgtagtcacgacagcaggtaagaaacgcggcacgctcatactttagtacgatgcgctcatgtcgcagagcgtagcggtacataagcgtgaaaagtacttgcgcaatgtgtcccttaggacgctatgataccgacgtctgcttacggcctgtttattcttacctgctgtcgtgactactgggttattgtcatattttatgataccagggtcaaaaggtctaatcccatatgagcttgctcataaatgggtgaaagaccttgggacccgccccgatatgagcataaaagtgggatgataatcccacggtatgcgaatattgggtagggtgctatgtgccagtggcacatgtctagcacggaccgaagcggagcgga

SEQ ID NO: 5506 - DNA, 11497 bp, Unknown
  gut microbiota DNA sequence
atcaatatacggtttgtatattgatctcttttagtttttccaggcacaagagaacctatatcagaccattgcctgcacaagaatgatatgctaaaataattcgtcggaaacaaagaaatcaacgaaagagatttaaaatcgaaatggaaagtaaagtaaaagaattgcgttacgcaatcgtacagtccataccagtcatgctgggatatcttttcctgggatttgcctttggactgatgctgaatgatgcaggatacggcttctggtgggccttttttatcagcttgtttgtgtatgcgggaagcatgcagtttgtgttggtcaccttgctgacggcgggagcaagtctgtggtatacactgatcatgacgttgtttgtcaatggcagacacatattttacggactttcttttgtagaaaatttcaaaaaaacgggtataacatatccttatatgatcttttcccttacggatgagacgttttctctgttatgtgatctgaaagttcctgagggaatgcgtgaggaacgggtcagcttctacatttctctgttggatcattgctattggattctgggaagctgtgtaggtgcactggccggaagtgtcctgccaatcgacactacgggaattgatttttccatgacggcattattcacagttatagtagtcaaccagtggatggatacgaaagaacataaaccggcagtcatcggaggcgttgtcggagttctgtgtttactggtactgggcgcagacacctttttattacctgcattgaccattgccgcaatcatattattaggagttaagaaaaaatgttacattccgtcgcaatcatagcagttgcagctattgttactttgatcatacgggcagttcctttcgtggcatttggtggaaagagagaggttccggaaacagtcacatatctgggaaaagtactcccgccggccattatggtgattcttgttatttactgtgtaaaagaaattaatctgtttaccggcagtcatggaattccggaattgttgtctattgccgtggtggcattgcttcatatctggaagaaaaatacgttgctgagtatagctgtagggaccatactttatatgatattagtgcaagtagtattctaaaacagtgtgaaaaggctttttttcagccttttcacactgtttttttacgaaattaaatgctataatgagcgcaacagaaataagatgagggagaaacagaagataaaatggaaaccgataacaaagaattaaaagaagaaacaacaaagaaagaggctgataagaaagaaacggagagcaaagaggaaacaaaacagcctgtggaagagacagcggtacagaagaaaaagagcaaaaaatggattggtattgtagcagctgtagttgcagtaattctattggcatatggtggtgtggcaatttactaccagtctcatttcctgaatcatacttatatcaataacagtgattgcagtaatatgacggcgacagaggtagcggcgatcatggatcagcagtcacagcagtatagtttacagattctgggcagagatgagaacggtgtgcaggaagagatcggcacgatcacagcatctgagattggaatgtactgggtggatactttgaatgcggcacaggagcttttgaacagacagaatgaattcctgtggattgagatgctgtggagtacgcagaatcatgatgtagttcagggtgtgtcctatgatgcagacaaattgcaggaacaactggcacagatgcctgcactgcagaacaaaaatatgattgcaccggaagatgcttatatcagtgaatattccgagaagaacaagaattatgaaatcattccggagaccatgggaatagagttgaacaacaacctggtagaagaagtagtatccacagcaatcatgcagggagataccacggtagatctggaggagcagggctgttatgaaactgccaaaataacggcagaggatgcagcgttggtaaaagcctgtgataccatgaataaatgggtcagcgcacagatcacctatgactggaacggcaataaggttgtcgttgacggagatacgatccatgagtggatccagacggataacaaggatccccaactggacgaggaagcaatcgaggaattcgtagcagagcaggccaaagaatacgatacctatggcaaaaagagaaagtttaccacagttcagggaatcgagcttaccttgcccagcggagcttacggctggaagaccgaccgcgaggaagaggtcaaagaattgacagcttctattgaaaagggagaaaacatcgacaaggaaccagtatacagcagcaagggagcacaaaagggaagtgacgatatcggtaattcctacgtggaaattgatctgacgaatcagcatctttatctgttccagaatggaagcattgtattggagacagattttgtatccggtaatatgagcaaagcgggctgcatgacccctcccggagtgttcggactgacctataagacaaaaaatgccgtattacgcggtgcggattatgagacgccggtaaactactggatgccttttaacggaaatgtcggaatgcatgatgctacctggagaggaagcttcggtggaaccatctatctgacatcaggctctcacggttgtgtcaatctgccactgaatatggcggcagctatttatgaatatgtatctaccggtttcccggtagtatgctattactattaatgcgaatcagtgtgactatagatgatgggatattgagaaggaaggcagttctatgaaacagcgttcagcaaaaaaagtgcagaagtggaaagagagatttgaaagagaacgacagttaaggcaggagatccgggcggtagcaccggatattctgcgttctaagaactttcgctccacacgttcacatgtacagcacggtaacatgacagtcaatgatcacagtatgaatgtggcaaaatatagtcttgccatcagcgagaagctgcatattccctgtgaaaaaaaggatttgatccgtggggcattattgcatgattactttctgtacgactggcacacgccggatcatatcagcccccataagctgcatggcttttatcatccgggaagagcgcttcacaatgcacagaaggaataccatctcactcccagggaaaaagatattataaaaaaacatatgtggccgctaacaatctccgcagttcccatgtgtcgtgaagcctggatcgtcaccatggcagacaaatggtgttcgcttatggagacatttcatgtacataagggacatggagccctgatcgagaagcttcggaagattgaagaggagcagggaaaataaaagggtggaaacccaaaacaggagaatgatggaattgggtgaattataccggagattaaaagactacagtaagacagattattatccttatcatatgccgggacataagagactgctttgtggagaattcccccgggagatcatggatatcgacatcacggagattgatggatttgataatctacatgctccagaggaaatcctaagacgagtacaggacgaggcagccggactgtacggcgcagacgagagcttttaccttatcaacggaagtacctgcggggttctggcggcaatcagtgcggcggttccgaggggcgggcggatccttatgaccagaggagcccataaatctgcgtatcatgcggcatatctgagaaatttaacagtttcttatctgtatccggaaatgatggaggagtatgatatttatgatgcggtaactccggaacagatcgcagaggcattcagccgggagcctgttccggatgcggtatttctggtgtcacccacttatgaaggcaggatcgcagatatagagacgatcgcaaagctggtacatagtaaaggaattcctctgatcgtggatgaagcccatggtgctcatctgggactggcggaaggatttgcgaagaacagctgccagtgtggcgcggatctggtgatccacagtgttcataagactttgccggcactgacacagagcgcgttgcttcatgtcaacggaagactggtcgacagagaacgtttgcgcaggtttttgcatatttatcagtccagtagtccatcctatgtactaatggcaggaattgacaatgcactacagctggtaaaggagcagggagattatctgtttgcccggttgcaggtgaattatctgagaatgctgacagaactgtcagaatgcaggaaccttcatttcttgccgctggatgccagacaggatatcggaaaactggtgatattatcttcaaaggcaggtttgtcaggacagcagatttatgatattctattagaggagtaccacttgcagttggaaatggcagctgcagatcattgtcttgcgatgttcaccataggagacagtgacgaggcatacacaagaatgacggatgcattgcttgccatcgatcgtgacatatctgcgggaaagtggcagacgcagccacagacggaaggcggagattccagagagacatctctctatcacatgcagccggaagtcagtttgtctcttgcggatgcatgggatgccgaaaaagaggagattcctctggcacaggctgcaggcaggattgcaggagattttgtgaatctgtatcctcccggaattccggtgctggtaccgggagaacagatcgaagagatccattgccgaaagcttgcggagtatttcagaaagggtctgaaggtacagggagtcaccgaaaaagacgaatattgcattaccgtagtcaaaaatcaaaaaaaatagcagcagaaaggatttagcctgtatgagaaaaaccaaaattatttgcaccatcggtccggccagtgagagtgaggagaaattaagagaattgatgcttgcaggcatgaacgtggcacgttttaacttttcccatggaagccataaggaacagctggttaaatacaacagagtactgaaagtacgaaaagaactgggattgccggtagcaactctgttggataccaaaggaccggagattcgtttgcgtgattttgagggcggtaaggtagagctggtatccggtcagcagtttgtcctgacaacggaagaaatcatgggaacagcggaaagagccactatttcctacaaaaatctgaaaaatgacatcaatgtcgggacaacgatcctgatcgatgacggtctgatcgaaatgacggtagaagagatcaaaggagaagacattgtatgtaaggtcataaacggcggttttgtatcgaatcataagggtgtcaatgtaccgggagcgattctgtccatgccttatatcagtgaggtggatctggcagatattgtgtttggtgtagagcacggatttgactttatcgcagcttcctttgtcagaaccagggaagatattcaggaagtgcgcaagatcgtagaggacagaggcagcaagatcaagatcatcgccaagatcgagaacatgcagggaatccagaatctggaagagatcattaacgtggcagacggtatcatggtagcacgtggtgacatgggtgtcgaaattcctctggaagaagtgcctattctgcagaagaagatgatcaagatggcggtagcacagggcaagcatgtaatcactgcgacccagatgctggagtccatgatcaagaatccacgtccgaccagagcggaggcaacagatattgccaatgcgatctatgacggaaccacagccatcatgctttccggcgagagcgcagccggtctgtatccggtagaggctgttaagaccatgtcccgcattgcggagagagcagagcaggatatcgattatcgcggaagaatgcagagagtcaaggaagacagacaggaaactccggatattaccacggcaatctcctatgcaacctgcagtgtggcttccgatctgaatgcagcagccatcatcaccgtaaccatgtccggatttaccgcgaatatgatcgcacgttataagcccggatgccagatcatcggctgtacattggatgagaaggtataccgccagttaaatctgctgtggggtgtaaaacctgtcatgatccagaaggagcggaccacggatgctctgttcgaggaagcggtattcaaggcaaagcaggcaggtctggtgaaaaccggggatacggttgtcatcaccgcaggcgtacctctgggcgtggtaggtaagaccgatatgatccacgtggtggaagtagaataaaaacgtactgtacggcggtcaaacagccgaaacaggagcgggaaaacgagaacgcagatatgggaaaaattgtatatctcatggggaaaagttcctcggggaaagatactgtttttaaagaactgatgaaagagggcacgatggatcttcggatcatcgtgccttatacgacaagaccgatccgggccggggaagagaacggtgtggaatattttttcacagatgagaccggttttcagaccctgagggaacagggaaaggtcatagaggacagagcttataatacggtctatggcatctggcggtattttacagtggatgacggacagatagatttgaccacgaagaattatctcatgatcggaacactggaagcctatgagaaaatgattgcttatttcggaacagaagctattttgccggtctatattgagctggatgacggtgtacgcctgcagcgggcactggacagggaactgcgacaggagaagccgaagtacgaagagatgtgtcgcagatttctggcggacagcgcagatttctccgaagaaaagctggcggcagcagggatccgggacagattcgagaatacagatctgacaaaatgtctgaaagatattacaaagtacttaaaagaagccggaatatagccgaaatactgataacagagaagaaaaatgccggaatatagccggtaaacagaggaaaagaggtgggcgtatggaaatgagagtaaatcagatacagcagacggctcccgtggagcaggtacagaacacagcgcccacggacggcagcttcaaattcatgctggcgagccatgtggaggaagcagaacttcaggagcgactgacgaacctgatggcggagatcaccacagagggcgaaaagctggccaagaaacgggatgtgaaggatatgcgacattaccgtgggctggtcaaggaatttctcaatgaagtggtgaccagatcccattctttttccagagagaacttcctggatcggagaggccggcaccgtgtgtatggcattatccggctggtggatgagaatctggatcagctggcacaggaactgatgaaggatgaaaaagacaatctggcgatcctgaacaagattggggagatccggggactgttattggatatctttacctgatgaaaaatacaggaaacgcttgcgtgattcgcaagaaggcagtacgataaaagcaggaccaaaaagacaataagatacggacagggggaataccaatggcaacatttcatgacatcataggtcaggaacagattaaagagcatttacagaacgccatttcggcgaagaagatttcccatgcttatatcatcaacggtgaaaaatcctccggcaaagaatttattgccagagtatttgccatgaccctgcagtgtgaaaagggcggaaccgagccttgtcaggaatgccattcctgtaagcaggcgctgtcggacaaccagccggacattatctatgtcagccatgagaagcccaataccatcagcgtagatgatattcgtgcgcagatcaacaacgatatcgccatcaaaccttacagcagcccgtataagatctatattatgaacgaggcagagaagatgacgccccaggcgcagaatgcaatcctgaaaacgctggaggaaccgcctgagtatgcagtgatcatgctgttgacttctaacgtgaattctctgctgccgacgatcctcagccgttgcgtggtactgaacatgaagccggtagccgatgaactggtgcgtaattatctcatgcatcagctgcaggtgccagattataaggcagaggtctgtgtggcatttgccagaggtaatatcggcaaggcgaaatctctggcgtccagtgaggacttcgataatattaagaatgaagcgttgtcgctattgaaatatattcaggatatggatctgagtgagatcaccgcagcgatcaaaaagatcacggaatataagctgcagatcaatgattatctggatctcatcgcaatctggtaccgggatgtgctcctgttcaaggcaaccagtgatgtgaaccatctcgtttttcgtgaagagatcagtgccatccgccgcgtggcccagcgcagcagctatgagggaatcgaggaagtcatcgaagccctggataaggccaagagacgtctggatgctaatgtaaactttgatctgacgatggaacttttgatgctggagatcaaagagaacggataagacagaggcagccaaggcagtagagagacttctgtgaattaagaccttgacatttccgctattccggtattatcatatcaaagtaaaggcaatgaacgtgcacagtaagattcttttttcctgacagagagggaagttcaccggctgaaaagcttcctgaggttcaagcagaatcgaaattcccacgcgagccgcataccggaagaatggaagatttggtagggtatgacgtttcctcactcgttacgtgagttaagagtcttatcgtgaatgtaaagatagcttcaagaagttttcatttttcacataaggaatttgggtggtaccgcggatataaaattcgtcccaatggggtgaatttgtatgcgcggttttttgtaactattcagagccaatggcgaagcagcctcaatgagcagagaacaggtaagcctgttctccaagtaagcatcgcagatgcgattttgcgaatgaggctctgaatagttacaatatgaaaatgcaatacacacccaggcacaagtaaaaacacgtgtgcaacaaggcacagtgtgcagaatagcacacagaaatgaggagtaagatggcagatttaaacgaattgaatgaaaaagtcgaacagatcaaagccgacatccgggaacaactggaaaagattgagaataccaagggtgtctacgagtacaagaagaccattctggacaagaacggtattatcggcggtctgatgaagcagatgggttccgtacccaaggaagagaaagctgacttcggtaagaaagtcaatgaactgaagaactgggccagcgagcattttgacgagctgaatacgaagttaaaagaaaaagagatggagctgcgctacgagagtgagaagatcgatatctccatgccggcaaagagccgtaagaccggtaatctgcatcctgtaactcaggtgcgtaaccagttaatcgacattttcgcatccatgggcttcagcgtatatgaaggtactgagatcgagaccgattattacaacttcaccgcactgaataccccgcaggatcaccccgcaagagacatgcaggataccttctacctgtctccggaatttctgcttagaacccagacctctgcaggtcaggtacacgttatggagagccagaagcctcccatcaagatcctgagccccggtaaagtattccgatccgatgatgatgcgacccattctcccatgtttacccagatggaaggtctcgtagtagacaagaccatcactctgtgcgacctgaagggtatgctggaagtactggtacagaaaatcttcggtgaaggtaccaccacaagactgcgtccttcttacttcccgttcaccgagccttccgtagaggtggatgtcagctgcttcgcctgcggaggctgtggctgtcgtctgtgcaagggtaccggctggatcgaagtactgggtgcaggtatcgtgaataagaaggtactggagaactgtggcattgattccgaggagtacagtggactggcattcggtatcggtattgagcgtctggcaatgttaaagtacggtattaacaatatcaaactgttatatcaatctgatatgagagtactggatcagatcaatgatgactaagatcacggaaatatgattttagaacagtagcaatgcaaggaatagtacgagaggacgtcgtaaaagacgacgccgaaggaggtaaaagatatgttagtaccacttagttggttaaaagaatatgtagatattgatgtagaagccaaggaactggaggaaaagttattttcctgcggatttgaggtagaggaatcctatgaagcaggcaaggatatcagtggtgtggtcgtaggtctggtagaagagtgtgagccgatccctgagacccacttacatgtatgtaaggtaaacgtaggaggcgcagagcccctgcagatctgctgtggtgcagataacgtacacgcaggcggcaaataccccgtagcactggaaggtgcgcaggtatatgctaccgcaaaagatcatgtgaccatcgaaggtaccatgaagatcaaaaaaggcaagcttcgtggctatgagtcctgcggtatgctgtgttccggtactgagctgggactgaacgaggatctgtatcccggcgctggctacaacggattgctggtactgccggaggatgctgaggtcggtgcggacgtaaagcccctgttacagttggatgactggatcttcgacattgccattaccgccaacagaccggactgcgagagcatcttcggtattgccagagaagtagcggctatcctgaataagcctgtgaagactccggcactggattatactgagagcggcattaccaaggacggatttaccgtaaccgtggatgctccggatctgtgccccagatatatcgcacactatgtaactgatgtgaaaatcggcgaatcccccgcatggatgaagagacgtctggcactggtgggcatcggttctatctccaatgttgtagatatcacgaactacatcttaaaagagctggggcagcctatgcacgcatttgattcttcttacattgaaggcaatgccattcatgtaagacgtgcccatgacaaggaaaagatcatgaccctggatgaaaaagagtttgaattaaacgaaaataacctcgttatctgcgatggcgtaaagcccgtagctttagccggtatcatgggtggtttgaactccgagatccgcgacaccacagaggctgtcatcttcgagtccgcaaaatttgcaagagacaatatccgcaagagctccagagcactgggacagtcttccgattcctcccagagatatgccaagggtgtggatgagtatgctaccgttatggccagcaagagagcactgcatttgatcgaggagctgggctgcggtaaagtatcctctactcacgtagaag

SEQ ID NO: 5507 - DNA, 5799 bp, Unknown
  gut microbiota DNA sequence
ttgtaaaaacagggttttatgaacccttatataagtgcgcccaaaaatctactttatttttcactcttatgctccttgtatcttacctttgggactaacgcagtccaatcatcagaatggcaagaaaatacgtcatcggtgctgtcaccgtcatgctgtcaaaccggtccatgatcccaccatgtccgggaatcagtttgccataatccttgatgttatggttcctcttgatggcagatgccgccaagtcaccgaccatactcatcaccgcgcccgccgcacagatgaatgcgattgtccaggtgatgatctgatcagggaatgccgcttccacaaagaaatgtgcatacaaaccaccgatcagggctgctccggcgacaccgccgatacatccctcgagagacttatgcgggcttaattccgggaaaatatgcttttttccgatcagtttgcctacgacataggcacaggtatcgcatccccaggaactgatcaggatcagccataccagatagattccggtctcacactcgcgggtgagatagacaaaggacaacagcaccggtgcatacaggaaagagaacactgctgccataacctgacttgcctgatatttcggaaaggctgccacataacagaacatttccgccatgaacagtgctacaatacacatcagcagtaatgtatggtctctggtgaaaaacagtgttgcataatatgccgtcactcccacaaaaccgatccattccagtgcattaaattttttctcatccgttgcacattttaatgccttggtaagctctctgtatgcaatcagagaaataagccacaacggcactgccagaaatacattgccgaagctgaacgtagccagtgcaatggcaagcaatacgatgccactgagcaaacgggtccaaaacataagctattcctccttcaggccgccatatcttctgtctctatgattatatgcttccacagccttgatcaattcttcttttgtaaaatccggccagggaaccggggtaaaataaaactccgtatatgccagctgccacaacaggaaattggaaatcctctgttcattacaggttcggatcagcagatccggatccggaattccagcagtatccaggtatccttccagagtatctgccgtgatccctgcaggatccacttctccactctgtacttttgcggacagttttttcactgcacggacaatctcatccctgcctccgtaattaatggcaatctggaaatgcaggccatcgttgttctttgtggcctcttccagttccgcgatccgcgtccggatatcctcatccagtctggtcttgtcacccaggactctgacacacatacggttcttctccgctgtcttcagacaggtcttcatataattgcggagcagcttcatcagcgcgtccacttcatcctgcgggcggttccagttctctgtagaaaaagcatatactgtcagatactggattcccatacggtacgcctcttcacagatcacttccaccgtcttggctccctgcatatgcccgtaattgcggggcattccctttgctttggcccaacggccgttgccgtccagaataattgctacatgattcggaattttcagattctcttccatagttttaaaccttcttaaaccgtcatgatttccttggacttgctgtcgatcagagcatcaatatcctttacatacttgtcggtaagcttctgcagatcatcttccagacccttgatctcatcttcggatacttctgtctttgccagcttcttgaaggcatcgttgccgtctcttctgatattacggatagctactttgccttcctcacccttcttctttacttcttttaccagatcttttctgcgttcctcggtaagctccgggaataccaggcggatcacactgccgtcgttggaagggttgataccgatatcggaagtcatgattgctttctcgatctctttgatcagagacttctcccagggagcgatctggatgatacgtgcctcgggaacggttacattacccacctgctgaatgggggtaggagttccatagtagtcaactctcagtttgtctaatacatgagggttcgcacgtcccgcacggatagcagcaaaatctgcctccagaaactcataagccttctgcatcttgtcactatatacctgtactcttgcgtccattgttttcctctcttctgcgctctgcgcctttccattttattttctgaaattatacggttaccttggttccgttgaacttgcccttcaaggtattcacgatgctgttctcttcattcaggccgaatacccacatgggcatcttgttgtctctggccagaatggaagcggtcatatccactacctgaagattcttggcaattacttcatcaatagatacttcatcatatttcttcgctgtaggatctttggcgggatctgcattgtagacaccgtcgattgccttagccagcagaatgacatctgcctctacctcaatggcacgaagaacaacgccggtatcggtggagaaataagggtgtcccgtaccacctgcgaagaacactaccatacctttggcaaaatatttatttgctctgtccttggaaaacagcttggtaaaggatccgcactcaaaaggtgtcaggatattggtcatcatgcctacggaacggaaaatctcggagacataaatacagttcatgatcgtagccagcattccgatctggtctgccttggtacggtcaatgttctcactggaacgtcctctccagaaattgccaccaccgataacgatacctacctgaataccgtcatctaccagttcctttacctgtaatgctacctttctgacggtctcctcgtcaaaaccggtcttcttctctcctgccagtgcttctccactaagcttcagtaatattctcttcatggtcatatgctccttattttactttctttttctcgggcttgtaatcatcgaagaaggaagtcgggctgacatccgcatagcactgagagcacataccttcgattacggcaccgttgttgatctgtacggacttggacttgatgttgcccattacgatggcggaagaatccagcactacaggtccctgtacatcaatatcgccctttaccgcacctgcaatagctgcgctgatggcagtgatgttgccgatgactacagaacttgcaccgatttttacagaaccttcgctgacgatctcaccgttgatcttggctccctctgcaaagatctcggcagccttggaatttccattgatatatccggtaatattcagtttgcccagaatatcaatatttccattgatcgtacctaccagatccatagatccttcagaacttacatctccggtgataaccatacctgcggtgataactgctgtttcatctgatgcgatttttgcgtccattctcttctctgctcctttgctattctctgtattctcctgcttcagaacactgtccacagtcatatcgttctgaagtatactgtccagatcccgttccggtacggcctctcctatgggagtttcctctatccgggattcttctgccgttgtttcctcttccggctgttcttctttttcctggggaatttcaatagaatccaggttcttcaacatttcttccaatgctgcattgtcatttggtgtctcttccgcctgcggctccatcggagtctcttccgttgtctcctgcgtattttccaccggctgctccttcgtctcttccacggctgcctgatccagctcttcctccggcatcagttcattgaccgcctgggacagatcttccttcaagtctgagaaaaatcccatgattatgtacctccatttgtttcttgttatttatcagcggttttcgcgttctgcgaacgatcaaaaccgcaacaggcattctcttcttacaggtattcctactctatatgatgaatcggcctggtattttccgtaatcggcaggatcactgtatccggccgggccagaatattctctatgatatccggcaaagcttccactgtagtcggcttctccgcggaatcatgcaacagtatgatagacgtgtctctggtatcgatatccttggtacagttttccagtaatgtatccgtggataacttcatgcttccgccgtctccggaggacacattccagtcgtagtattccactccctgactgtccagataatcgataaaatcatgcatatcgatctcgctgaccgtattggagcttccacccgggaaccggtaacagacactctccactccggtggcctgatagatgtagtccctgatccggacaaaatcctgtgtaaaactgtccattgattcgtacaattccttatatttatgactgtatgaatgcattcccagcgtatgtccctcatcaacgatcctttgcagcgcctcttctgcattggttccttcttttcccaccacaaaaaatgtggctttgacattgtagctgtctaaaatatccaggatgtcattcgtataaatactggggccatcatcgaacgtcagatacaccttgtgaatttcttcctgcccggagctttcctccgccaccggctctgaagcttctgcaccggaactgtcctcctgtatctgaggtgtctgtaccggtgtactcttctgctcctgcaactgctgcagcagcgtctgtaactcctgattccggatatccagttcatccagtctctgctccagtgtcttcaaagttccgtcaatcgtatgcagcctgcagatcagatacacacagcacaggagcggaatcacgattcccgccgccacgatacctatgatcatcttcttcaaccgctgcactctttttcgccgggcttccggcaatgtctgttgcagttcttttgccatgaatctgttaacgtctctcttcctatttcgaaaatctcagcctccatcagacaagacttctgtaacagtatagcatattccacttttttgggaaagagatttatgtaaaatgttattttgtaacgcaggaagccgcagaagatattgctatctctgcggcttcctacgttataatttcattcccctgtttgtattccccgtatgcctgggttccctacccaatttcctgcattcttcgttccggataatgtcccataatgaaattatggaaaaagagttccggaagatgatgactccgaaagcgataccagatatcctccggtacattatcaaactgccagatctgtccgttgtttgcaaattcgatttccaacatttgctgctgggcatcgtacccggcagacttgatcatgggatttgcccacattattcgcttcatcttttgttctctctttctcattctgcttgttgtcacccctgacataaatgtccattagctgtaaggcgttcagctgtatctttttcctgaaagatttccccttatactttcacgtgaagatttttgtcccacccactgtgacaattgcagtatattttatttttcccttcgttttcccttatgcaggttttagcatactttctgaatacattgttgtatccccacccccagtggttcctgctgcaagtaatatgtactttgtatttctgcagttcatacattattaagttttttcgtaagtgtagcaagggtttattgtgtgttgtttgttacctggtagttctaattgttatagtacgaatttgaaggcaccggtgtcgttgaaaacctcctcatatacatcataatttgcgtaatgtatgcaagtaacacgata

SEQ ID NO: 5508 - DNA, 32710 bp, Unknown
  gut microbiota DNA sequence
cgtctgcgggggaaatgaagggaacgcctcacaccattaccatggaagactaagcgctcagacacctggggaggattcccgggatgtggagatccgggtcagcgaaggctgtatcggattctggctggagctttggggtgctctgccggatgcttttaatctgagcatccgcactcccggcggggaaaatattcccgaactgcgccttgggttgcaacaaagcgtgacctattcctttatctacgaaaaaagcagagtcactatcgactctgctcttgtggaagaaaattccggcgaggaactgatccttgtacgcatccaggatcctacccccggtatctggacctttcatgtctctgcttccggtagtttatataacggtaattttcacatgtggctgcctatcacagaatttctgtctactccggtatattttctcaatccggatcccgacatgactttgacggagccctcgatggcgccggaggttctgagcgtttctacttacaacgcggaaaataacagtttttacgcagaatccggcagaggcttcggacgcaccggtcagatccgtccggacttatccgctcccggagtaaacatctccaccattgacggacgccgtacgggaagcagcatggctgctgctatcactgccggagccgtagcacagtttttccaatggtcagtcattgagggcaataaccggctggcggaaagccgggagatccgcagttatttcatacgcggtgccgtgcgtacacagggtctgaactaccccaaccgggaatggggctacggcagactgaatttagaggaaaccttcaatgccctgctccgggtatgactatatgatctcctgcagtgcatagaccggctgcacactgcagacgccgttaatcttacgcacgctgcgctccagtttttccagttccttttccgaggtcacatccgcttttacgaggaaatcatattccccctctacctgatagcaggatgtgacttccggttgctgccgcattttgtccataaacccggcatgatattttttatgctgcaccgtcacctctaaaaatacttccataagccacctctcttctcaaatcttttacttgatcaccgaataaaaaacgcttgatgatgtatcttcgtcaaatacagcctcctgtgcaggcacaaatccgtgtttgactcattgtatacataaaaagaggaaagacaccgtacacacgatatctttcctctttgaaagtgattgcatcataccatattctttctatacttacaagtcgtctgataaatcttatcagaattttaatatttcggacaatactttctgccgatttgtacgctataagcctattttacatccgctttggaaaaaattctggcatacccataggacagcggacggtccgtcatgtccgcaaaccgcagagggaaattctccttttcctccatgcggttcgggcagtctctcctgccgcatcccagacagattccggcacatttggtaaaaggatccttcgtcagctccgcataaaataccacacttttcttcgggatcatacaatacgctgcattacaggtaaccggcaatgcaagctcctgcagaagcatgggaaggttcgccagccgcagcagactgcttattttttgttctgaagtctcagaaatctccccacctaaaaaatgcagtctggcaacatgcagatcccgatgcacaaccagccactctgtataagcccggtagctttctaataataattcactggacagtacttcgatcatataactctctgtcagaaatccgttctgcaaatacttttcctgcagttcatcgatcccttttcccagagtaatgcctacagccaaaaaagactgatccctcccgggaaaagtctcttggatttctctgtcctgccatcccgcttctgtctccaggcaggggatcatctcacctgccagcctcttcagattggggtattcttccggatcataatgatatttttccatcacactgtgcagaaattgttcgttcctgcacagtgctgtaatttctgaaaaaaaagtctgcatgtccacctgttctcccggaataccggtgatctcatgacgcaggcatattttgcctgcatccggttaattgtttttaatgcgcaggcatctgatggcattgagcacagccagtaccataactcctacgtctgcgaagatagcaacccacatgttggcgatacccagcgcacccaggatcaggcagatggccttaactgccagcgcaaatacgatgttctcgtaaacgatgcgcagacatttccgggaaatccgcatagccagagcgatcttggcaggattgtcatccatcagaaccacatccgctgcctcaatggccgcatctgagccaagggctcccatagcgataccgatatccgcacgggaaagtaccggtgcatcgttgataccgtcacccacgaatgccagtttttccttctcgctcttgtcctgcaacagcttctccacgcagcttaccttgtctgcgggaagcagttcactgtgtacctcatccaattttaactcaccggccacatgttctgcaactgttttgctgtcaccggtcagcataacgcatttcttcacaccggaattcttcagagatgcaatggcttccttcgcaccatccttgatcacatcagagatcaggatgtatccggcatattttccgtctaccgctacatgaaccactgtacccacaccggtattttccgtataagccaggttcagactcttcatcagctttgcattgccggctgccacctgtctgccgtttactttgacagttacaccatgtccgctgatttcctccacatcactgacgttagaggcatccagttcttttccataagcgtttttcagactcttgctgatgggatgactagaatagctctccgcatatgcagcatactcaagcagttcatcctctgtgaaatccctgccggggtaaatacccgtcacatcgaatacacccttggtcagggtaccggtcttgtcaaataccacatatttggtttcagacagcgcttccagataattggaccccttcaccagaataccacaggcacttgctgctccgattcctccgaagaaagaaaggggaatggaaatgaccagtgcacaagggcagctgattaccaggaaagtcagggcacgaatgatccacgtgctccaggctgccggattgcccatgatcaggttgatcacaggaggcaggatggccagtgccagagcactgtagcagactgccggggtataatatcttgcgaacttcgtaataaagttctcagacttggacttcttcatactggaattctctaccagatccagaatcttggatacggtggattctccaaattccttggtggtacggatcttaagtaatccggtcaggttcacacagccgctgatcacatcctgatccactgtgatctctctggggacgctttcaccggtcagggcactggtattcagtgtggatgtaccttccactaccacaccatcgataggaaccttttcaccgggacgtaccacgatcacggttccgatctctacatcatcgggatctacctgctctaagctgccgtcctctgcctcaatgttggcataatccgggcggatatccatcagggcgctgatgttctgacggctcttgcccacagcgaccgcctggaacagttcaccgatctggtagaacagcataacggccacgccttcggaatactctcccagtcccatggcacctacggtagctaccgccatcaggaaattctcatcaaacacttcaccgtgcataatgcccagaacggcttttctgagaatatcatagccgatcaccgcatagggaatcaggtacagcagtcccagccagatcccttccagaggtacaaaatgcaaaataattaacagtactgccgccacaatgatgcggaccagtacttttttctgtttcttagtcatagcttcctcttttccgagagcatcctataaatagatctcgcagtcatcctctactctcttgcaggcttttaccacgttctccataacggccttctcatcgctgccatcggcaaattccaccttcatcttctgggtcatgaagctgacggttgcatcggtaacaccctctaccttcttcgctgcatcctccatcttcagagcacaagctgcacagtctacttcgatcttgtaagttttcttcatggtaatatcctcctctttctccattcgcattttttgtttagttgctaatgatttgcatttagttttaatattcattcatatgaaccactgttcatatgtttatattaccacatgccatcaaaaagtcaatagtcttttttaatgttttggaaagctttcaagaaaacagtagccccggcggggtataagaataagcagacgtcggtacttagcagtcatactatgaccgcttatgtaccgctacgctctgcgacagagcgcgagcgtgtcgcgtttcttgtaccccacccgggctacggggatatttcattatttatcgttcaccggaatctgcttcagattctccacgggttccaggatctcattactgcggatgtcgatgatggggccgccggttccttcaatgtactctctggtaatggtaacccttccgatgttatcatccttcgggatctcatacatgatatccagcatgaagtcctcgatgatggagcgcagggctctggcaccggtatcacgcttcattgccttctcggcaatggcatccagggcatcgtctgtgaactccagttttacctcatccagctccaacagcttctggtactgcttaagaatcgcattcttcggctctttcaggatcttcaccaacatatcctttgacaatccctgtaaagtacaaatgatcggcagacgaccgataaattccggaatcataccaaacttgcggatatcctccacagtcaccttggataaaatatcggtatctttatcgtatttatccttcagttccgagttgaaaccgatggatgcggtcttggtcaggcgctccttgatgatctcgtccagatccgggaacgcaccaccgcagataaacaggatattgcgggtgttcaccgttgccaaaggtaccatggcatttttgctgttggcacctaccggcacctccacttccgcaccttccagaagcttcaacataccctgctgtacactctctccgctgacatcccgggagttggtgtttttcttcttggcgatcttgtcgatctcatcgatgaagatgatacctttttccgccttttctacgtcattgcccgccgctgccagcaatttggataccacgctctcgatatcatcaccgatataaccggcctcagtcagagaggtggcatcagcaatagccagaggcacatccagaagttttgccagtgtctttaccagataggtcttaccggaaccggtggggccgatcatgaggatgttggacttttcgatctcaatctcatccatagtgtcagtggccactctcttgtaatggttgtatactgctacggagatgaccttcttggctttttcctgtcctaccacgtattcatccagactggccttgatcttatgaggtgccggaatgtccttgatattgaataccggtttgggaccttccgccttctttttcttcttgagtttctgcttgttgggaataccgccgtctccctgaagatccgccagattcacaaaactgatgttggggaatccgttctgtccgttgaactggttgaaatcattgggattgttcaacattccctgataatcgaactggctcacagtctccatggtcttgtgcatgcaatcatcgcagatgcagatatggttgggcagcttgaacattctgccggctttgctctccggtctgcggcagataaagcagacatcttcgtattcgctgctgtcctttttgtcctctgactttttttcggtggaattttcttttgcagtatccgccacctgtgtgtttccgttatttttttcgttatcctgagtttcactcacattggtctctgttttttcctcctcagggatcacttctctataatcatcattataattatctgtcatgttattctcctctttgtttcctaccactattccgcagtgtatctcggtaacacttcgtgttccctcgatatccgggcttcgtcctatcatccccggctccaaagcatcttcgcagtgtatctcggcaacacttcgtgttccctcgatatccgggcttcgccctatcatccccggccattatgcaataatgcctgcaagcagtcatattgcataatacccgtgtctgacacttctcattgcctacgcttattatactcaatgaagtagcggggcacaagttaagtttttctaaaccatttataactattcatattttggtaaatattacaagacccgggcaaaactatatgtctcgcccgggtctctttccatttccttttatttacctgttatttctttatttctggcttgcaggtctgctgcccagtgtcagattcagctcgatggatacatattcaccgttctgaggtctctgtaccgttacggttacggaatcaccgaccgcataatactgtaacgttttctgcagatcagagtaggaagagatactgctgccgtcaaatttggtaatgatatcacctttcatgataccggcattggctgctgcgctgccttcctctacagatactacatagataccttccggcatgttgtacatctgggagatctgggaagttacttcctgcagggagatgccgatgtaaccgacttcatcctcagctaccttggttctggtctgacgctccatcagatctgcaatgataggacttgccgaagtaatagggatagcatatcccataccttctacggcagtaccaccgatcttgttggagttgataccgataacctcaccattcatgttcagcagtgcaccgccggagttaccggggttgatggctgcgttggtctggatgaaagtaccggtagagccgttctccagagtgatctcacgattcagggcacttacaataccgttggtaacagactgaccatagccaagggcattaccgatagcgatgaccggctcaccaagcttcagatcatcactgctgccaagtgttgctactgtaatagcattcttggtatcatcactcagatcatttaaagatactgcgatcactgccagatccatatcggaatccagtcctttgacctgtgcctgtgcttcactgccatcgataaaagtaacggtcagagtatctgcactctctactacatgattattggatacgatcagcagttcatcatcggtcttacctacaatgataccggaaccactggctgcttcttcctgtgtatactgctgtccgaagacattggctgtctcggtaaagttatttacgatggataccatggcaggcattactttttctaccacattggatacatcggactctacataagtaacattggtagccagctgtgcactctgggtactttctgtcgttgcctcagaagcgatctcatctaccactgcggtatctgtgctggtcgtaaacatcccggttccctgctgtactgcatagaaaccgattcctgcgaacagtccaaagaacaatcccaggctgacacttaccattgccttccggaagtaaccgccatgtttttgggttttcttaggctccgtattgttgctgcctgtggttccgcccatctgatatgtggtgtaaccattcgtgcttcctgctgcactctgggtagtactatgattttcatagccataactgttttctgttcttgtctcattcagatctgctccactgaatgtaccggttgtattttcattgccggttccgtaaccggaaaaattatcattctcgtacatattgcttcctcctatcctgttgcaagtgagaaactctttttaccattacctgtttcatttcttcctctcaccttatgaacacagtatatccgtcaattgtgtccgaattgtgataactttctgaagcaattatgaatcctgaaaaaaaagagagtctgttctgcctgcaagcagtctctctatgggtaagttattacactctactcaacagtaacggattttgccaggtttctgggtttatccacgtcacagccgcgtcccactgccacatagtaggagaacaactgcaaaggaatgattgccagagaattggtaaagtacggattggtctcggggatgtatattacataatccgccgctttctcaatggccttgttgccttcaatggtgactgccataacaaaggctcctcttgcttttacttctaccatattactgatggtcttctggaacagatccggctgggttgccaaagccactaccagcgtaccatcttcgatcagagaaatcgtaccatgtttcagttctccggctgcataagcctcagaatgaatataggaaatctctttcagtttcagggatccttccagcgagattgcatagtcaataccgcgtccgatgaagaaaatatctcttgctcccacgtaacgattggcaaaatgctgaatcttctccttctgtcccagaagcagttcgatctgatccggcaggcatcttaaatctgtcagcataccggcgaacttctcctgatcaatagtaccacgtaccctggcgaatttcatagccagcatgtaaagtgcagttagctgtgcactgtaagccttggtggtagccactgcgatctcgggacctgcccaggtatacataacactgtctgcctctctggcaatggagcttcccaccacattgacaatgcccagtaccttgaagcccctttccctggactctctcagtgctgccagagtatctgccgtctcaccggactggctgatgacaatgaccatattacccttctgaagaatcggatcacgataacggaattcactggccacatccacttctaccgggattcttgccagaccctcgatcacatattttgcggtaactccggtatgatatgcggagccgcaggccacaatatggatcttcgtgatctctttgatctcttcatcactcatgttcagctcttcgatcacaatatcattatccttgattctcggagagatggtatcgttgatggtcttcggctgctcatagatctctttcagcatgaagtgctcatatccagccttttctgccgcattggcatcccagtcaatggtcaccggctgcttctcgatctcttcctcatccacggagaagaaacgcagactaccctgctgtaattccacaacttcctgattgtctacataatatacggttctggtatatttcaatatcgcaggaacatcggaagcgataaagctgccgttgtcgctctttcccacgatcagcgggctgtccttgcgggctgcaaaaatcttatccggctgatctgcaaacatgattcccagcgcataagagccttccacacgatgaagcaccttcgtgatggcttccagaggatttcccttgtaataatagtctaacagatgtgccaatacctcggtatcagtctcggatacgaactgataccccttatcctgcatctttttcttcaggggaatatagttctcgataatgccgttgtgtaccacggcaatggttcccgcattgttcatatgcggatgggaattgatatcgctgggagctccgtgagttgcccaacgggtatgtccgataccggaggttcctttcatattctctccgccgtgggtcaggttctccagaaccttaagtcttcccactgcttttctggtgttgatcttctcaccgtcaaaaatcgccatacctgcggaatcatatccacggtattccagcttggacagaccgtccagaatgatcggcgctgcctgttctgttccaatataacctacaataccacacatagtcatacatcctttctgttctgtttccagtattccttgttggaagtaaaagcaagtacccattttttcgggagcctgcgatagttctttcccagtaaataacctgcatatttacaggcgcattgcatataaaaatggggcaatccggcagacatatggttgctgcgcaaatataccgtcacatctttcaccattcgttttccctcggactccgaaggatatgctgcaaaaatctcgggatgctctgcctgcgatactcccaggtcaaagtttctgtggaactgctgcccgttggtataattatgagaatgcaccacctgcgcatccgccgcataagccacagagtatcctgcttccaccgcctttgccgcatagatcatatcttcattaaatatcgtatgtctgacgaacccgcccagttcctcatagatctcccggcgataggccgcacagacattggagcagaaaaaggtcttgatccccaggctgtccaggtctgctgccgatttgatccgggactttgccggatagttaaattctctggtatagctctccaccggtgtcgaatcctctctgggcagctgtctcgcataggccaccgccacttccccctgcaggggttccaccagtttttcgatcagcctgtcatctttcggcatggcatcctgtgtcatcatcacgaagacatccgcagaagacttttttactcccatccgtctcgtaccgccatgatcgaactctcttttggatacatggtataccttgatattctgataggtttccagaaatctgattccgtagatcagctgatcaaaatatttttcttccgtattcagaagaatcacctgatgtaccggtacgctctgactgcccagtttatccaataatgtaaataattcttttcccggcttatacaggggaatgatcacatctatctccatgtcagagcgctcctcacttttccaatctctggttcattatactttaactcttattgcggcacaagccttttcctactgtccaaaaggcttataaccttctgggtaatgcacaagggagccccggcagattccggaagactcccttgtattcctgttgctttactctatacactgtttcttacttattcagataaggtgatgtgtcagattcaatcttattgctgtattccttcacgttgctggttacggaatagctggcatcatcaaacaggaactgatgcagccatactacattgctttcgagatttaccggaataacacagcttccctttgcaccgatattgccggtgtcacgcatggtctcttcggggaaacctccttcgtccactatgcgataatttgaaatattgctcagcagatccaggatgtccttggaatccagactggtgtaaatatcgtcgatgacactgttgaataccttggacaatgttgcataatctgctttctttgcctgatcttcgattgcctgaatgacttcacgctgacgggcagcacgcttaaagtcgttaccagcggtataacggatacggcagtaagcagtagcctgcagaccattcaacagctgcataccggtctcagttaccggtgtataatcgcatttcaaaacttctgcaataccgatctgatagttgttgatatgcttgatctcctcagagtccacatcaatatagacaccgcccagaccgtcgatcacttcgctcagtcctttatagcctacggtcacaaagttcgtaatatccatatccagattcatgttcagcatcttaaccgcctgctctgctccgccataggaataagcggaattacatttctggtaggaatccgtaccgatattcaggtacgtatcacgatatacgctgaccagtttgatatcaccggtatccatgttgatgctggcgatcatgatactatcgcttcggctgcccttgtacagctggctttccttggtggcatccacaccgaacagggcaatgttcatatagcccttcatagtttcatcctgctgcacctcttcgggaatctgaagttcttctgtctccagaacggttaccttggggccctcattgctggtatgagtcattaccagatacaatactgctaccatgaacaggatcactacgatctctacgccaaagatgataacctttcttctcttcctggctgcacgctgtttggcagacattctcttctgtccgttcgcagctccggttctctgtccactgccggcaggtctctgtcctgtaggtctctgtgcgcttccggaaggttttcttccgcttccggcaggtctctgactattgccgccattgttgttagaatttgttgccatcttgtcttctccttgtactaataagcatttttattgataaatcctgtaaagaacgtcataagaatgatcttgatatcaaatccaatggtccagttctcaatatagtaaatatcatattcgattctcttcttgatggaggaatcaccgcgcaagccattcacctgtgcccatccggtcagtcccggccgtacctgatgttttaccatgtaacgaggaatctcttccttgaacttttccacaaactgcggtctttccggtctgggaccgaccagactcatatctccctttaagatattgaacagctggggaagttcatcgatactggtacgtctgagaaccttaccgataccggtgactctggggtcattgcgtaccgtccatccctttttctcttccgccgccgtctgcattgccatgctgcggaatttgtacatataaaacggcttattatgaagtcctacccgttcctgcttaaagatcaccggtcccgggctggacagctttaccagaattgctgatatgagcatgatcggtgaggtaataatgataccgaaaatggaaccaacgatatccattgcccgcttgatcaccatattgcctgtgttcgtcagcggtacataccggatattgatcaccggtaatcccatcagatcctccgtatagggtctgctggggatcagactgctgtaatccggaatgaatttggtgtgcaccccggatttctcacagatatccaccacaccttccagataatcataatccttcagggaaagtgtgattgcgatttcatccagcttgttctccggaaggatgtattccagattaccaagcgttcccagtactttcactcccttgtaggtcgtgcctccggggatatgctcatccagaataccgcacaccacatatccccattggggattgctgaggattctgtcgatatattcctctgccgcccgggaatatcctaccagcaaaatatgcttcaggttgtacccctttttccgtatggaacgcaatgccttgcgcatgatgatacggaatacggaagtcagaaaaacattcagaacataaaaaatcgccatgacggatcgtgaaaagttgatctcacggatgatcatatataaaataatgatcaaagccgccaggccaatggtatttgcctgcagaatgctgtagatctcatgtctgcggcggacggtacgcttcggtgaatacacactgcaccggtaatacaggaacatataaccgggtacaataaagggaagcaacatgtagtaatcccgcaccggcaggacaccgatccccggaccgtcatttaagatataaaatttgatataataggcaaggacaaaagatactgctgtgatcagcgcatctattatcacaagaagcctgttaaagactttctggttgtcttttatcatacgggtcacccaatctttaagtccgaaaagcttcttttcaacgatttcattctacaataacggtggttttttctcaacttaagaatttatgaagcgatttcttaagatttcataagaattcgaaaaacattcaggtataattgccactgaatcttcacataattccataaatgactccattgaaagcgcacttttgcctgctttcccacaggacccacagtacgtttccacccttctgccagtccctttaaatatagttttcccattctcttcttgcaaaaaaacagaaattttatgccaaatccaagcaaaaagaacggcagattcaggatccactgtagtagcggcatatttttgccgatgacatagatattattggaagaagaaagttccgttttccgggaattgtagcgggatcccgtagaagcactgccgtaatgcagaacggatgccgtcggctcgtaccggttctcatagccgtagatccgggcacggtaaccgatatccagatcttccagataagcaaaatgcgcttcgtcaaaataaccgatctcctcaaatacctgacgtctgtaaattgccgctccgccacaggctgagaatatgctgacattcttgtcataatccacagcaggccggccttttccccgggaatatgcccatcccagaacgcagtagcggtctcccgcatcatccagcagctctggcttatcccacataagcattttggcgctgacggaaaagatcttttcatccttccgaatggcatcatacaatcctttcacaaatccagcttctactctggtatcgttgttcaacaggatcacataggggcttcgtgcctcccggattcccagattcaccgcatgacagaagccggtgttctccggcagggcgatcagacgcacctgcggttttcccccctcttctgccggtgcctcttttttgcgacaccattcgctgtccagatattccacgctcccgtcagcagaaccattgtctatgatcagcacttcatattccggtgcattttcctgtccctgacgcagggaagccatgcattccggtaaatatttcattccgttgtaattgggtataacgacggttacttccttcatagtctctcccatttctccggatactccggcagatacagcagtcttccccgttttcgtaatgcttccgataattgcagacttaaaagccggatatctgccccggcaggcagtgtggagctgtcaaataccggctgttgttccggacctcttactacttccgtataaggcactcccacgattttttcaaacaattccctgtcagctgaccggatcctgatgcaccgaaggtctaacgcttctgcatcctgggacagctccgcccggtgaagataaccaccaaagtccttcggcagtccctcgtagaacacctttccgtccgcagtcattctgccgccggcgatcctgccgcggtttttcccggacagcactctgccacctacggcagccacatccggtctctcctgtaatacctctgtatattgtaaccgataaaatcctacatgtctggtctcctctgcctttgccgggatcccacgctctgccgcatgatcctgcagtgcacgcagccccgcttcgtaagcatatttcttgctgtggggattggctgctgtagatgcttcatggcatctccagtgatacagcactctgggaatatgaagaattctctcctccccggagcggccatctgcagccagcacctctgacactgcccgcagcaccagatcatagtcctgggcaccgtcgcattctggccggaatgcaagtttcttcatcagatctgcatccatcaccagaaaatggcagatgtagttattactcaggattaaatcgtaattaaagtcttctttatggttgggatcgtaatattttgtctcatccccgttgcatttgtcttcatccgaataagcgaatgcgactctgacacctctgtcatttgctttggtaatagcatccgccatctcatacagagcatccggtgtcaatacatcatcatgatccagcaggccgatatattctccccttgcatagggtaatgcctgattggtattcgccgcaattccggcattttccgtaagatgtatatagtggatccttgcatccgctgcaatagtttccgcattttccgggagccgttctgtcaggaatccctgatttgtcaacgtctcctccacactgtgatcctctgtggcatccgccagaatcagttcccagtgaggatagctctgttgcataacgcttgttatcattctgttcagatagatttccggggtacggtacaacggcaccacaatgctgagtgtaaccggattatcccattttctgcaactttgcctttccagttcctcttccggacagggcacataaaaatagcggtctgtctctgtcaggcgttcccttacagagatccaggtttccctcaggccgttgcgttgcagataatatagagttttcttaaggtttgctatgttcagctttgccacggatacctccacttttataaaagagcaaatcgcccttcccgggcgattcgctcttaaaaataacattaactattcagaaccccattcgcaaaatcgctcttccagagctttcctgaataacatacctgcatgctatttgctcatagtggttacagtacagcctttacatcctcggtcagcttctctaccttggcctgtgcatcctctatgctgttacctttaacacccatgtagaacttgatcttgggctcggttccggaaggacgggcgcagcaccatgcattgtcgggaagctcaaaatacaggacattagacttgggaagtccggtagtggtcttctcgccgctctccatgtcgatgactacatcgttcagatagtcacggaatttctccactttcaggtcaccgaatgccttgggcggattcttacgaagcttatccatgatctcagcgatctgtcttgcaccgtcgatacccttcatggtaatggtgtactgggtctccttgaagtaaccgtatttctcatacatggataccatcatatcccacagagtcatgttgtgcttcttgcagtaagccgccacttcacacagacacataactgctacaactgcatccttatctcttgcatgagtacctgccagacagccgtagctctcttccagaccgaatacataattgttgctgccggtctgctcgaagaacttgatctgctcaccgatgaacttgaagccggtcagtacttcgatcagctttacaccataagcttcggtgatgggcttggtcatattggtggtaacgatggtggttaccagtgcgggattctcgggcatagtgccggtagcagtcttctctctcaggatatattctgcgatcagcataccggacatgttaccggtaaatgccacatactcgccggtcttggtatccttggcatacacacccagacggtctgcatcgggatcggttgccagaacgatgtccgcatccttctccttggccagacgcagtgcgtatgtaaatgccttgggatcctcagggttcgggtaatccagtgtggtgaagtttggatccggattctcctgttcgggaactacatagacgtgcttaaatcccagctcggacaggatacgtcttaccggcttgttaccggtaccgcataacggagtatatacgatcttgatgtcatcagccatttcctgaataacatcgggatgaatgatctgcttcttcagctcagccatgtacttgtcatcgatctctttaccgatcacctgatagaggcctgctttttccgcatcttctctgctcatggtcttcacggtatgataatccttgatggcctgtacttcggtgatgatgtccttatcaataggagcggttacctgtgcgccgtcctcccagtatactttgtagccgttgtactcaggagggttgtggcttgcagtcactacgatacctgcggtacatcccagcgtacgaagggcaaaggacagttccggggtaggtcttaaagattcaaaaatgtatgccttgatgccattggctgccagacatcttgctgcctcatcggaaaactcgggagacatgcggcgggagtcaaatgcgatagccacacccttgctctgggtgccgcgcttaatgatataattagcaagaccctgagttgccttacgaacggtatatacgttcatgcggttggttcctgcaccgatcacgccacgtaaaccgccggtaccgaattccagttccttgtaaaaacgatcttccacttctgcctcgttgttgcggattgccagaagttcatccttggtcttctggtcaaaataatcatcattcaaccagaaattcagttcgtccatataactcattttcctatcctcctgttttatcgctatctttatctttcttcagtaaacgctctccgccattattctaccatagattacctttactgaaaagagcaatttaacgtccgctaaccggatctctcagcgcatagtcactgcgatccagagagaaattcgggttgtaataggggtctcctgcttccagctctgccttccatttttcacggaaatgctcggattctttgttgtaacgctccgccttctctccctgatcatccagacctctggaaatagattcataatgatacagttccgcaaaaggggtccatacattcagcagtcccagtttgcgcagtttcaggcagaaatccacgtcattcagagagatcacaaagctctcgtccagtcctcccacctgctcatacagactctttttcaccaacagacatgctccggtcactgccgtggcattctgggtataacacaggcgtcccatgtagccgaggttctgtaccggaatacgataatgggtatgtcctgcggtgcgatgtgcccccagtccgatgactacaccggcatgctggattgtcttgtccgcataatacagctttgcacctacggcacccacatcttcccgctgtgcatacatcagcatctcttccatccagttggcagtgatcacttccgtatcattgttcagcaaaaggatataatctccggtggcataggatactcccagattatttacagcagaataattaaagtcaccatgataggtcaccacagagatccggccgtcctcgctgtgcagaatcccgccgtcatgaccgcagacggtatgcagcttgcatctctctgcgtaggaatcattgccggacaatgccagcagctgggaatagtaatcccggatttccggtgtggtgctgttgttctccaccacgatgatctcgtagttgctccaggtgctgttcttctgaatagaagtaatacatctcttcagatcttccacgtgatccttgttggcgatcacgatggagatcttcggatctcccagaatctgatagcggatccggaaaattgtggcacaggctctggtactggtgatctgaaaatgtttgaatccatgctttttcagatgatccgccacggcaccctttgccgcctcgatggcatagggctttgcgtcaatactggcggcggtactgcccgcatggcttctccagtaatacatcagtctgggcacatgtacgatcttttgtgctctgtccgtcagacgcaggatcatatcgtggtcctgcgcaccgtcaaaagccgtacggaacagttcctcgccttccagaagttttctggaaaagacgctgaaatgacagatataattgttggcccgcagattatccggtgcataatccggcttaaaatgcatggtcagcattttattaatattgtcctcctggaaggtggtctcatcacagtacagataatccgcaccctgttcattgatttccttcacataggcatacaatacggaaggatgcagaatgtcatcctgatcgaacagtccgatatagtctccggtggccagcttgtaacactcattggtgttgtaggaaatacctccgttatggtccaggtgcttatatacaatacggccatctgatttcgccgcgtactccttgcagagttcttcgatgtaagcatgttccgcatcggaaccgtccgccagacacagttcccagttctgataggtctggttcatgacgcagtccagcatctgtatctggaactctctcttgttattccacaacggcacgagaatactgatcttcggcatataggggaataccgtttcttcctcattcttcctctgctccgcatcgggaaagcttccggtaccgtaggattccatcaggctcttctggtgactcttgttacggatcttccgcagaatatctttgggaccaccgcaatgagacagccgttccttctgtctctgggcaaaatggatcacacttctggcaggtcctgtagccttccagaatttatttttcttgattcggtccagtttgaactgcagatcttccttctccgattcgagtactacgatcttgtccgccagatccgcacatttttcatgctctctctcgtaggcttccttataattgatctcggtgttgctctctgacatatgtctcctccgtgatgctttcaccgcattttagcggatcatgcatctgttttattcttttgctgccggaagctctacggtcagatattttcccgtagtattccaaagtttcagcttgctgacacggttcaccacaagaacagcgatcgtatagtttcccgccggcagttgttctccttctctgaggacacaaaagccgcccaatgccacatttttctgatccggaagattttcctccagttcctgtcggtaggcaggcatcaactgcatggaccacacaccctgtccttctgtttccccacagggaatcagcaacagatgtttttcatagcatgcattatcgtctcccagaattacactgtatccctggatccgctccggtcccgctgtctctactctggccatcaggcagttatccctgcggatcttctgtaattcctctccgccaggaagtccccttttccagaaaggctcctgtaaaacattccgatctgtcagatatgccggaaccacacggctgtccagtccctcccggttcagccccttcgggtaaaaaggatcctctccccggaactgtggatgcatctggtagagcagttctctctcctgtaccagacgctgcattttctcaggactttcatcgcttccccggctgagagattcatgatgatatgcaaagcggtcgttccacaccacattgtagtatcccatttccagaagccggaagcccagttccacatcattataggctacccgcaacacttcccggaatcctccggtctcccggaacacctctgtccggatcaggagacaggctcccgtcacggccacacaatcctgtgtaaaacggttccgtccaaaatagtagcttctgtcatcctccataaactgtagcttatgcaccggtcccaccggcagattgacaatgccgtcatgctggatcttcacggaatccggataataaagtttcagtcccacactgcccacataaggctgcaaggctctggacaccattttatccagccagtcattctcacataattcaatatcatcatttaagaacagcagcagcttgccatctgccagttctgcgccacgattacacatggtggaaaaattgaactccgcaggctcatatacataccggatcggtgttccggctgtccggatttcttccaccagctgttctgtttttttcctgttttcctcgttacttccgttatctatcagcaggatttccaccggaacactgccctccgggcgttgcgtcagcgaccgcagacattttcccagtacggaaggattatctttggaaggaatgatcacagagaccctaagttctctggcgaacagttctctggcttcctctgccgctttggccgccagttccacggacagttttgcggattccgctgccgtccggtactcttcccaggggttctgctcatcttccgctttctcccggctggtttctgccggtccctgcagtccgattcccgcagtaccaaaagtgccgtgaaacagcacttcttccagatgtccaatggtatgacagcctctctcaaatccaccggccgccagaaacagccggtccatcaggggacggatctcttccgctttcgaaaatactatttccctgccggtgctctctccttctgtcacagccccgggctcccccagtttctgcaacagtctgctccgcactgccacgacgcttcccacatagaagaaagcccggtaggtatccggagcccagcaaggcttgaaccatgggatcatacgctctccgttctctgacagcagatcttcatctccatagacgatctctgcctccggatgcttcacaaaatacgcattgatccgctccacagcattttccgccaactgtcctttctgctgcctgtagatcacgaattccgcaagaccgactctttccccgatctctgtgaccactgtttccgcaatctttttttcctgctccgcagcccattgcgcgtaggtcacccgcagctttgccagttctgcttcatactttttatcctgttgtctgacaagcatctgctttactgacgtccgaatgctcaagtttcctgtctccttagaaaaattttttcaccgctcccgccatgtcacttgccacagcaaggggaatctgcacgatctccattttcacagtcaggatgttctctgcctttctgtccaatgcatccacccggatcgtcagattcggatcctccgtgggaaataccacgctgggatgctccgcaccgtctgcggactttaagatttttccattggtggtaacgatctttttgtcctgcacaggaaccggctgtccgttcatggtaagctcccggattttacacacgcaggcgcacatggccggatccagccgtaaataatggacatttccatcgaaattcaccgtaaattccgcctgtttttcctctgcatagacgttctccgggaaataggaattttcttcggaaaatccctgtcccttgtcctcatagatctgtaccctgagttctccctccgtctgacggaaccgtccgatccattccgtgggcttataaatttcgccgcctaagagattgcggatctcacccatggacaatttctgtccggtcacatatttctgaaattccatctcctgctctctgtactgtctggcctcgttttccgtgatgcccagacgatccagaatacgatccagttccagtgcattacgtctttcatcttccagtacataacagtatacagcccggaaggccagagctctggtctctatgggacggtcaaaagtccattcataatcaatcagtgtccagtggtcaccatccaccagaatattggcaaagatcagatcaaagtccgccaccggcacatcctccccgtagcccactctctccagatattctgcgaacaggttgtgaaatttctccacatcctgtctgtccaggcattcgtccatcagttccgacagcggtctgcccggcacgaactcaaattccgcataaggtatgccgttctcttctcccagatggcagacattgacatccagactgcttcccgcataccgttccttcaatttttcataagcctccggcatatgacgcacatgggcttccgcttcttttgtcagcggatattttcggaccgtcttacagccttccttgtcccgcaggatctcggtgcggatccggaagctttccgcacggtcattggaatatctggcatatttcagatccagaggtgctccgatcaccgccatataggaattggaaaaaacggaaaacaatccttcctccacaattccgtcaaaagcactcttctcatcgaacaacagcattctgtcccggtcaaaattccgcagattgttggacagctctccacgtcctggaagataagcatcggaatagactgtggtcataaatttataatcgggatacggataataaaaactgcgttctcccacaccgcaggcatcgaaaatgcgctccagctttttccgggaaaacgtgcgtaccacaccgccctccggataattttcaatgccggaaaaccagctgcccagatgatcttccttgcatccggcaaaatatttcaatccgtatttgttctcaatggcaatcacgatcctgccgtccggtgccagatgcttctgcaggatcttaaggaaatcctcgtaaggcgtcttgccgcctatgtaagcctgtccgtactcaaaaacaccgatcagacagatatagtcatagtctgcgggaagttccggttccacatccgtgaaattgcccacatggatcgtcacattttcacattcgctgtggcggtaggcgttgatcaggctgcgcttcttcgagagatccacacaggtcacttccctggcttttcttgccagtgcacccgtgatggctccgcatccactgcccacttccagcactttctctgttttctgtatgggaaggaaatccacgatattttcccggagagcagacaaatgatacaggatcggccagctctttcgctccgcaatgatcctgtcatattccaccgtactgtatttttttacaatgtctaagatctcgtcctccacactgccgtcgcaataataatcctcgccgggatatttatccagattcagtgtgatcttcccgatggtctctgtcattccttacttctcctccgcatcccatacttttgtttcggaatccatatcataatatcctacggtgttcttgtccgataccaccgtaatattcaaggcatcatacagtctgtgatatacctcgaaggtatcctgattgtagccggtcactcccagagacagcagatactcaccaccctgtaagttcatcttctgggtaaaagtcacatttttcacctctcccggctccacgctgtccagaaaagccttttcaatcatggtatttgtaccggtgatctccacaccgatgacgtttttaacagaaaatgcaaaaatgggggccggaatatgatccataaaacgaacccgcatatggatggtaaacatactgcccttcaggatcgcattggtgggaacccctctgtcatccgtaatgtaaaattcctcaatctgtgcctgcttcgtaccgtattccagggcattgggattctgccccttggcctccatggaagcctgggaagcatcggtccccttctcatctgctttttgggcagctgctctctgcaggtcttcatcatccagcagactggcagtctcttctcccacactctccgggccgtcatactgtcccaccaataccctcttgtaggtgtcgatcatagccttgggactgccttcgcccaggatatttccctgattcagcagatatacacggtcacaatatttgctgatactgctcagatcatgactgacgaacacaatggtcttgcccatcttcttgaattcttcgaatttatgataacattttgcctggaaaaatacgtcaccgacactcagagcctcatccacgatcaggatctccggctcgatattgatggccaccgcaaaggccagccggacgaacataccgctggaatatgtcttcaccggctgatatacgtaatctccgatatccgcaaaacttaagatctccggaagctttgcctcgatctccttctcggaaaatcccatcatcgtcccgttcagatacacattttcaatgccgttatattccatattgaatccggcacccagctccagcagagcggaaatacggccatttaccagcactcttcccgaagtgggattcaatacaccggtgatgatcttcaggatcgtggatttaccggaaccgttggtaccgataatacccaccgtttctccctgatagatcttcatgtccacacccttcagggcatagtgaagcttatgcttcgtcttttttccgaagccgaaagcctccttcatccgatctgagggcttatcatatagtttatagatcttctggacattatcgacttcaatggccagctttttcttttcctgcatcaattttaatcctcgcttatcagcgttacactgtctttgtcataccatatggccagagaacggttggcctcgttattttcatcctccgagaggtctcccatgcacaaaaaccagggcttgtagtgataaggttgcagctgtacatcatcctcatctcccaatagcttctccacccgttccagatattcctgatggaaattatacgcttctccggtatgcacatagtaataggccccataagccgaataatgtcctgcctgattgggtgacacctgaaagatcatgataaattccagacccataatcgcataaaaccaccacactgcggctccgttccagttcgccagccatcttgccgcgctgcctgatgccttcttctgcagtctttgctgcagccagccacaccagtatatttcgttcaggaacaacagcaataaatatgtgatcttcaccgcattcagagttctggacaatccggcatgtccgagggaatacaggcttggggtgtaaccggtggcatacaggcagaaggaccacagaagtacgactcccggataccggaaacgatactccgtctccttaagtgcctgccagatcaggggtaacagcatcaccattaccataagaacaatagatcccgtaaactctggaagatgttttactccttccagaaaagatctgccgatggactccaggggactgtatccccagccgacatagctgcgggcccgcacggaattgcccggtgccgctacattcagcccaaatcctataatgtataccagcgtagcaggcaacagccacagtccctttttccggtgttccactaccacacttataaacagaatcgtcaacagcgataagagtccctgcaatgccgtgacaaaattgcttccggccgtgatcatggaaagcagtaccgaggccgtaaatagcagcccggtagcagttcttccttctgctctctccaggcagattgccacagacaacatcaacaatccaaagccgtgcattcccacgtaatgaactccgccgttataccagtagaagccactctgtgcggaataaataaacataaagactgccactgtaatcactgcctgtgctgccaggccggtccacttttccatgcccagtactttccgcaggatcacatgggtaaatgtcatggtacccgccagcaatagcagcaggatgaacactggaccgaggaaataatactgttctccccagattgccggcatcaatgccataaagaaaatagaagaataggttccctgccacgcataccactgcgttctggagcaatccagtgcaccggagatggcagcccattttgactgttcctgctccatggcagctctggcaaatcttccgaaattgtaatcatcataatacggaaccgcatagactgtcagacgaaacaatggaatcagcgtcaacagcagcagtccgcagcatcccacggccaacagaatctttcccggcttccataaccaaaattttctaaatttttcacgagcacccttcaattactttcaccctttctgttttccccacaacagttttgtaatgcagctcctccccacaaggttcttcatctataaaagttttgctatgctctgttttttataatacgattcccccgttcttcgaactctcgaaattgtaacaatcattcgtattatagcacgtctgcgaaatgtaccttcaatcgtttgaaaataacggctcccaacccgaacagtactaccgttacgatccagaaatacatggtggaaaagaaatcctggaaaaaccattccttctcataaatagcacttcgataaccgtttacaatatacaccagcggattcagcttcagaatcgtgatccaattgccggacagggaatccagattccacaaaataggagtggcccacatgccgatctgcaatccgatactgatgatctgagacagatcccggaaaaatactactactgcacaagtcgtatagctgagtgccagtacaaaaatgaacaggcagaagctatagtatacgatctgtatcgtatatatggtaggataatacccgtaaattgctgccacaatcaacagcagacacacaaaaaatacatgaataaaggtggctgcaataatcttgatgataggcaggatactgatcttaaatactacttttttcaccagatagttatattccagcagcgcattggttccattgtttaatgcctcactaaaatagaaccagggtacaagcccagccgtcaggaacaatacaaagggtacttccacaccctcccgcaggggagtactcgtattacccatgatcttatcaaaaacaatgtaatacatagccaccgtgaccaccggctgtgccatagcccataccgcacccagataagatcccgcatatctttttttgaaatcatttttggccagtttccagatcagatgacggttctggaacagttccaccggcagtccggtgaatttatcataccagtgaataaaagcaacgcatgccgccgcgatcactacgcaggaaatgatcttcttggccagttcctgtcccggatctgccgcaggtcccggattcttatggaatacaataagtactgccatgatcactgccgttgtcacaaacagggcaatgcccgcttttttacttaccttcattctctttttccttcacgtactgttccaatgtgccccacttggtatccttctcggaaagcgtcagttccataccttcgggaatcggccattttacaccgatatccggggtattgtaagcaataccgccctcatcatcgggatgataaaaatccgtacatttatagcagaattccgcataatccgacagtaccagaaaaccatgtgcaaaattcttcgggataaagaactgcttcttgttctcttcagacaaaagcactccgtaccactggccgaaagtcctggaaccttcccgcagatccactgccacgtcatagacttctccgcggatcacgcgcaccagcttgtcctgaggaaaatgtttctggaaatgcagtccacgcaatacacccttcttggaagcggactgattgtcctgtacgaacacctcaggaatccccgcagccttgaaatcgttataattgtaagtctccataaaatatcctctggcatctccgaataccgtaggagtaatgatctttaatccttcaatttcacaggtttctactgttattttacccatttatttcgtcctcactctttatttttattgactattcgtaggtgatattcatgtccacacgaccttcgatgccgtccacttttcccttggaggtatactgccaggtcttataatatccctgatataacggaacactgcgatactctgccagccagatatgatagttttccagtcttgctgtctgcagattattgttgtaccagttacggctggcatagacacccgccgtgtatccggcattttctatggtcctgcagaacgcttcacataccagtgttctggtctcagcatccagactgtccgcacggccgttaccgcccgcaccttcggtatcgataaataccggatagttcagccggtaatcccggatcagttcgatcaccgcggaagcctcttccacagcttccttctcatccacagcctgggtgaaaaagtatacgcccaccggaattcctgcggcctgtgcacccttcatgttcgtcacgaacatgggatcttccaccaggcttccggttactgaaccgcggtatccggcacggataatggcaaactgcactcctgcatttttcaccttatcccagtcgatctccttgttccatttggagacatcgataccgacctttgcattaccggacgtggtctgcagcttctggatctctgtcttgtccgcatctgccagagcatctgccacggcgctgtcctcggcttctgcatccacttcatcctccgtcttgatcaacagggaaatatcgtcaatggccagatactccactttatccttgacgtgaactcttgtctcactgaccggaaccttatatccctcaatgggaaggagctcaatataatagtctccggaatccagatctccaatgtaaatgataccgtcctgatccagatccttgtaatctcccaatccgtccagtcgtacgtagaagctctccccggtcaccggacttccctcgttgtccacgatctggatccgcagatccttttctatggaggtggctaccagagacagtcggttgctgttatcctttgcagcttccagaattggatttacttcctgatcaaaaaacgtattatcttttaaaaatgccttcagatcattgccgatctgaccatccggtgagaccgtctcttctgcctgatcgccattttccgccgtagatgcactgtcacccgctccggcattctgagtgccggatgccggcggtccggaagctgccgtaaactgttccctgttgacatacatgaccagcagtgccaccagcaggatcaccgccatggaggccagaatcgccattttccgcagcttagagtccatttgctacctctaccagatattttccgtagttcgtcttaagcagcggctctgccagagcaagcagctgctctttgtcaatgaatcctcgcttgaaagcgatctcttcaatacaggaaatgtacagaccctgtctcttctggaaagccgccacaaaatctgccgcatccagaagggcatcatgattgccggtatccagccatgcaaagcctcttcccagtgtctctacctgtaaactgcctctgttcaggtactcgttgttgatgctggtgatctcaatctctcctcttgcagagggctttacattctttgcgatctccactacagcattgtcatagaaatacagtccgggaaccgcataattgctcttgggatgctccggcttctcctcgatggaaagtgccttgccgttctcatcaaattccactacaccgtattctctgggatcacgcacataatagccgaaaatagttgcgcccttttctctggcagctactctgcgcaatactgcggaaaagctctgtccgtagaaaatattatctcccagtaccagtgccactctgtcattaccgatgaaatccgcaccgatgataaaggcatctgccagcccgcggggctgatcctgcaccgcatattccaggtgcatgcccagctggctgccgtctcccagcaattcctgaaataccggaaggtctcttggggtggagatgatcaatacctctctgatatctgccagcatcagtgttgacaggggataatagatcatgggtttatcgtacaccggcatgatctgcttggaaatcgcttttgtcaggggatacagtctggttccggaacctcccgccagtataattcctttcatttcgtcctccgatccgcccttttcgggcttctttttacttgttttttaacacaccgaatgggaacgacgttcatcgttcccatttaacaggtattctttacttttcttcgtacatctcattgtagtacttctggtaatcaccgctggtcacattattcatccagtcttcatgctcgaagtaccaggcgatggtcttgcggatgccttccttgaacatggtctcgggataccagccgatctctgccttgatcttgtccggtgcaatggcatatcttctgtcatgtcccttacgatcctccacgtaagtgatcaggtcgttgttaatatgtgccttgcggggatcggaatccggaagcatctcctgcagagtctcaatgataatgtggatgatctcgatattctgcttctcattatgtccgcccacattgtaggtttcgaacagtcttccctgttcctgtaccatatcgatagccttagcatggtcttccacatacagccagtcacggacgttcttaccgtcaccgtagaccggaagctttttgccatgcaatgcattattgataatcagagggatcagcttctcagggaactggaaaggaccgtaattgttggagcagttggtaatgttggcagggaaatgataggtatccatatatgccttcaccagcatgtccgagcttgccttacttgcggagtaagggctgtggggatcatacggagtggtctcatagaagaatgcattgtcatcatcgggaagagatccgtagacctcatctgtagatacatgcaggaacttcttgccttctttgaagctgccatcgggaagctcccaggctgccttggcacagttcagcatcactgcagtacccaggacattggtctgtacgaagatctccgggttgcggatacttctgtctacatggctttctgccgcaaaatgtaccacacggtcgatatcattctctgcgaaaattttgctgatggcatccttgtcacagatattagccttgacaaaggtgtagttctcacgcttctccacgtccttgagattctcaagattgcctgcataggtcagtgcatccacgttgatgatacggatttcattatcgtattttttaaacatgtaatgaatatagttggaaccgataaaaccggcccctcctgttaccagataagttctcattttttctccgttctgcgcacagcgcacattttttgttatagatagggatattttaccataaaacaagcaggatatcaacacggctcctccgcacttcgtgctctcggatccgtgacacccattcgcattccgggctatcgctattcttagcgccgggtattaacacggctcctccgcacttcgtgctctcggacccgtgacacacattcgcattccggactatcgtcattcttagcgccgggtattaacacggctcctccgc

SEQ ID NO: 5509 - DNA, 13696 bp, Unknown
  gut microbiota DNA sequence
attggcataaatacaagcgcctgaccggcctcatgattggcatagttggttgcataatactgcattaacggtgctgcgattgccgcatataccgccactgttccatgtacacccattgtccataacagactggcaatgattacgataataataattccgggaacacttgtcagtgctgccagcggcattcccagcagaccggtaataagtaccggaagcgctgtctgtgtcaatgccacacagccataccccaataccgtccagataatcgcatttactaccagaggaatcagtgaacggaaggtatcctgcaggaattccggaaccgcatccggcatcttgataaccagatgatgcttttcaaaaaaatgtgtcaattgtacgctggtcagcgctacaataatggctacaaacatacccttcgcatcaagcgccatggtatccattccggtaaaagttccgcccgcttccccggccagatctactgttttgatcggcgcggctgcaatcaaaaagatcagaatcgaattcagtcctgccatcagcgcctgcatttttaaagactttgcataagaataggcaatggtaaaagctacatacagcgaaataaatcccatagacaccttatatggcaccataagtgcactatagattccggaactctgatcgataataccgatcgtctgtaatatgactgccagtaattggaataccgctcccaacaatattacacccattaccatcatcataccagaggaaatcgcctgtattcccttatttcccactactttttcccctgcttttttcacccattgcatgggcttgctttcataaaaatttgccatacctttactccttccctgttgaaataccttctttttacgttttgcagacttattgatacaagtcttccacctgcttcataatattggccacattaccgattgcataatcatatgccggaatcaccgcaataggtttttgcgtattttgctcgatctcaccctttttataagatacctgcggtcccaacagaatgacatcataatttttgtacacatcttcatatgctgacattcccactgcttcgatcttcagagaaattccctgttcctctgcatatttttccatcttacgcatcagaattccggtagacatcccacctgcgcagatcaataatacttttcgttccatacgattcctccttgcttttccctacttttgatataaaacgatcatttcccggatcaaatccagtgccagtgcacttcccatcagatgatcctgcgcatgacacaataaaatacttacctgcgtcacttctccggacgcatccattttcaacagttctctgtgagattcatgtgctgtttgaagactctcttctgcctccttcagaagtttctctgcgtcttcgaaatttccttttttcgcctcctgcagtgcagcgaaggcatctgatcttgcctgtccggaattggctatgatcatcatcgcgatttcttccagcttttcctgcatattttcttccattttgtaacctcctgttcttagagctgatatatgatcgtcagaatatttgctatctcatcatcattgataatgacatgaaatgtcttttccaacggttttactattttaagcagttttttaaattccttgtcatattgaagcaatattgctgcttttctgggatttgtggcaacttcctgttttgcaagcagcctgtcaatacaacaggaaatatgaatcagcaagccggcttccgcatccaaagataactccataaacgccgaattgatttctttcataatatccggcagtatttttctcagcttttcaatatcggtgtgtgtcagctgttctcccagatatgcaaacattgcatcataatctatctttgcttttgcctctttttccagtcggagcaatcttggaagactctcttttctggctccgaatacttcactgatcggcaggaagggaattgcaaacattcccggatcataggttcccacaatgcactgaaccactcccgtggtcatcaggtgtttcaggttatcacgcaacagttctttgtctgtaaccgacatcgggatcacctctgtatcttccaactgtccatatttttcgatgtaacgtttcagttcctctgccccgcctttcccggtggtacagagcgttacaatgtattttctgtaacagtccagaccatctatactctccactgtgctttgcaatatcttgtcgggatcattttctgtaagggtccgccttgcaagctcaattccaagtgtagttaccggaactctgacctgccggattggaatttccagttcattttctatctccagaagcatttctcccaaaaaactactatcatagatgaccagaattcccttgccctgctgcacttttttcagaaaatttctcagtgtcccatatacctctgcggaggctctctcactggtaatttcataagaaaaaatattatccagctttgtcatgttactgaccgtctgtgctatggaggaagctattcccacaccgtagaatgcaaatatcaataccggtcttgcattttccgtcttttcctcattttgatagcacaaaaacattgtgagaagtaagatttcttccatggacaattccactgcgtattctgctttgatctgttctgcaagttcttcgcttagcagatattctgctctgtgatataccagtatttctgcaatactttctttgtccggagcacttttttctctttttcccgtaatcactgcattgagatgaaggcacagcccatatagtacagacggagagaaattacgtttcagctgttcctttgccttttgcaaaaatgcttccacaatattgatcagcttttcttccaccaggatttccaactgttttttatccgtcacatcctgtatcagggctttccgatatttatcaaaagtcctttctacctccatgctcagcaaaaggttgatctcttcctcctctattcctgtctcctttaatgctgctgccttccggctgattctgtcatatagtgttccgtcttccggcctgctgacccggatttcttttccgctgaacgtgaatctctgttcaaaatcgatcaactcctctgcttctctccggtactttaacatgcctttgcgcacattattggaaaaatcgctgataaataatgaaatatctcctgtttttccatattctctcacataggcattggcgcagccgatcttgatatctcctttgagctgataataattcgcttcacactcatagaaaagcagacatgtcatcagatctcctctgacgatcagcggtctctgtatccgcacagcctctttggaaaaaaggtgttttatcatttccatccgttccctcagcggccgctccgataatgtcggcagctgtaactgtactgaaaattctgccaggaactcatccgacagctgttctttgtccgtgcagcttaccgccaccgcatattttcgggatggtgactgcagatactccagcaccctttttctggctctcggacttaaaaactgaatattatcgaaaaatacaaagccctgctccgactgtttccagctgtcatccgactcagcactgacttctccgcctgctgcataatcgtggcaatcgatgtgaagaaacggagtattttccggcagaattttctgttccaccgcaaaacgatacattctttgtgccaagcggctcttaccggttccacgggctcccaccaataacgtattgagacttcgttgtggatagagtactgctgcctttgccaactgaatgatctgcctcagacttccgtccgctccgatcaaatcagaaaagcattcttccaatgtgctttcttctcttccaaccttatagagaaccggtctgccgttacatttttgtatcctgccttcctgtaccagaagattcagtatgctgcttacattcgttcgctgcagttccatggcatccgctatgtatgcagtggatattcctctgtctgccttttcatctgcatggagtctgataaagtcatataccttttctttgtttgatttcatagggtgcatctccttttcaacgcttgcatctatgtgtatatccaaaggaaattatacactctatacaatatgcaatctatcattttccgaacatttcgtcaaaagaagttgtgtatctgtttttgtcataaaaaatatatttattcattgattttcatgatttttattatgtttttttggtacttttttacagaaccataaaaagaatccggatgaaggatcactcggattctttttagtgtatatgattttattttgtttttcagaagtgtataagttttttgttatggtgtcgtgaattctaccggctgcgcatcttttctgtattcctcccatgcctgcagatactcctcctcagtactctccacacgctgtcccaggctgtccagacgataataggttgcattgccgttctcgtcaaagctttctgtattggaaccggtcagtaccagctgtccggtcgcagtatcaagattgtacacttcgatgctgtgcccggaggtcacgtagaacccagacattccgacgcagatcggatatgcggttccctcacttaggagcttgccgatctgcaccggtgttgcatcctctccgataccgtagacatcacagtacatggcataggtatgctctccgtcctgataaattccgtccgataataacaacaaagtcgtatcaccaagctttacctgcgcatacgctgcatcttcctttcccgttacaaaaccggcggttgcaccgtcctgcatattcatccatgtcgtagtattaccattctgcattggaatccagtcggcagaattttccgctgcctgtttctcctgctctgccgcacttgcttccttcaccgcctctgcccgttctctctgtttatccagtgcctcctgcaatgcggcgtccgtctcctgttgtgcattgacttcgtctgcgcttgcgacattcccggcatccacaccattttcgctctttccggcctcattcgtcagcaggattgtggttgtcgtcccctgctttggattcgtcagaaaacataccgctacgatcacacagaccaccacagcggcaagcaccacccaaaaggtcggcttcttataattcaatatctctttcactctctttttcaccccaacttctccaaaggccaacgggcataccgtcaccagccgcctttgtatactacaggaaagcagtgcataggaatagtcttttcgctcctgaggattcagcttcttcaccgcgctctcatcgcatgccagttccagatcgctgcagaacaggatgtacgctgcccagacaaaaggattgaaccaatgaatcgctaagatcagaaatccaagcggcttccaccactggtcgccccgtttcagatgcgcctgctcatgagcgatgacgtaagggtactgcgcttcatccatactggaggacagatagatcttcggcttatgcagtcccaggataaaaggagattttacctcatcacagatccacaggttctccctcagccacatagcttccgctacctgcctccgcaccctgacgtaactgtataccgcataacctgtaaaaaggatcacacctgccagccagagaatggtgaatatggataatagccgttccgttatcctccatgctcctgttccaaatgctcccattccacttccggtaattccgaacactccgcccatgccggatccggttgcgcccatgctgccgtctaaagctgcctgggaaatattgtcggaaaaattagttccgttttgcagcgtatcagcccggaacgcattccctgccggactgcctatcatatttccgtacaaatagcccgacaatatcggcagcttcggcatcagactgaaccggctctccggcacaaaagggcacaccagccgcagtcccacaagcccccacagcacaagattcacccacttcggtgcccgtttcagcaagcgtctgagcaccattacgacagggatcatccatgtcgcggcaatactcatctgtaatacacccgaaaatatgcggctcatccttttcccccttctgcctcatcgatcatcctacggatcttcgcagcttcttctgcggtcagcgcacgatctttcgtaaatgcggcaaggaacgcaggcaatgacccctcaaaggtgtcttccacaaactgtctgctctgcatcgcatagaactcatccctggagatcagggaagtcaccgttccgttgtcattgcgaaacagccccttatcgcacagtctgcgcagcacattatgcgccgtggtgcgcttccagtgaaatgcttcctccgtcagcttcaccagctccgaagaagacaccggttcgtgctcccagatgatatccgcataccgcgcctcgaccacacctaactgaatctctgccatgttgtttcctcctattactgttttcctgattacatagatttcttttgatcttcttattttacttttgcaaaagtagagagaccacatgttgtggtctaactacagactacaacatgtggtctctattgtcaagtatcttttctattgcaaatgatatgtctgtggccatcctgcccgttttccgcactcgatctcccggccgatcctttcaaagatatattggtttttgtgctccagatcgatcatctgcagcatttcctcatccgtcagctcacgctccggctcatagaacctcgcatcactgatgcaataggcaagctcctgtccatcatattcttccggatcagttatgaccttaattgttgactctgtataggcattttccacttcatacttttccgtccattgctcatagcggctctgttcctctgctgtcaggttacgactgtctgttccccatacatctactggtgcagaagccagtaaggcatataattcatcaatctccgcatccgtcatctgttcatatctgtcaaaataggaaacctcggaatacttctgctgccatagtttttcccgaaggctgtagtccagtttatgcagatactctataatctccagccactcttcctctgtgagcacagtatccggcagatagatcagacaaccgtattcttctccgggagtacttcggactgccacaccagtgccggaatagttctcgtcttcggctagttcccggatctgtcccgccggatatttgccgtccgcttcgtattctcttgtcagctgctcataaatgctccgttctctggctgtcaactctctactgaattctgctgtgacattgccctgctccgctaccatctccaaatgccccaactcctcggtaccaatgtctgtcatgcgttccgccatgtacctacggtaaccaacgattccgacggcagcggcagagacagctgtggcggaaagtattactaccgccaacaggatgcctgctacccggggaaagcttttgactctcctgcctgcaggactctcctgcgctgcctgttgtctgatctgtgcataggctgcatccgccctatccagtacgatctgtggaagttctatctctatttcattcatcggtctcattttcttccgcctccttcctctgtctccgcataatatctcgccaactgctcccgccctctggcgagccttgtgcgcaccgtactgtcgggcagctgcagtaattttccgatctctgctgtccgcagtccttccgcatagaacagtactacgatcaggcgatatttttcatccagtccccacagggcttccttccattccaaatttgcctctgcctccactgtatccttcgctgcctgttccggcagttcttccacacagatcatccgtctccctgagcgcaggatatccttgcatttattgatcagaatacggatcatccaggtcttgaaataccggtttttctgtaatgtatctattttctcccaaacggtgagaatcgtctcctgtatggcatccgcaatatccgcatcctgcggtaggatcgcgctggctgtccggtacatgtccttctcatgaagctgcatcagctccgtgaaagcatctggatcccgtttttttgccctgcgcaccaattgttctatctctcccatgtgcctcgtcctttcttcctcataagtatacgtcttatgactattagacggaagagtctgtgaaaatgtcccagggataaataacaaaatctaatttttaccttagaaaaaacttttcagcctattccgggtcaaagttttattttgctatatatagtccgtttaattttctttttattcctctgactactaaatatggtattgtgcacttttttgttgtggaattgtatacgaaatattagaattgaaacgcactactctgcatgatacacttcttgagaagcaaccgtgttgcaaggtggtagcctcccggcttatttttctaactaagaagggagggcgcacgaagtccgggggacttcggccttgcgcggaccgaagcggagcggagaaggtgctaatggatatgtatgaagtattaaacctgttgtttttaggtggtacatttctcattgcgctgcttgcctacatagacagtaggataaacaagcgaaaataaataaacctaccttgtcacttggccagtacaggtaggtttactaaacaattaccgggaggctaaccacttgtgggcggttgcttctctttatgtcttgattataatatctttctttctttcaagccttagttttaaaaattattttctcaccacttacggtctctgtcccatagcgccttccagtgtcagggtctcaccgctcatatacttgaagtcgggagaagccagctgtacgcagacgcggccgatctccttttccacatcaccgtaatgtcccatgggaggcatcttgacatttgccttgaaagcatcgggatatgcctgctcgaatttctccagctgcgcggtccatgccagaggacatacaacgttgacattgatgccatcgggaccccactcggtagctgcgactctggtcagtccgcggataccttccttggctgccgcataagcgcactgtccgaaattaccgaagagacctgctccggaggcaaagttaataacagaacccttggtctccttcagataaggatagcaagccttcatatagtagaatgctgcatacagaccggaatataccgccagatcaaactgctcggtggtatgatctgcgatggttacgccagaagcggaagcctgcgcattgttgatcagtacatcgatccttccgaaagtgtcaatcgcctgcttcaccacattctgtacgatcgcttcattgtccgaaccggcgctgacatctgcctgtacgggaagtaccttgataccgtactttgcctccagttcttccttcgcatccgtcagcttctgtacattacgtccggtcagcaccagattggcaccctcttttgcataagcggtggcgattccataaccgatggatccgcactctccgttactcaataccgctcttcctccgcctgtgatgattgctgtctttcctgttaaaaatcccataaataacctccctttccaatctgacgatctgctattctaaaatataccatgccttccggaacatatgtcattgatttctatttatgatacaagtccatgtaagcacttacatttattatagcacacttgtcagacttttccacaacttttttcacatattcagtatttattcccactacttgagaaaaatactcaccaatatccccacgattccgccaataatcagcgtagccggcacaccgtaagcatctttttttgccagccgatcccactcaatccgcgaaggtgtcatcttcgtatggcacatgctctgatagcagagataaatatgtctccaacgacacagataccccaccagattatagattccatccaataatattcccactgccagtacaaacaacattgtaattctcccccggtagaagtctgccagcgctcctgctatcagaatcaataccggatagccataacgatccaaatatgccagaatgtacattactgtcgtagagcaactgtgctccggcctcttctcaacgatcactgctgtgcacccccagccgctctgcctcttgtaaaaaactgacttcgatctctccgggcgtatgctccgccagatccggcacggaaaaaagctgcggcaccgctctgttctcttcgccatgaagcaatgtcttcagttccagttccaggatctcatcatcgatctgtttccagcggaggttctcctcttccgtcagatcatccagtccgaagtgtgtaagaatcgttcccataatcttactttcgatctccagataattggtcagatagattttcactgggcgaatgatatccgaaatatatccctcgctggcatcatggagcagacaggccagctgctgcctctccgaccaccctctggctttcgcttccgtagcacagttgagcgaatgctgtcccaccgaataaaaataggtcagctgtccaccgccccggcacagtaagctcagcgcatgagcgatatcctcaatatatacatcccccggtgtcatctgcatgggatcaaactttctgccagaatatgtagtcatggtgttcataagtgtcgctccttatttctccgcgcggatcaggttcttatagaatctgacagctccgggcagacaattatactcaatattttcgttcaatccatgcattcccttcatctgctccggtccatagatcaccggtgcaaaacggatacagctcttacagataggctgatagaactgtgcatctgtcgcgcctgtcataacataagggctggaaggcagtcccgggaaagtatctgcgatggtctgctccaccagatgaaatgcttctccgtgaatatccacaggcggcgtataatcattggcatgcagcacttcggtctccagaccgtatttgtctgccacttttttgatgatctccaggctctctttctctccctgatggggaataaaacgcatgttggcacccacataagcctcctggggcagcacattataggcatcggatcccttctgtaccgtaaacgccatcgtggtctttaacatcgctcctgcctgtgcactgagcgatggcatcaccgcttttaataaggggccaaacagccacagatttccaaataccagtttcattccaaacccggcataaggcgccagtgctgtgaacatggcggatacctccggcagcatctttttccggaacggtgaatgcgtctccacttcattgacgaatgccgacaatctggcgataggggttccctttaccggtgtgctggcatggccgccgttgctccttgcggtaaatttcacatccgccttgcctttttcaaatactcccaccatggcaaaattaccgtggattccaccgatgggctccgtgatgataccaccgccctcatcacataccaggaacagttcaatccccctgcgctgcagctccgctacgatcttcggtgcaccgtccccaccccactcttccgtacaggaacttgccagatagacatcagtgggtggtacgaagccctctgccaacaattcttccactgcctggaaaaatgccatcacagagcatttggtatcggacgcgcctcgcccccatacctttccttccgcaatatctccggaaaaaggtgcatggatccactcaccctccgccggcactacgtcctggtggctcatgagcaggatcggcttctcagagctttttcccttccagtaaaataacaggttgccgtcaatctctgtcttttccagtttctcatgtaccaaaggaaacaattcctccaacactttgtggaaccccaggaacttctccacctctgccacattggcatgggaggtggtatcatattggatcattttcgccagtttctgtgccagtgccagggattcctcctccggttcctctgccacgtaggaagaagtcttcccaggcatcagtaaggtacggatcaccgcgatcagtaacaacaatataattgcaatgatcactgccagtaaaatgaaacctatatatttcatatttcctcttttccgggcgcttccttctattactcacataacctgacaggtttggccctttttccattcatctgttttctgttcgtatagccttctgactattcatccccggtatttgccctgtcgggatcagcttttgtctgttccgggctctgcatattctttttccggaacatcagatatgccacaccgatggcaatggcaccggacggaacgatcataaagctggtggagccgatcagtgacggcaccagaataaacaacagactcataaggatcagcggcaatgcagcgatcttcatatttttccggtaatatttgtacgccatggcaccgaacagcgccggaaccacattttcaaaggccggctgcaacacctcactctgcaaaacgggctgcagcggcaccatcaacaacacgcccagtgccagaaccaggatcgtcaccagagaagaggtagcaatagagattgtggaaatgatctcattctccggggttcctgtcttcgctcctaccatgtctctcgcattgaccgcacaggggatcttcatattgatcaggttaccggtgataaatgccaggtatccgccgccggctccaagcatcggtgtgtagatcaaaaactccgcgatgctgctgaccagccatacgattcccacagagagaaaccccttgccgacagcccccagatccggatacgcacctaaaagcttaccgatgagaaacggtgctcccaccaacatcaccagcgtaatgatactcacagtccgtccgatgatatgtgttttcttcgtataggcctgccaggtatccgaagtctgcccggtctgctcctttgttgcttctacattattcagttccttattatctattgtcatgctatccgttttcatattaagctccattccgcagacgattccttccgttggaggaattgcgaatcaaattttaaggttgtcacgtcagcctttacagcaatcccaccagtacggctgctgtcatgccgatgatcatgcttccggcaatggaaaagctgtccacccaggcttttccttttttctcaatgaggtatacaaatcctgccatcaccagtgccgataccgccattaccactaacggaatgtaatctccgtgaaacgtaaacaatccgttctccgatacaaaaccaccgagatatcttccgatgtaggtgctgaccagtccgatgaacatggcagtcattgccatatctccgaagcccggcttgccggattttttattcgaggtcagcttctgtgtatattttttattcaggaaaatagacaatgccatgccccaaataatgcagatgctcatgagcagtgcgatcgtggaaaatgcctgcggtgtcatttccgcagcagacaatgtatccattcccacctgctccgctgctgcctgtgccacctgggtctcataatgcagggcaccgatcacggacaatcgaagccacggccagggcgttcccagactccccgacagggcgatgacacctaacagaatccccacactgggcaatagggaaaaggtcgcactggaga

SEQ ID NO: 5510 - DNA, 7611 bp, Unknown
  gut microbiota DNA sequence
tacccaacaatatctttaattaagggaaacgggaaagaaccttccggatatgatgatgcttagtcgtatagcagatatacttcaggtatcgtgtgacgaattacataatccggaaaagacattggagaagctggacaatcctgaatttcaaaaaaggaatgtggaggagggagataaggagaatacggataacacaggggaaaatgaggaatcagaacctgaaccccaaaagaaaaactatggacgaattgtaagaatgtcctttttgattggaatattggcgatagctgcaggaatgtttctgatatatatggcaggacatagaaaacctgcttttcagcagataggaacaaggtatattgatgatccgttatggggaagggtatatgaaattgcgtatgtagtagatggtgaaatgacgaatgatagtattaatgtgtatttggatgaagtgagagctacattgaatcaagaagtaatagataccaatattgtaaagacaacttattatgataataaggaagacgctacagcatggaaggaaacagatgtaggaggatatgtatttctgagtggagaatgaaaggatcggataggatatgaataaaggtatatttgccatattttttgtagtagctgttttaagtatttcattcccggttaatgcgcaggaaactacacagtgggtaggagagggatatacatcagaaggtatatattatgaagtatatgttgcagaagatttggcggaaaacgacattgtcctttgcggagcaagtgttagtgtgacgagggaagtgatatattcaggggttgtaaaaccacagaaagaaatttcatggagagaaaaaattaatggaagctattactcaggggttcttacaataagtaaatattcatatactacaagtcaaacagtagctacgtatactggtgtactttataaagaatagtttaagttaaagagtaggttgcatctatagaaaaattacggatgcaacctactctttttgctatgaaatcttttattaagggacttgagcaaaaggaaattaatacgattaatgggaagtttccatctgctcaattgagttagagagataatttgtggtaaatatgaattatcaagcatgtttgatcgacaagtaaaagaaatattttagaaaatggaggaaggtaagaaaaaacaagtacaatagagcagacggatgtgcagatattaagaatatggtttataatacacatttagcaaattaggaggcggagcaactgcaagggtagacatctctgtaatcgaacagccaacggcggcatttttggatgtaagaggtgtacacgaggtttctgtgacacaattcccttctggatactggatggatattacaagatggaccagataatcaattgatgaccaacggaatggacaaaacaggagatgctatgcggagaataaaaacctatcttataatagtaaacttgatctttctgacaggctgtgccaacaaggcaatgccggacacttatgtagaaaactatgactatcaatacagacaatggtcggatagcatagcatttcctaaagtccagcagggaagcgataacatcgtatatatatacaagaatggttttatctattacatggaagaaggtaatgatgttttagttccgctgtgtaataaggtggactgcttacatgacagagagacggatcagcagaaaataaaagagtgtaatgcctctgtcgatttggaggaactggcaaatattaatccggataaagatatcgcaattgcaaaatgcggagattatctttattgtattccgttgagctgttacgaaacggatgaaaggatattataccgctatgctctggacggaacagcgaaagatgttgtgtacaaatgggatggaaaatccagcattattgtgaactggatcatacataggaacaacttatattatgcggaaaaaaggtattatgaggaagatgaagagataaaggttgaatgtacgataaaacggttatcattaaataccttttttcatagaccggagaccgtctatactgcggaggagaatctgagagtgcttacttggggaaatcttcaggcttatggaaattatgtgtattttgaaattatttctatgctgcccaaagagggagattcccagaaggaagaaaataatggttacgattacgacaggttatataataaaacctttgtatatgatatacaggcggacaaaattgaggaattacagattccggatatgccgaaatcggtgcatattttaggggtacaattctggcaggatcagatcattctggatccctatgatgatgaaaaaagaggtgatgaaccgatgccggtatatattgctgatctggatggatccaatctgaaggtgttattggaagatgtacctcaggcaggttattttttgagtgatggcgaatatttatatttttttgatgactggatggaggacattgatgattggcttcggaatccgggaaaatatgttgtgtatgacaaggacatgcagatcgtagatacctttatgacaccattaaatgaaaacgggagagcacagagatttccggtaggtgacagaaacaggatgtactttacttatgagaaagaagacggtacatggggagtaaagtgctgggagaaaaaaattggagagtaccgggggaaaacgattacactgacggagatcatggatcgttaaaggggcaatttgcatgaggttgacaggatatgaaataaaaaagctgatgacgcagattccgctatggattgcatttattggactttttgtggggaatctattcctgctttttatgattcagaaaaaagaagcggcctatgtctatgtatatcagcaaaaagatcaatatattgcgttttgtgaaggaaatgaacaggcggacgagttaggcttctatgaggctgatctggaggaacagaaacggtatctggactcttatcgggaatttatttcacagatgcaggacaggtcaaaggccatggaaaatgtgatctccgaaggaaatcattatctgacggataatatccgcaagacttgtcacgatttttcggcagttgcgaaagcttctgtgacagtggacaactgttttggaataaaggcattggcggagtatcagtacggtattttctttgctatttcttttcagggagtattgacgtggtatttattattttatgagagaaatagaaagctttttattcttattaaaggatgtaaaaacggacatcatgtaacggcgtattccaagttgtttctgctattatcggggggagtactgtataccttgttacaggaaaccagtgttgttttgttcctgaaatggatgtatggatatggcaatatgaacagacccgtacagtcggtttctcttttccgcaactgcccgtatgtattaagcgtagggcaggccataggactgcttatttttcttcgtgtgggactgtccctgctgacagggtctgttctttttatggcgggcatgctggtgaaatcggaaacgggagctttcattgtcatgatgcttcctatgatatgcgaatatgcagcgtaccatttcattgctgtcacgggaaccctgcgggtatgtaagattataaatccttttttctattgggatatgagacaggcgctgggaagctatgttaatttcaattttgggggacatgccataggaaaaaatgaagttgcggtcagtgtcttcctgattatttatgtggtatgctgtgccagcggaataaaccttttccatagaacctgccagatcagtgacagtggccggctggaaacgctgattatcaggttacgaaaaaaatggagcgtactagggcatagaaggaatcttgtatattatgaattttataaactattgatccagcagaaaaaaggaattgtgatcataattgccctgtggcttatgatgcagaatgtttttgctgtatatgcgccacaatactatgcgacggcgaaagatgccgcctaccatatgtacctgaaaaatctttccggacagctgacggaggagaccctggagcaggtggaaaacgaaaaaaggcggttggagcagttacaggagcccagtcgggaatcagctgaaatgtcagggacggatgaaatagatcggttactgatgcagttggaatggcagcgtttgcatgagggctttcaggagctgacagatcagatccggggactatcagaaaaagagggtaaactttcggaaaaatatttactggatgaaaaagcttacctggatatatggggaaatgttacccatgaagtgcttacctggtacgtaggtgcggttctgttgctgtttttactgggagggatttacggagcaggagaggagagcaacctgataccgctgatccgttctacccggagaggaagagaagctctggagagaagtaaggatctggcagcgatcatatgcgtagtatttgtctatctggtaatggctgcaccattgtttttaaagctgcagaatattgatggatttgccacagcagggcagaaaatgtgtaatctggtaaattggaactgcgaaagcagcataacactgggatggtatgagactttcgtatttgtcctcaaattcggaagctttctggcagtaggaatcctggggcggacattgtacaaaaagttgaaacagagaattccggcactgctgatgggaagcggcatattgattattgttgtattgctgcttttgtattttaaacgaagcagccacatgattctgttgaatatgatataaagggtacattatggaattaaaaataaaagatctatacaaaagctatgatcatgggaaaacgtatgcaataaatgacgtatctgcagattttacaccggggatatatgggattctgggtcccaacggcgcagggaaaagtacaatgtttggtatgctgacggataatttgcgcccggataagggaagcataacggcagacggagaagatatttataagatgggagcggattaccgggcgaagatcgggtatatgccacagcagcagagtctttatgaagcatttactgcagaaaagttcctttggtatatggctgctttaaaaggaatgaacagaaaagatgccagagaacagattgaaaatttattagaggtcgtcaatctgaaagaggaacggtataaaaagctgaaatacttttcaggtggtatgaaacagagaatcctgctggcacaggcgctattaaatgatccggagatattgattctggatgaaccaacggctgggatggatccggaggaaagaatccggatacgaaattttatcagtggctgtgcaaaggataagattgtccttttagccacacatgtagtagcggatgtggaaaacatggccagagagatactgctgataaagaatgggaagattgtccggagggatactccgcagaaatttttggctgaattggaacataaagtttataatgtgttggttacagagagggaaggggaagaataccagaacagtggagccaggatcataagtattacattaacagaaaaaggacatcgactgaggatcatcagtgccgatgccttgaaaacaggtaatgtggaagaagtttatccctgcttggaagatgtatatttatattggatagatagagaatgatctacggtagttgtaaaacaactgatacatttcctttaaggagaagttctaaaattcaatagcagacagacttgtcttaaaactgccagaaaatggaatgatgctgcgataataaaaattgtatgaaaatctagtactcagcggtcagtcagcatggtaaactcaaagatattttcaatctctttttctgtcaggtacagcgcatccagataagattggtgacaacgaaagacatggagaaaatggaaacggttattgctgtaactacttgagcaaaaggaaattaatacgattaatgggaagtttccaaatgctcaattgtatttctaaagaaaatctgttatatgttaaggcatcaaacatatttgtgggttttgaatttagaggtaactcaagtgcagccgcatatgcaactgtttcttacgatggaagataagttgtaaaaatttgggattaagtgcataataaagcatttaatcccaagttatatgagggaaattgtatgttaataaaagtgattaagaagcaaaccatttttttattaaaacaaaaagaagcaagtctgacatttatattacttctggcggtagtgctggggaattatataacgaatgttctcacatttagaggtactgatatttcacaaatgtatcagccaatgaagttattagcgctcagcctgaataaagtatattttagtgcaaacattcaattattaattgtgatgatttaccctatcttggttgctgtacctgctggtttttcttatactaaagaacagcagacaaaagaagaagtatacatgatttatcgtttagggaaaaatcgttatttacaaagtaaattatgggcatctttttttacaacaacgatagtttttacggttccatttatgctggaaatactaatgaatatgctatcttttcccatgaatgcaataagagatttatcaaatttaagcatttacaatacagattatgccacaatggttcataattacataggcagcgcaatctatatagcatcccctggtttgtatgcaattcttacaacactattttttggtgtcgtatcaggaatccttggtacgcttcccgtagcaatctcatttgttttgacggttaaatatcgcacgttgctgatcttaccgacttttgttctattgaatgcgactacatatcttaatattctggatagaaataagagttcattaagctggtataagtatttgcttctttttgatgatacccctaaaaatattatcgttccactgatgggggtaggaattataataataacaatattcggtttttacctttatggaaggaataaggataaatggtaatatgcatcatgaaaaaagagtagtaattataattggaatactttccggaatttgcatatcgcttggttttatcagaccgtttgacggagtaataacgctgccagaactggtattacaattaagtggatccagaggtgaactcagcatgagttgcaatttagtggagttaattggatttatgcttcgtatgatgccaaactatattatgatattggtttttgggaataagctgtatggtcatttctgcacagccagtatctatgtgtttagtcggtgcccgaatcgaatgaaatggtatggaaaggaaatgttacagttaattaatttcatatgcatatttgaactggtatttctaagcacaaccgctattgcttctgtattgcgatatcaggtgatttttagcgtaggtggatttattttgttgggatgccatgctctgatttttatgttatggaattttactctggtactgttggttaatttacttgcgatcaatattggaagcagtgctgcattcacattggttatggttgtgcaaatgacttgtaccgcagcacattgtta

SEQ ID NO: 5511 - DNA, 3924 bp, Unknown
  gut microbiota DNA sequence
atattctttgaatttagttacttcgatattgattccggctctattctgtatagttactgtattgatgggaggacaattgatacagaagaaggatttactggcagaggacatggaaatggagacaatttgatatgaaattaattgcaaacaatattcataaaaaaataaagggtaagacaatactcaatgacatcagtctggaaatggaaacaggaaatatatatggattttggggtagaaatggatctggaaaaaccatgttgtttcgggcattatcgggtctgatgaagattgattcaggtaatatttattggaatgataaagaactgcacaaagactttgctgttttaccaagtcaggggattgttttggagcatgccggcttgtatcccaataagacaggagtggaaaatttattatatcttgcgcagttaaagggagtgattggtaagcgggaagtagaagaagcaatacaacgggttggacttgacccggctgacaaaagggtatttggtaaatactcaatgggaatgaagcagagactggtgattgcacaggccatcatggagaagccagatgttatcatgctggatgagcctacaaacggactggatgaagcaggaataaaggaaataagacaattaattgaacaggaaaaagaaagaggagccttaattcttttagccagtcataatcaggaggatatgaagatattggcagaccaggtatataaaattgcagatggccgcattgaaagaaaggggacagaactgtgaaatgcaaatggggttcatgctttatcttattaattgttatagtgataactgtatttggtatatttgaaaaaagaacgtatactaatatagcagaagataagtcatatttagatgagctttacgtagcacagcttccagaaaatatatgtcttgaagagacagagaatttatcggtaaatttaccgcaggtcccagttattatacgggtatctgtactgggagatgtggagcatataggaggaacaagcaggcaactggtcaaagtggaagatgtttataagggaacagagcctgcggtgggacaagatatatatcttacttgcagccgttggtcacttagtttatattcagagccatattccatcgaaagaggatttgttaatataatggaagtgggaggggaatatttagtttttatcgaaaatcaggtagatggtcttggagagaagattcctgtatatcaggtgtatgtggaaaatgcattcacaccaatattttcatatcaagagcatgaaaataatatttgtgaaacaggtggtgaatccacatatgtaaaatataatcaagtttgtgaaaatgaattttttgctacaacccagaaaggaatggatgcgttagttggcctaaaaaaagaaatgatagaaaaatataatgaaaagtgaaaactatagtttgatgaatctggagaaactgaatattcaggaagaaatgaactatagctgtgataccatgcttcatatctatccgactgccaatatggactattccgtattgactgacagagaaaagagcattcttgacaaggtgattacgaagtttagtgcttacagagcaaaagatattgtagagtatatgcataaggaaaaggcatatactgagacaagaccgggagaaatcattctgtttagtctggcaaaagaaataagaaaattttaattgattcccatgtgcatttgttcatggaaattttatgcagcagtatgatcattacaggttgggggattgtaatatgaagacaagcaaaaaatattggcagatgaaaagtctgaccggagtgattttagtatgtatatttcttacagcctgcggcggagaaacgcaggaagctgagaggaaaagcaatgtgcaggaaaatgaaacggtaagtatcactaccattgaacaaacagccgaacagtcgcaggagacaacgcaggaagcggaagagtttgtgcagacagatactatcctggaaaatttgaaggggaatagagaaccacagacgattttgcaggaactgtctgaacttccattaagtatagaagagctgagggcttatccggtatatgtgttaagtactcaattcgaggagtgtagtggggtagaactgctggatgaattctatgagcagtccacacaggggaatccggcacaattgttgatggcaaattacctctataatgaaaaatggatcctttcttatattgaatttgacggaagtacatattatatgcttaggggtgatgtggatgccgggactgcagaggaagactatacggaaatgtattttcgttccctgaatattatcgaaaagaaagatatagaaccggacatggcactcatcatgatcgtatttaccaatcaggaaaatgtatccgacgaacaggcggagcagtatgtgaaatggtcggaagagggaaaacggcctgatgacatagaaatatattatttcttaaacctgagatacggtcttatgagcggtgatgatgaactgaaaatattggatgaagtggagagaacagcagacagaatggctgtgtaccggatcgcaaaggatttcacaaatacatattttcaggaggaatacacaggcgaagttgagatcatgggcatcaagggactttccggggtggatacggacagcaagggtgactgcacggtggaagtagagttccggccggtacaggaggattcgctatcgtatctgtttatgacgtttggatatgatgagatgggatggacaatccgcagttacggactggaaaagtaggcggacataggatacaaaaattgtatgaaaatcctacaaaattttgttgacaaaagagtattgcctatgtataataagtcagtgtgtgaatcaacacatcgtaggagacttgtgttttctacgcaacatattgcataggagtcgctatgttagtaagtttatctgatgtattaacatccgaaggcaaggtagagactgttgccattccgcttgagatgacaagctttaagagccgccagggagatttctctattatggagaagacacccattcatcttacttttaccaacatcggtgtgaacaaggcaaaagtaaccggcactgcagagcttacctttgacacgaaatgtgacaggtgccttactgaagtacctacagcaatgaagcttaagtttgacagaatcgtttattctccggaagcggaagtaagtgaggaagaagataccgagcagagctttatggatggatggcagctggatgtagaggcttttgtgtacgatgaaattctggtgaattggccggcaaagatcttgtgtaaggaagactgcaagggtatttgccctgtatgtggtcagaacaggaatctgaaggaatgtggttgcgatactttcgtaccggatcctcgtatggcagcaatccaagatatcttcaacgcgaataaggaggtgtaacgatgtctatttgtcctaagaataaatcttccaaaggtagaagagataagagaagagcaaactggaaaatgagcgctcctacattggtaaagtgcagcaaatgtggtgcactgatgatgcctcacagagtttgcaaggcttgcggttcttacaataagaagcaggtcgtaagcgttgattaatttataaatcaatgaagcgaaattaagtgaaaagaaaagaggagattccggatggaatctccttttgctttcacaaaaaaatcacttgctttttatatacgcctttagtatagtaagaatgaatctgccatcatcaaactgtttggtgtgatccacggagcggtttgatgatgagcggataaacataaacaggtaaaggaacgacgaaatggcagaatatgtaaatgttgctgtagacgcaatgggtggcgataatgctccggcag

SEQ ID NO: 5512 - DNA, 9892 bp, Unknown
  gut microbiota DNA sequence
tgcggtattgtgagacggtattcagagaatatcaggatctggttcattactggctgacatttaatgaaatgaataccctggtcagccgtttcggaacgctccttgcgggaggcattttacccgaggacggagaagacctattcgggacaaaacgactgggatcccccgagaccgcggcagaaaagagtcgcagattcactgcattgcatcatcagtttctggccggtgcacaggcagtaaaaatagcacacgagatcaatcccgaaaataaagtgggatgtatgctgtctgcagccggtgtgtatccatatacctgtagtccggaagatgtattggaagcacaggcccagatggaacgcagcaactggttgtgcggagatgtgtgcgtaagaggagcatatccttattttgcggaacgcttttttagggaaaatggggtacagatccgaaaagagaccggggatgatgaaatattgaagaatggaaaagtggatttcttaagcttcagctattacagttcccgttgtgccacggcagacccgaaagtgatacagacagcagggaatatgatgcttggtgtgcccaatccctatctggaagcaagcgaatggggatggatcattgatcctaagggattacgttacctcctgaatgaactgtacggcagatatcagattccgctgatggtcgtagagaacggactgggagcggtggatcgtgtgacagaagacggacagattcatgatgattaccggattgcttatttaagcgaacatatcagacagatgtgggaagcagtaaatgatggtgtggagttgctgggatacactccgtggggatgtatcgatttgatcagtgcaagcaccggtgaaatgaaaaaacgctatggctttatctatgtggacaaagacgatgaaggaaaaggaaccttggaacgaaagaaaaaagattcctttgcctggtatcgggagtgcatcaggacgaatggagccagcgtactttccacgaataaaaaagaggataaattatgacaaaaaaacaggttgagattgtgaataagacaggactgcatgccagaccggcttctgattttgtactggaagccaaaaaatatgaaagcaaaattacgatttgcagagaaaacggcgtaccggtgaatgcaaaatccgttgtacggattctggcggaaggaatcggacagggaaccaaaatagagattgctgcggaaggcgcagatgaagagcaggcggcagcgtctcttgccgccttggtggaaagcggatttggagaataaaggcggtaaatgtgtatggaagaaagattacagggaaatccggtatctgagggaattgcttatgcgaaatcttatatttacattcccggtacattgacaaaggctccgggatttttcccaaagggtcaggaagaggaaaaatatcgggaattcagggaaacctgtgaaaaggcagacggtgaactggtgacattgtacaacggtatgtgtaaagaggatccggataaggcaaaaatcttcagtgcacatcgggaattactccaggatgaagaaatccttgatgagatccgggagacaatctgtgaggaaaacatgaatccggacagcgcggtcagtaaggtgtatacagaatttgcagaattgctggcaggtgtggaggatccgttgattgccgagcgcgcggcggatcttagagatgtcagagaccggctgctccggattctgtcggggcaggaaacgtctaagctgtcttcgttttcggaagatgtaattctggtagcccatgacctattacccagtgatacggccaccatggacagaaaacatatcaaaggaatcctgacggaggttggcggagtgaattcacattccgcaatcctggcaagaagttacggaattcctgcaattctgggagttccgaatgttacggaaaaaattcctacagatactatgcttgccatggatggtttgaccggagaaatatttgtcacaccgggagaagaatgtatttgcgatatcagggaaaaacagacatcttttttccgcaaaaaagaagcagaaaaaaattttttaaacaaacctgcaattatgaaggacggaacagaaataaagataggaatcaatatcggctcgcaggaatttgatgttccgacagaccggtacgatttcatcggcttgttccgtacagaatttctttatatggaagggaaggaacttccgggggaagaaacacaatttgaagcctataggcaggttgtgcaaaaggcaaaaggacatccggttactttgcggacactggatatcggcggagataagacattgccctacatggaattgccgaaagaggacaatccttttttggggaaaagagcaatcaggctttgttttgcggaaaaagagttatttttaacgcaactgcgtgcggcactgcgtgcttctgcttacggacctctgcaaatcatgtttccgatggtcgggagtctggaagatattcgcaaggcaaaagagtacctgaatctggcaaaagagcagctgaaagagagaaagcagcagtttgatgaacagatccgaatcggtattatgatagagattcccgcgattgccttgattgcagatctggcggcggaagaggtggattttgcaagcataggatccaatgacctgacgcagtatttgtcggctgcggatcggatgaatccggaggtggccgcttattacagaagtgattccacggcaatgcttaggctgctgcggtttgtctttcaggaattttccaaacgtggaaaagaaatctccgtctgcggagaaatggcagggaatccggagaccgcccaattgctggtgggactgggagcgagaaagctgtctatgagtagtggaaatatcgccggtgtaaaggcaaaactggctgaatgtacgttgcaggagctgacaactttggcagagaaaaaactatgaaccctcttgacaaaaaaatgaaatgtgtttatattcataacagtgttatataacactgttatgaatatttttttggaggaaaaagtgacaaaaccaatcgaaggagtttcagagagaattctcgcctgtgccagagaagaattcctggagaagggctattccgaagcgtcgcttcgcacgattgcagccaaggcagataccactaccggatccatctattcccggttcgtagacaaggaagggttgttttgcgcgattgtggaaccggcggcggaagggctgacgcagatctttttaaagacccaggaggcgtttcatgcggtagaggcggaggaacagcctaaggcgatggagacttatatcacgggcggtatggatgaaatgcttgactatgtttatgaccggtttgatgatttccggttacttttggatgcctcttatggtaccaagtatcaggatttcgtggagcatctggtggacattgagacggagtatacctacaagtatatggaagctacgaaattcctacaggaaggcagcatgatcactgaggagttcctacatatcatggcgagagccatgtttgacagcatgttcgaagtcgtcagacaccgcatggacagggatactgccagaaaatatctgcatatgctggagaaatatcactatggcggatggggagccatcatcaagctggggtgaatcataagataagactgctatggaagattacggtagcagtctatcttaaaaaccgacggttagttgaaactaattatcaataagcggtgttagataggaaagacaatagagcctcaaatgtccggaaaagagaaatgatgaaaagcagggcaaaatgaaaagaaattctagaaattaaagagttacattaaatccaaaaaattaatttaaatcaaagggaaagagggaaagatcacatgaaaaaagaaagctctatgcagaagctgttcgcttatgcgggcaactacaagtacctgaccattgcgtcatggattctgtccgcggtcagtgcactgattgcattactgccgttttatgatatctggcggatcatgcaggaagtcgtactggcggcaccggattacagcaaagcgcagaatctgtccggcttgggctggcgtgcggtgggatttgcattgttatccatgttcatctatatctgcggactgctgtgttcccatattgccgcattccatgtacaggccaacatgcgcagcatcctgatgcggcacattctgacacttcccatggggttcatggaaagtgaaggcagtggcaaaatccgcaagatcgtcaacgaatccaccgcagccacggagacctacctggcgcatcagctgccggataaagctggagcggtggcaacacctgtgggactgttgcttttgctggtagtatttgactggaaactgggcttattaagtctggtgcctgtagtatttgcttttctcatcatgggagccatgaccggccagcgtatgaaagacaagatggaagagtatcagaatgcgttggaagagatgtccagcgaggcggtggagtacgtccgcggtatcccggtggtcaagaccttcggacagtcggtcttttccttcaagcgtttccagacttcgattaagaaatatgaaaaatggaccatcgcatatacgaaagatctgatgtggcccatggtcggtttcactacattgatcaatgccatttttgcgattctcattggcgctgcctattggttcggcggagcaaacggtgatccggaaatactgatcaatctgctgttttacatcatcattacccccgtgctgactgtgaccctcggtaagatcatgtacggcggcgagaaccagatgatcgtggaggatgctctgaagagaacggacggcatcttaaacagaaaacctctgccggaggcaacgacgaagcaggagattccggaatattccgtggcgttgcagaacgtatccttccgttatgaaaatgccgagcgcgatgccctgcatcagatcaatctggatatcaaagaaggagagcatgtcgctttcgtaggaccctccggcggcggtaagaccaccctggccagcctgatcgcccgcttttacgatactacggaagggaagatcagcatcggcggcgtggacgtaaaggatatttcttccgcacagctgatggatatggtatctttcgtgttccaggacagtaaactgctgaaaatgtcgatctatgataacgtccgcatgggtaaaaaagatgccaccagggaagaagtgatggaagctctgaaaaatgcccagtgtgaggacatcatcgccaaaatgccgaacggcgtggatactgtcatcggcagtcagggtacttatgtctccggtggtgaggcacagcgtctgtcgattgccagagcaatgcttaaaaatgcaccaatcctgatccttgacgaggctaccgcttttgccgatcccgataatgaagccaaagtgcagaaagcgttcaccggactttccaaaggcaagaccgtgatcatgatcgcccacagattgtcttccgtggtggatgcagaccgcatctgcgtcctgaaaaacggcgagatcgcagaacagggaacacatgaagaactgcttgcacagaacggactgtatgcccatatgtgggaagaatacaacaagtccgtgagctggaaggtcggcgcttaagggggctgatagtttaaagttttgcaggctttgaataacgtagaacaatcagaagaaaagagttatgcagaggtttttacgatgcagagtttgcaatgtgtatttaatacgaggcgggagaagtgtgaaaaatatgcttgatagcaaattttttcacaagccatataaatatggctttggctatattgtggcgcctgcggaatggagattagaatgagtattttacaggaaaaattgcaacatagatacgcactttcggaaaaaggtgcacaagatatgatgaaagcattcgtatccgttacgatttcagatctggtattgatgttcccggtgtggatgttatattttctggtgagagactatctgcaggggacgatggcaggcaggggtgtattctacctgatcgggtgcctcttgtgtctggcactgatcgccattactacattgatccagtatcgtgccacattcctggcaacttatgtggagagcggtgtgcggagaatcgccctggcggaacagctgcgcaagattccgttgtcctttttcgggaaaaaagatctgtctgatctgaccagcgccattatgtcggactgtgccaccatggagacagcatcttcccattatgtaccggagctggtgggttcctgcatttccacgacattaatcgcaatcggaacatttttcatgaactggaaaatggcaatcgcagcgctgtgggtgctgccggtatcttttctcattgtaggctgttccagaaaagtacagaagagcctgagtaagaagcagatgaagttaaaaatggattgcgcggacgggattcaggagtgcctggaaacggtgcgtgacctcagagccaacaatgcgcaagcagaatacatggaaggcctggagggcaagattcgcgcggtggagaagcatgcgctgacaacggaacttggaacagcagtctttgttggcggggcgcagatgatcttaaagctgggaatcgctacggtggcattgacaggtggaattttgctggtgagaggcgaaattgatgtattaaccttttttgtgttcctgctgttagtgtcaagaatgtacgatcccctgcaggtggcattgcagaatctggcagccattatcagtaccggcgtgcagagtgaacgactggatgagattctgtctgcacagatccagaccggtgcggataccatggatccggcaggttatgatatcgaattttcccatgtgggattctcttatgacaatcaggatactgtcttaaaagatgtgacttttacggcaaaacagggagaggtgaccgccctgatcggtccttccggcggtggcaagaccactgtgtccagactggcttcccggttctgggatatccataaaggtaagatcaccgtgggcggcatggacatctccaccattgatccggagacattgatgtccctgtacgccattgtattccaggatgtgacattgtttaataatacggtgatggaaaacatccgtatcggcaggcaggatgctacggacgaagaagtgctggctgcggcaaaactggcgcattgcgatgagttcgcggagaagcttccgaacggctggcagaccatgatcggtgagaacggttcggaactgtccggcggtgagagacagcgtatctccatagccagagcattcctgaaggatgcgcccattatcctgttggatgaagcgacggcttccctggatgtggataacgagacgatgattcaggaatccctgtccaagctgatccgtaacaagaccgtcatgatcattgcgcaccgcatgcgtaccgtggcggattcggataagatcgtggtattgaaagacggcgtggtggcagaacagggaacacctgcagaactggaagcaaaagacagcatttaccggcatatgaaagccactcagatggaggctgccggctggacattataatcaaacagcctttttaaaaggagcggtccgcttgtttacaggcggatcgcttttagcatattgcgtaattcctgcgaacgacatataatacaatccaacggcagaaaattatccaatggagaggaacacagaggaataccatgcagatagcagcaatgaaaaaagacgatttttaccggcagatgttcaaactgaccatcccgatcattatacagaatctgctcagtgcagcagtgaattccgcggatgttattatgttaaactatgtgggacagtccgcaatatccgcagtatccctggcgtcaaatttttcaaatgtcctgtttatggtatattacggactggggacgggagccactctcttgtgcgcccaatattatggaaaggggaacctggaagcaattcatacggtagagggaatcacacttcgtttctctatggcaatctcaggtattgttgcgctgattgcatttttccttcctcagaagatgatgcttctctttactcctgatcaggagctgatcaccatcggtgtctcttatctgcggatcatgggcatcacatacctgtgctggggcatcacggaggtgtatcttgccatcctgcgaagcgtaggtcgtgtgacggtcagtatggtgttgaatatgctggctttcgtattgaatgtcattctgaatgccacctttatctttggactgttcggcatgccgaagctgggagctaccggtgtcgccattgccacagccctgtcccgactggtggaactggtggcatgcttcattgtatctttcttgagcaaaaatgtaaaactgcatccgaagtacctgtttgttcacagtaaggtgctgacacaagatttcatgcgtctgtctctgcccgcactttgcaacgatgtgtcctggagtgtggcgttttccatgtattccgtgatcctggggcatctgggaacagatgcggtggccgctaattcactggtcgtcgtagtgcgcaatatcggcacggtgttctgttttgccattgccagtgcaggtggcatattactgggaaatattatgggacaaggcgatctggagaagtcgaagagttacgcttcccggatgctgaagatgacggtaatcgccggagctataggcggcctgatcgtactggcaattaccccctttgtgttacggtttgctacattgaatgacactgccatgcattatctgaaatacatgctgctcatcaatacttattatattatgggcgctgccgtgaatacggcgctgatcgccggagtattccgtgccggcggagatacgaagttcggactgatctgcgatacgatcgatatgtggtgctatgcgatccctctgggattcttcgccgcatttgtactaaaactcccggtgctgtgggtctatttcctgttatgcaccgatgaattcgtcaaatggccctgggtcattaagcattaccgcaagggcagatgggcgaagaatattaccagagaagaagtatgagcctgatttaattacatagccttttcctgctcttcctgaatctcggggaaaacagataacatgggtttcacgtcttcttttttaatgatacgtgccacgtaattttttgtgatcttcattactacgggcgacaatgcaatgacaccaatcaggttgggaatcgccatcagtccgttgaaggtatccgacagatcccaggcaagtcccagattcatggtacagccgataaagatcatcagcacgaaagctaccttatagataatcgttgatttggtgccgaataaatattcccatgccttggaaccgtaatgactccagccaagtaccgtggaaaaagcaaacagcaagatcgcaatcgcaatgaaagcaggaccgaagctgccgaaaaccgttgcaaaagcctgacctaccagagcggaacctgaagaatcaacgagcacagcaccagtgtctaagtcgatcagtccggaggacagcacggcgaaagctgtcagtgtacatacgaccatggtgtcggcgaatacttcgaagataccccacataccctgacgtacgggctctttcacgttggaactggaatgcaccataacggaggaaccaagaccggcttcgttagagaatacaccacgcttcatgccccaggtcagcgccagcttcacactggaacccacgataccgccgcctacggctttcagaccgaaagcgcctttgaaaatagcggtaaatacagcacctatgtgactgatgttggcgaagaagattac

SEQ ID NO: 5513 - DNA, 9962 bp, Unknown
  gut microbiota DNA sequence
cccagatggcattcatgatatagctgtaggtcaggactctgccggaattttccgctaaaagtgtaagcagctggtattcgatctgggtcagatgtatctcttcgccccgcaggcggatcagtcgtttttcgaaatcaatctccagatccagtgccttatacacatggccgggagcctgggcgtggctgtgccgcagagaagtgcggatccttgccatgagctcgccggtgccgaagggttttgtgatataatcgtccgcacccagatccagagcggagaccttttcctgctccttggtgcgggcagatatgatgatcacgggaacatcgctccaggagcgcagcttttgcaacacatccaatccgtccatgtccggcagccctaagtctagcaggatcacgttggggcagaaagaagtgctgagactaagtccctctctgccgtttaaggcatgcatgatcttgtagccttcccggtccatggtagcggtgatgaaattactgatacttctatcgtcttcgattaagagaactttgatcttattcatatctgagatccatatcctttccggtattttcaacagttctatcgtatgtggctgagagtacacttatttttccgaagcgagagcttccgccttgggaagtgtgaaacagaattccgcgccatccgcatgattcctgccactcagcgttccgtgatgggcggtgatgatggtcttgcagatggacagaccgatacccatgcctttgcgggaatccgagctccgggaattgttgtaggtacccgtctcgaacagattctgtaatttttcttccgacagtccttttccgtagtctctcacaataaaagagacatgctccggatgatcctccacgatgaaatcaatgggcaggatacttccggaatgaacgatggcattttccagcagattgatggtgacctgctcgatcagcaccgcatccatgggtatcatcagaaattcctcggggatcctgacccggatggcggcatcgggatagcgttttttcagcttctccaaagcttctcccaccacttcctccaccggctcctctgtggtattgatgcttaagctgtctccctggatacgggtgacggacagcagattttccaccatattcaacagccagttggaatcctcgtagatattggtcatgatcgtacgctgttcggtggagcttagatcgttctgactttccagaaacagggagctgttgccgatgatgccggtgagcggcgtgcgcagatcgtgggagatggcgcgcagaagattcgcacgcatcttttccatttcggcttctgccagccgcttttcccgctctgcgatcatctcggactggatggtcatatgagaggtcatggtacacaggatcagagtgatcccactcatcagcaggaaggtgatagggtagccggtcagagtgaaattaagcttataatacggataggtaaacagataattgatcgctattacggaaaaaagggtgcaggcaatgccgtagccgtagcccaccgtccatctggcgatgatcaccagtgccagaatgtagaacagtgctacattggcatggttgtccgggacaatatgctgatataaaaaagaggcaagtgtagcgcacagcatgcaggcagcacagatcaggatactgatggcgtgcctggtaaagggtggttttaagcggaagcttttccgcggtgattttttatcggaaaatgatcggaacacggtgtgatcctccatgaaatattgttagttattttgtaaatttattataactatagtaccattactttgcaatgcaaggtgtaaagaagtagttaaggatatatgaaaaccggaatattttcccctaaagctgtggcaaaaggcaggcaggtagcctccggaaaagctaagacacaaaaaataggaacatatactttcgttaggttgacatcaggaaaaacattagattaaaatgtagtatggcggcggtcctgaaagggcggaccgtctatgtggacaggagaggagtaggttatgtttctgacaggattggcactattgccggccatcgcactggtggtatggatctacagacaggataaggtggagaaggagccgaggggattattgtggaaaatattcctgttcggcgtgttgtccgtgatcccggccatgatactggaaatcattctggatgaagtatttctggtatttgtggatgcagatacgctgtgctacgtgatcctggataattttatcggggtggcactgatcgaggaactttgcaagatgaaggcggccaaatgggcggcatggaagcatccagcattcaattataaattcgatgccatcgtgtactgcgtgacttcggcattgggatttgcagccattgaaaatgttctgtattgtctgggcggtgactttgggacggcagtgaccagagccctgttgtccgtgccttcccatgccatcgatggcgtgatcatgggatatttcttcggtgtggcgaaggaggcagaacttgcaggcgataaaaaacgcaggaaacgctacctgaagctcagcgtgttcatgccgatgatcgaacacggtatctatgattccgcattgtctctggatgcggactggatcttcgttttctttttcctgtttgtgatcgtggtggatgtctgggcctataaatttgtgaaaaagcagtctgggcaggaccgggagctatctgcataaagattgcgttaagaacccgtgaaaattttataaattcacgaaaaacggtaggatcgggtctttgcttcatgttaagataaagaaaacctaaagaaaggaaagaccaatattgaagttattgaatccaaagatccggcaaaaatttgcagaatccttgaaggcggtcctgccggtagtagggatcgtgatcgtattaagctttaccatagctccaattacctccagtatcctgctgtgctttctggtgggggcggtgatggtcatggccggtatgatgtttttcaccctgggtgcggagatgtccatgacccccatgggagaaaaagtgggtgccagaatgacccagagtaaaaatattctgctgatcgtagtgttatcttttctgttgggagtggtgatcaccatttccgagcctgacttgcaggtgctggcgacacaggtgccttcggtgccgaacatgacgctgatcctggcagtggcagtgggcgtgggaatcttcctggtcattgcccttctgcgtatgctgatcggtgtggcactgccgccgttgttaacttttttctacatagcagtgttcgttcttgcatttctcgtaccggagaatttccgggcagtggcgtttgattccggaggtgtgaccacgggacccatgaccgttccttttatcatggcacttggtgtcggtattgcgtccatccgtaatgaccatcatgcggcagacgacagcttcggtctggtagcactgtgctccatcggcccgatcctggcggtcatggtgctggggctgatctataagccgaccaatgcggattaccagccggtggcaatcccggagatcgctgattccgtggaactggcgcagctttttgcccatgggattccggattatgtgaaagagatcgcactctcattacttcccattgtattgtttttcggtctgttccagatatttgccctgcggctgtcggggaagacactggcgaagattctgatcggtctgatctatacttatattggtctggtactgtttctgacaggggcaaatgtgggctttatgcctgccggtaattacctcggtcaggtcatggcagccagatcctacaggtgggtactggtgccggtgggagcactgatcggttactttatcgtaaaagcggagcccgcggtctatgtactgaatcatcaggtagaggagctgacggacggcgccatttcggcccgctctatgggcgtgagcctttccgtgggtgtctccttatccgtagcactggcgatgatccgcgtgctgacggggatcccgattctatggtttttgatcccgggctatggtgtggcgatcggactatccttttttgtaccgaagatattcacagcgatcgccttcgactccggcggtgtggcaagcggacccatgacagctacctttttactgccgttagcgcagggcgcctgtgtggcggtgggcggcaatttagtcgcagatgctttcggtgtggtagcaatggtagccatgacaccgctgatcacgatccagatattgggaatggtatatcagttaaagcagcagaagagcggtgcaggcgtatttgccggtgcggcggatgcatttggtgctttggatgagaatgccatcattgaactgtaggaggtgtgcccatgagtgaattatatatgatggtcaccatcaccaatcgtcagctgacgaggaaattcgtggaatgctataaagaaaaaggcgcacaggtcggcagtgttaccgtcggcatgggaaccgcggcgaatgagatcttagattattttggactggacggcatggagaagagcgtattgttccatcttgtcacagatgcttcctggcggcagatcaaggctgctctgcgtaagaaaatgcagatcgatctcccgggaatgggaatcgcatttatcattcccgtgagcagtgtcggtggtaagaaagcattgaattacctgacctgcgggcaggaattcgtaaaaggagaggagtccacattgaaagagacgaagaatgagcttctggtagtgatagccaatcatggatatacggaactggtcatggatgcagcgagagaagtacatgcggcaggcggcacagtcatccatgccaagggcaccggaacagagaatgcacagcagtttctgggcgtgacactggtgccggaaaaagaaatgttgttcattgtggtaaaaagtgagcagaaaaattccatcatgcgtgctataatggaaaaagcaggactggagagtaaggcacaaagcatcgtattctcccttcctgtgacagatactgcaggcatgcgcctgatggaggagatgggagagacatgacaaacggcttatccggacccaggaagcagttcctggacgtgctccgggtactggcaacctgtgcagtggtgctgatgcatgtactgacaggtgcgacagatgtgacagatgcgtcgatagtgccggaataccggtcattattgctgtcagttatggatttggtgacctggtgtgttcctatatttttattgatgtcgggatatttgttcctgaatccggaacgtacattgacttatccggtcatgattaaaaaatattgcaggaggattgcgctggcgatcctcctattcggcgttccgtatgcagcttccgagctggtagtggcggagcggaccttccggatcaggatgatcccggaggcactgaagatgactctgacgggacatacctggtcccatatgtggtatctgtatttgatcttgtttttatatctgatcacgccgcttctgaaaaaagtgctgcgggtgctgccggtgtggggtgttgcggcagtgatggcagtgatcttcttaggaagcagtgtggcaccgtttctgaataaggtactggatgtcaacagtattccggtattgccggatggcggtgtgtatttcctgtattatctgtgtggatatttcttcgcggtgagagaagtatgtgtggacaaggcagagagttccggcacgtccgggaaaggcatggaagccgggctcgatacggagccggtcagagggaaacggataggaaacgtgtggctgatggcagcggcagtgctgatgatgggaatgatcctcagcaggacactcgccggattctccatccagatggcatacaattatccgtttacagtactgcttgcagtgcttctgttcgctgcaggatggaatggaagacgggacggcgcggcttctactgcccgggagaaaacacaccggatcccctggcaggaggcgggagctttgagctttgccgtatacctggtacatccggtgtatgtgaacctactgtataaatttgtgaagatcacaccctttacagtgctggaacaatgcggtgtgcagtctgtagccgcgggacaagtggtattgattttgttgctggctgcattctgcctggtagtgctggcactggcaacggcgaccgcatgggtgctgcgcaagatcccggtgttaagaaaatatgtgctatagaagaaaggagcctcacgagggggctcctttttgcgattgcttgttatgcgtataatttagtcacgctgccagcgcccggaagcgccgcaaggcagtaccagcccactctcggtgacagggaggccgatctcttcggcttccacatgaccgccgaactttttcgtcagggtggaattcatcatataggacagcacggcgggctgcaatcctgtagtgtacgaattgatcaggaagaacagcgcatcatcggataaaagctgtgcggtcagtcctacgaaatcccagatattatcttctattttccagatctcgcccttaggacctctgccgtaggaagggggatccatgatgatgccgtcgtatttgttgccacggcggatctcacgctctacgaacttcatgcagtcgtccaccagccagcggataggagcatcggcaagcccgctggcagcagcgttctccttcgcccagccgaccatacccttggacgcatccacatgggtcacagcagctcccgcagccgcagcggatacagtagcaccgccggtgtaagcgaagaggttcagtactttcacggggtggcctgcctcatggatcagaccggagaaccagtcccagttcaccgcctgctccgggaacagaccggtatgcttgaagctgaagggcttcagatggaaggtcagaggatcagccttaccggaggcttccttctgaaaaggcagggtgtaatgaatcgcccattcatccggcagatggaagaactcccattctccgccgcccttggcacttctgtggtaatgaccgtttttctgcttccaacccttatgatcgtggggtgtcttccagatgacctggggatccggacggacgagaatataatctccccaacgctctaacttttctccgctggacgtatccagcacttcataatctttccaatgatctgcaatccacatatagaaacctttctgtgtgtatactttgtaactgatttttataggacataataatagaatataataccggaaagactttttcaaggaatacttgctattgaaccgcattgagccatttaaagtcctcttcggtcgattcatgacatatttgggtcgattcatgcagcccctggttccgctgagagaaagtgtggtacgttatctttaagataatgggtatcactatgcccatcggaaagaggtaaaacgctatgaaaaaacgagtattgagcatgttactggcatttattctctgcttctcaacactgcccatgacagcattcgcacaggaggctgatgcggtggcagaacaggaagaacagcaggaaacagactctgcggcagagcaagaggaagcagaagcagctgcggcaccgggggaagagactccggctgataagagcaccactgcggcaactcccggtacggaagattccactgcgggcgaatcccccgatactgtggaaccctcagtggaaagtgtcagcgatagtgatgccggcacgcaggatacctcggcagacgatgagaagaaggcagcagtgcagaaggtacaggcactcatcgatgctctgccggacgaagtgacggtggaaaatgcagaaagtgtcggtgcgcagctggaagccatcgacgaggctatggagtcactgaccaaggagcagatcgcagaactggatatgacacgacttcatgctatttctgaagcgttgaatacaccgatgacggttccgatgacggtggcggaaggtcagcatgttgaccatcccatctgcggcgcgacatgcacagataagtataagcatagcattgtgacagagtggaagtccatagacagtgaagcagcactgcaagctgcaacggaaggatattactacctgactcaggatatcgtgacaatggaaacatggaaaccgaacaataacgtggtgctttgtctgaatggtcacagcattgcggcaaacggggattttgttgtcattgagatagataagggacaatttactctctgtgactgcaatagtagtgagagtatgcactatttcaccacaagcaaggaaggtctgttcactcgatgggtgccgtgcgaggaaaatacggagaaccgcatctccgttacaggtggagttatcactcacagcgtgggaaggtcggatttaggtgtgaaagtggataataacgccacttttaccatgtacggtggaactatttgtggtaataagctccaaggcagttataatggagccggtgtgtatgtgcataatagcacatttaatatgtatggcggtgcaatcagaggcaatgctgcaagttggggtggtggcgtcgctgcgctcggtagcacatttaacatgtatggtggtgtaatcagcgacaacatggtctctgcttctgctggcggtgtactgttgtcggacaaaagcgtcatgaacatgtccggcaatgcacagattagtaacaacattgctcccaccaaatggacgacatcaggtggcggagtgtatatatttgccagcactgacggagaagtcggtaactgcttatatatgtccgataatgcgaaaatcagcggcaatacagccacccaaggaggtgctgtgtatgtacgtaaaaacggtcaggttaccatgagcggcaatgcgcagattagcaataacacggcaaccgagaatggtggcggcgtctatgtagaaaatagtacttttaaaattgccggcggtgctcctcgggtctgtgacaacttgtgtcaagatgttcagaacaatgtctatctggctaccggcaatgcaattcggattagtaaattatccacattcgccggaaaaatcggcgtatccacccaggatacacccaccgagagcaacctcgtaacggttgccgcggtagctgtggaggctgggggtggcggtcacctgaccgaagaagatttggatcatatttgcagtgataaagagaacctctatccagttcttgtgggtggcgaggtgaaattgtcggcgaccgaaccgcatcggcatcccgtttgtggcgcaacctgtggtgacagcgagaatcatggaaatcagacctggataggcgtttccaatctgactgacatcaagagtgggggctattattatctgacagacaatgttaaattgaatgatacatggatctgcacttatgatgtagcactctgtttaaatggaaaaacaatcacctgtgcagcagaagttgatgccattcaggttgcgaaaggaacgaagctgattatcaccgactgtcagaaagtggtcggcaagattacccatgcacaggataatataggacgaggtataatgtccttgggtaccttgatactgtataacggcgaaattaccaaaaaccagattgccaaaggtagtggtgccggtgtatacgtagatggtggtaatttttacatgtataagggcagtatctctgataacaaagtaaccataaacggtaacggcggcggtgtgtatgcaaaagatagcaccaacttcgttatatccggtggtagtattgacagcaaccatgcaccgtctagcggtggtggtatatactatgaatctacaattagtaagtcagtaaaattcaatatatctggtggtaatatcgttagaaacacagccgttactggtaacggtggtggtatatggctgaagagtgcatatggaaatatgaggtttaccatgtccggtggtaggatttcaaaca

SEQ ID NO: 5514 - DNA, 1100 bp, Unknown
  gut microbiota DNA sequence
tgtgcatgggctatgcattctgccaactcagggagcagcccttttccactaatatggtgcccttcaaatcattgtttatcgatgacctttgcgttgacaagcagacacgggggcagcatatcggggaaagcctgtttgaatatgcgaaacagcaggcaaaagaactgggctgctatgaagtaaccctgaacgtctgggcaggcaacacttcggcagagcacttttatgaaaagatgggaatgaagacaaaagaacggcagatggaatatatcctgtgagccggatggaggtggcaagcatgattaaaattgcattttttgatgtcgatgggacgcttttgaagatgggtcataaagaattaagtgagcggacgctgcatacattaatttctcttcgacagaatggggtgaagctgtgtatggcgaccggaagaggatatctgtcggcgccgcgttttccgggaattgatttcgatgcgcttctgacctttaacggttcttatgtaacagtcggagacgagattatttttaagtgcccgcttgatcgggtggacaagcttcagcttcttcagaatctgaaagacatgcatagggcggtagcaataagtaacgaacattttatcatcaccaacggtacagatccggatctggagcagtatttcagattcggatctgagatgctgaaaatcgataaacaattcgatgaacgggttcgtgaggatatctatcagatgatgtgtgcctgccgggaagaagagtatgagaggattctctatggtacgcaccatacacagattacagcgtggtgggatagagcggctgatatcattcccctggaatgtgggaagggaaacgctgtgcgcgcggtacttcagcattttggctttacaaaggaggaagccatcgcttttggagatggcttcaatgatatcgagatgctggaagcagtcggcaccggtgtggccatggggaatgcgaaggatgagatcaaagcccacgccacctgcacgtgcagatcggtggaagaagacggagtctacgatttttgcttagaacatgggctgattacaatataggcatagctgtccgcatttccttcac

SEQ ID NO: 5515 - DNA, 106257 bp, Unknown
  gut microbiota DNA sequence
atcaataccattttttcatttttctgacgcagaatccttgccgtttccattccatccattcctggcatctgaatatctaaaaatagaatatccggctcacaaccacttgcaatcaattcatcaccagataaatatttttctattactacatccggtaataatttctttattttttcttctaatatcaatcctatagacttttcatcatcacagattgcaatttgcatcttgtcacttccttgcttacatacaattatatttattatatcggaaaagttcttttaatagctagccaccatgttgtgaaccgacatttttttgttgtgaaataaaatatcacatataacgcattatttgcttcctgttaatacgcaaaaacactgtatctcaaactcattgaaataccatgcttccccgaattttctatattgtcctattgatattattactttactatccgacacgcctctgggcgtgactgtatctatcaaaaaagaagccagcagtttattcacacactactgacttcctatactactcattttatttacttcgctgcgtctcagacaagttattacaataccgaccgccctcattagattttcaggcctgacgaggggaggccggtatataaaaaagcattattattccacagcttccataaagtacatccgggaggaaaaatccgggaacagtcgggtgtcggaattatatccggttccggcgaaagcgggtttcagggcaatacccgcaagcatcagggtatctccgtaagcggtcagatcttctttttcgccatccatattcacaaatcgtgaaagaatctcctgtaatgcggatccttgcttgatatgcaccggggaaacggtgttcacaaggtctccgaagtccttcagattgtatttgatattcctgccgtagaaatgatatttcacatcaggaagtaaccccaccgggcgataccagtcatgggattggttcggagttgtcaggcgtcggaagaacagccccactgctcttctgccatccggggacacgcaggtccaggataaggtttccgagtcggaatcctcgttttctgttccacggtaaaaggttccaaactggaaaacatcccgccattttttataaagtgcaatctgttcccggattgcgttaaggtcacttccggacagatcctttaaattacattcataccctaagattccgaaagaggccacctgaaaacgggtctcaaggggtgtgatccttaaggtctgatgatttggacaggatgatacatgtgctgtaaataccgataagggatatccatagctgtaactgttctgaatcccggtacgacatagtgcgtcagtattatcgctcgcccagatctgcgggaaatagcttaatattcccagatcaaaacgatttccacctgaactgcagccttcaaacaaaatctcagggaaacgtgtggtcagctcatccataatgtgatacagccccagcacataacgatgtgccgtctctccctgttttgcagccggcagataaggggaataaatatcactgaaattacggttcatatcccactttacataacggatttctccggaggaaaataccttcgtcatggaatctattacatattgttgtacttcgggattgcacagatccaagaggcgctgattacgtccctcagagtgaggatgtcccggaatcatcattgcccagtcaggatgttcttgatagagacggctgttttcgctgatcatctccggctctacccagagaccgaaatccacccccagggctttgatttttttactgagggaaacaattcctccgggcagcttcttcggatctggttcccagtctcccagggaggaagtatcgtcattccgcccggaaaaccacccatcatccatgacgaacagttcgatgccgacagctgctcccgcttttgccagctgcaacagctttctttcatcaatcttaaaataacatgcttcccagctgtttaacagaaccggacgaggtcttctcttccacactccccgcacaatatgctcacggacaaaggaatgtaattgacgactgagcccgccatacccattcgaagaataactgaaaacagcctccggtgtatcaaaatgcgtttccggagtcaactcccaggaaaaactctgtggattgatcccgcttacaaaacgtaatttcccataagagtctttctcaagggcttcataatgatttccactgtagatcagattgcagccgatacaggagccaaaagtctcacaggtgttcttacgtcccaggatcataaaaggattcgagcggttcgaagaggttcccgtataagacgcatttataaatttgccggaacgtaaggaaatctgttctctgtgcatttctcgtgcccaggcaccgctgaaatgagtgattacagaataatcctctgtcagatctaactgtgcactgagacatcgctccaaggtgacagatgcgtcactatgattgatcaaccgtgcacttctggtaatgacatcacatttttcgaatacggtataaaacagctgcaactccaaatgattcgtaacatcctgcaaaataatctgaaggcattccgcggaagcagtttccgcttctgaataactgtgagggagtccggaagcctgcaggcactgttctctttcctttaaagtaataacttcagaggaatcaaaagtaaagtcagaggtgacgcttccgtcagcgtgccttatctccagaaaaggttctctgatatctccctttccgaaagttcccacttccagacagacatcctccatggagatctgcggatgttccctgtcgtaggtacaagtatttcccggagcaaagcctctctgtatgacaaggggcgcgcagaaagcggaatcctgtgtatccacagtgatccgttctccgtaatataggtgctctaaatgcccagtctccatgacacgcattccgtaagtactgtgagtcgtctgtaaaaagaaccatggtctcgtttcttttacgatctgaatcatatcgatgcctcctgaatctcttttaatcgttcctcggtcagttgatacttcttatgaaagaaaatgacaccgatgacaaggagtagaatggggaataacgccatcgtcatgcgaagacctatcacagagcctccggaagccccggcagccgcagatacggtatcactggtatcggagttcaaatggcagaggttcaggcacagagaagccactaacgcagcaataccggaagctaattttaccacgaaggtctgcattgagaaaatgacactctcgtctctgcggtgatttttccattgaccgtaatctaccgtgttggccagaaagacggtggtcagtaccgtcagcataccattggcggcaaagatcagaaaaccgggaataaacagtaaaaatacattgcccatattggtaaaacacaaaaacaacaatacaaaatatcctgcaatagccatcacgaagctgacataaaagatccgaatagtacttaagaacttacgaaacagcgggaacaaaagcatcatggaaaggatctgtaccgctccgccaaaggtattgaacagtgtataggagttataccaggtctctccgccgaaatcgtatttaaagaaatagattaccaggttggaggtcgtatagaccgcgcagttgatcagtacgatggtgaccacgacagccatggcctgatcgttctggatcagtgcccggaacatctgaccgatggagggtgcttccacgtccacagtagatttttccttgatatttatacaggtaatggcaataaatatcacgaacagcacagcaatgatcagggtgaaccgggaaaatccgacacgctcttctcctccgcccagggcattgacgcagagcatggtgatcacggtgatgatggcagagccgacaccggcgcaggaacgtcccagcgtagacaatccttcacgctcttttccgctgtgagtaaatgccggtatcatggaccagaaaggaatatccatcatggtataggtcacaccccagagaatataggtaaccgccgcataagccaccagcccgctgccatccagcgcaggaggcgctgagaacatcagaaacagaacaacagcattggtcacggtgccgatcatcagccaggggcggaatttcccccagcgtgtcctggtcttagctacgatgacacccatgaagggatcgttaaaggcatcgaacactctggcaaccagcaggataatacccatagctacggcatttacccctaaaatatcctgatagtaatataaaatatagctggcggacagcatatacaccatatccttgccgaccgcacccagtccataagaaaacttttcttttccacttaaactcataatgtaaccctgatcctttctctttgattttcacctgaaattaaaccgtaacctgaaacggtatctttatttcccctgcggtctgggaccgtaataacaaagttccctgaccggatctcccaagactttttatataagtgccacccatgccgccctgtaaggcaatggtgtcaggtccgatgatggcaatgtcaccttccgcggtgatccgtaccggctcctgataaaaaggaagcacattgccgtgggcatccacagcccggatccgtaccagtgccacgtcgtagctgtgatgctctgtcagattcgtgtgatccgcttccgcctgcagccggatcccatttaccggctctttggtgacagactttatgactttgccgtttttgatggcatcaaaacggtatacggtggaggtaccgccccagtcaccgatgtatttcgtgtaaagctttgtcacctccgcaaaatcaatatgatacagcagtgccagctttaatgcggtaggatacaatctcttcggaatatggttcagactgcctctggccacgatattcatggcatccgccatttctttcgcatgttttggacggaaccgttcgttcttctccaaagcatcaccgataaagtcatcgatgagaatgggaccgtgctttaaatgcttataaggggacatttctggccggtattccttgataaaacggtcgtttttatacattctcacactgtcggcattggacaaaatatacaggtttccgcggttgcagccgggatgctctccgatatccatggaggaggtgatctgaagcacggggatctcatcctgttcacaggcataaacggaagctgcgagcttcggattacggaacatatccatgacaccgtgataacagatccggtcaccgcttccgaagtctttatgggtattgtagtcgaacatacaccagccgaagcttccggcgatatcctcctgccccgctacggcatccagtacgttggcatggcggatcgcatgttcactgcggcgttcctcattatcgaaggcttttgtgggatacatgtgtccgttgtattcgctgatcaggtaaggcttgtcggtatcggaagtgacctttttcttcgggtcacagccgggagtcttgccgtcgtgcagaaaatcgttataagtatagacgtcctccaacagatggcttttcttaatagcccggacaccgccggtaggtctcgtgggatccagcttatgtgccacggcattggtcttttcgtaaaacggatcatcatccggggattcattgatccgtacaccccacaaaataatcgaaggatgattgcggtactgacggatcatgtcctctgcattgaccaccgcctgtgctttccaggtgtcatctccaatatgctgccagccgggaaactctgtgaagaccagaagtcccagttcgtcgcaccgctccagaaaataatgactctggggataatgggaagtccgcacggcattcagtcccagctctttttttaacagatccgcatccagcttttgcatgctctccggcatggcatagcctacataaggataactctgatggcggttcagaccccggatccgcagttttttgccattgaggtaaaagccgtcttttttaaaaactgcatccctgataccgaaggtgacctctgcttcgtccagaagctgttctccctgccagagctgggtctttaacagataaagatgagggtgttcggtatcccacaaaaaaggatgtggaatcgttccctgaatacgaaacggggtctcagccatagtgcctgtggggacattctgttcgcagagaaactgccagccattatctgatgttacatctgataccacacccgacattacagcatcgctctttaacatataatattgtctgacattaaggtcttttgcaacttcataaaaagtgatttcagaagttacctgagcctcatccggtgtgatcagcgtgtgtacgaaaatatcctcaagggcaatctggtcttttacttcgagatacacatcccggtagatgccgccgtaggtcatataatcgatcacgtaaccgaagggaggcacatttaagtcttctctgctgtccagccggacacacagcacattgtcctgtccgtagttcgcatatgccgacagatctacagtaaaggcggtgtagccgcaatggtgctctcccaccttactgccgttgagatagacggtactgtcatgaccggccccttcgaaggtgagcaggatccgcttgccctgccattcggtcggaatatgcagatggcgtctgtagccgctgaccatctggtagagagattcgtcaaaatagtgaaacggggtctccttacaggtatgagggattcggacgggctgcagggtctcttccgggtattctgttgcagtcatcccctcctgaaagttctcgttaaaaagccagtcttcgcttaaatagatcttctgattcatgattcgttcctctttctttgggatattatggattaattctggattattccattgcctcattctgatctctgtacgatgccatacatgaggatttccacaacttccttcagggcatctgcataagtcagctgatttcgagagagaatatctctctggaagaactgctcaatggaagcttctaacatcattttcaccagacagatgggaaccgggcggatgctgccctcagccatgcccatctcgatcagctggattgtaggctcccagccagtggaaagtctgagttctaccttctggtagatcttcgggtatttgtcccggagggaatataattttcgaagatcgatattctgataaccttccggcagcactcccaggatgcggtgcagtttttccactacactgagggaaggatcggtcaggatcatctgctcgctttccttgatggagtcaaagatataatctaccatggcaagaaacagtgcttctttatcatcgtacacggtatagatggttttcttgctgatcgagagttccttcgccagatcatccattgtgaatttcagccctttttgatcgaagacacgcagggtggcgtcgagaatatttttttgcagaccttctgtggtatccatcgcttctattcctccgttcggtaagattgtaattacagtatggaaactgaaaagtaaattgtggtttcctataaaacagggtagcatttttgaaaaaaagattcaagaaacgtttttgccaaaaagagtttccgagaattgtgaaatataacaaaaaaccagccagtaaaacggttgactggtgaatgacagagtctataaatagtttttcatgatgcattctttttccggagaacattttttccatgggattttaaaatacaagagagggatgcaaagattttatagatagaggtttgtcatgataaagtatgatccgttatgggataccttgaaaaaaagggggatcagccagtactctctgatcaaagattatggaattgataaagcgcagctgcaacgcctgcgcagcaatatggtagtaaaaacaatgattttgaaccggctctgtacgatcctggactgccggatcgaggacattatggtatatgtgccggatgcaaaagaaaccgaacaaaaacagtaagaggtatcagaaaaaaagtctgatacctcttatgtttaattttattatctcttgaattgttctgccagcgtgggatgagattttttgcgggtgatctccaccaatcctaaaggcgtcatatccacgatgcggggatgctggggatcccctgcggtcagattctttaatgtctccagtaactccttctgccgttccttttccgccatattgatgaagtccacaatgatgataccggacagattccgcaggcgcagctgtctggctacttcttcggcagcctccaggtttacctgataataggtgtcctctcctgcttttttcgcttcgtttttaccggaattgacatcgatcaccgtcatggcctccgtaggctcgatgacgagataccctccgcattttaaccagactctggtatccagtgcttcctccatgccgcgctccagagaatacagcaggcgtaaagagatcgctggatcatcgtagaaccgaatggacttttgttttaacaaagggtgatctccttccgacagctgacgatagatctgaggatcatcggtaaggatctcagaatattccgaaggatccgccatctgctccagaacctcgtaaacggcctcagaaggcttcaaaaggcaggtgaagtacactttatggtctgcctgctccaaaaggctctgaagggcttcagaagcgttctcaggggtgctcccgtttttacaaagcagttgcttcatccgggcaggatccgcagtggcggaggcacgctttgtcttctgggcatctttggtgaccatgactatcagctcgtctccagctttcaaggtaccgtctgccttacgattggtcagatacgccgcacctgcttcccgcaggggtagaaagcacaattctccgggaaggatctccacgaagcaggcatcaatattttttgccacattctgtattttccccagatagatgccaccgatcttactggcatctgaccgcagtacgcgtatagcagccacgccccgggcattgacaagcagagctgccctgcgttcccgcagacaggtgaagatcagttttccctccgtgcaatccgtgaatttacggatctgatttacttctttttctctggccggtcgtccgccggtgagactgcggctcattccgtgtcaccggaagctgccctgtaagcttcctcactgtcgaaacctatggcatccagggggagaagggcgtctgtttcgtttctcagataggtctcttctctgttgaccagaagggcattttcctgcagggtctcaccattttcggaaaataatgcttcaatgacctgaatgggtttgatatttccggcactggaggcatccaccagcagataaagcttttcggactccaccaccttcatctcatagataccttcttttaaattgatctcccggcttcccttttttgtctctttggtaatgaggatctcatcttttgcaagaaaacgattcaccgaggagcccagatcaaaatgaggccctctgccctcccggaaagctaccgtatatccggcggcagcaacgctggccatggcattgccggccttgtccggcagaattttcaccgaagtgatctcgattcccggtacggaagcggcattcaaccgctgctttacatcctcacaggaggtcagggaatgcacttccaggtccatatattctccgttgctggtcagtcccacacccaaaggtgcggcaaaggacatgatctgatgcgggctgaagcccccggtataagcaacatccagctccgctctgcggttggctttctggaaaaagcgcatcacatccagatgtccgataaaacgtaccggtccgtattttttgaatttaattcttaatttcataatttctgtcagatttctatgcggcctttcgtaaaagacctgcaatttccctttccttttattcttcaacattcaataacgtgccataaggtgtgggatcatcctctgggctccacacagataccgcagccgaatctggcggcaccgcagccctgacatgcctgtttgcagttcggtgagatcgtctcgtttttcgctttctgccattctctctccagaaaggctctggatacaccgcagtccaggaaatcccagggcaggatctcgtccagaggccgttctctgtgggaatagaaatccgggtccagaccacaggcttcaaaagcttccatccagacatcgttgtggaaatactcactccaggcatcgtagaagcagcccttgttatagacatataaaagcacctgggacaattttctgtcacctctggccagaacaccctccagaacgctgacatccgcttcgtgccagttgtacttgatgctcttctggttcagctgctcggaaatggcctttctggtcagatatgccttttccacgaactcttccttggtacactggggcgcccactggaatggcgtaaagggcttcggcacgaagaaggaggtactggtaacaatctgcactctgccgttgacacgtttctccttcggcaccgtatcgaagaaagtggccgcaattttgttggaaagctcagcgattccccggatatcctcttcggtttctgtgggatgtcccagcatgaagtacagtttgactctggtccagccgccttcgaaggcaagggcggaaccctgtaagatcacttcttcagtgagtcctttattgatgacatcccgcagtctctggctgccggcttccggagcaaaggtcagactggatttcttcacatcctgtactttgctcatgacatccagcgaaaaggcatcgatacgtaaggacggcagggagatattgatatgtctcttatcacactcttcaatcaggaagtcaatcagctccggcagcttgctgtaatcgctggaacttaaggaacttaaggaaatctcctcatgaccggtgtttttcaacatttccatggcgtactttttcagaacttccacatccctttctctgacgggacgatacagctgtcctgcctgacagaaacgacagccgcggatacagcctctctgaatctccagaacgactctgtcctgtgtgactttgatataaggaactaccggcttcataggataaaagctgtcggtcatatccgttaccagctctttgcggatccttgcgggaattccctcttccgtaggtcggaaggaagcaatggtgccattttcatggtaagtggtctcatagaaccggggcacatacattcccggcatctttgccgcccggcgtaagaattcttctctgcctgtcttctccgcccggcatttcttatagagatcgatcagcggccggtactgggtctcgccttctccgatatagaaaatatcaaagaaatcggcaatgggctcaggattataggtgcagggaccgccgccgataacgatgggacagtcctctccacgttcggtggcaagcaacgggatccccgccagatccagaacctgcagaatattcgtataacacatttcgtactgaatggtgattcccaaaaagtcgaagtcttttatcggatcctgactctccagggcaaacagcggaatgttctccttacgcataatttcatccagatccacccagggagaatacacacgctcacaccagacatcatcccaggaattgagcatgccatacaggatctggattcccaggtgggacataccgatctcgtagacatccgggaagcacatacagaaacggacatcaatgctgtccctgtccttcactacggcattgacttcgttgccgatgtagcgggccggtttttcgatcttcatcagaatatcatcatttaacgctaacttttcgttcatatttacctcaggttattgatttttacatataatttttcatctgccggacatctccgtctgtgcaggggacagcggaataacgggctttttcatagatttcagccattccttccacatccagcgatttttcggcatctctagcagtataaaatggcaggctcatctttgcaagcccgctggcatttatttttttctgatacatccgccttatcttctggccggcatctaagaaagcaaaagaaaaccatttctgcttctgctttgcggcagtattttccggggcagcctccaggtgttcccgcttgtccatgctctccggctgttcagaaacagtgccggggagggaaaactgcattctgtccctgagaaatgtgatcagctttcgaattccgcggtacagcagaaatacgcagacgatcagaagtgcgatcatggccacatattccagaatgacccataaaataaaaggatcttccgcttccatgggaggcatatcgccaccgcctgcctgctgttccaccactaccgcttctgtcccggaatccatggggagcagtccgaacaggaaacgaagaatcgcaaccagaccgtttcgcagtaaccgcaaaaagggctttaaccaggcaaactgtgacactgccaggagcagaagccccgacaacagcacaaaggctgcggtgctgtggagcccggaacaaaagatctcctgaaacgggatcttgccggtactcagcctgtttaccgtaaggaaatcctcataggactgcaaaaacaaaatgacagcatacaataaaaacaccaggatcagactcatacgataatagagatcccagacgttgcttccctgataatgctgcagaaaaagacacaaaaaggcaattccggcggctaacggcagaggcagcggatcggaagcaaagtcctccgtccgaaaacgcagccagagggaatagatcacaaagcctgcacctaccaacagccggataccacggtttacgtcgttggctgccggaatgatataaaaacatgtcagtaccagtccgtgcagaaggagcaataccgacagatgcttacagcgttttctggcgtaatacagaaaaaacaccggcagcgccccgagcatccacaaagccaaggacggacggctcgccggagccagcgcggccaacaacgtggacgcagtcagcgccaggggataaaaacataattgattcattagatcagtcaaaatttctttcacattcagacgctttcttcccgtagggagataaaagtgatcaaagactttaacgcttccccgggatcaggaggtgtactttcggaataaggataaaaccatttcatatccgggtgtttttcctgatattgcagaagtaatgctgcaaagtcttcataggcattgggtgatacaaagcaggtatagagcgcattggacgcatcggacatacgggcggcaaacagctcggaaaaagactgtaccggtttagccgtatcgattcttgcaagcgtctgcagacagacattccgctgtctgactccgccgccggcttccagaatacaggggtctccactgattgtgtcaataccgttgcaatacagggcaacctgcatcccctgttccagaaacagcaataacagtgccgtggcaatctgcaggcaggcttccacgcagtcctcttttttcagaataccggtgtcctctaagttcacaaaaatccgaacggatttctgggaggtataatttttctggtttaccttcagatccccggtacgggccgtggctttccagttgatgctttttaagtcatcctgtggttggtaatcccgaatgccccggtattcgaaagggtcttccaaaagatgtcgttttgtcagaacttctccgtttaactgttttaaagaccgtttaaaatccggatgggaaaagggcttcgggtacacatagagactgcagtgttcgatgggtgtcgtagccgtatactgtgctgtcaggaacagatcggacgcgacaagatccgcctcctgtatggtgtaataacctcttcttccgccggtaaagtgcagcgctctggtgaccttctccagacgtccgatctggaaaatatcattgcggtaatagcgatcagtggtccgggagcctttggtatcggcaaacaccagatgtctgtcagtctggaatttgaccttcaacatggtaaggggcagccgtttgcgattctcaatgatctccgacagctcgctctcctgtccttcccagatgccatcctcccggaaagaaagggaaaccttcagatcccgctgccatattttggcgtatacatatttctgcgccagatacagaagcagggcaaagacaatgattcccagcagttgtatcatggctcaaacctttctgtgggaacaggaacggtggaaaggatgttttccattctgcctgctgcggagccggtatcggaaccgaagctgcataccagtctgtgggccagcaccggaacagccagggtacgaacgtcatccgggatcacataggaacgtccctgcagataagcataggccttgacacagcgtaaaagcccaagggttcctctgggactgacgcctgccagaataccgtctgcccgtctggtggcttctgcaatctgtaccatatattcccggatgcagggatgaacaaaaatcttcgcagcctctgcccgggcagccagaagttcctccagagagaccacggcagtcaggcttttcaggggatcttcctccatgtacaattccagaatcctcagttcctcttctttggtgggaaggttcatggacagttttataaggaaacggtctaactgcgcttccggcagaggaaatacgccggcactttcgatgggattctctgtggcaatgacaaagaagggttcgcccggtgtataagagaccccctcgatggttacctggcgctcttccatacattccaacagtcctgcctgggttctgggggtggcacggttcaattcgtctgccagtaaaatattggtaaataccggcccctttcgcagggtgaattcattcttctgtctgtcatagacattgatgccggtaatgtcaccgggcaacagatccggggtaaactgcacccgggaaaactgggcatttaaagattttgccagtgccttggccagcttcgttttgccggtgccggggacatcctctaatagtacatgtccgtcagcgattagggccgtcagaagaagttcggtcacttcctcttttccgaccaggactttttgaatattgttttgtattctggatgctaattcttttccgttttgttcagccataattgttacctttttgctcatgaagtttactcgccctataagcattccaaaatattcttacgaatacaagtattcgacgaatatttacgaaatgcttacatggctctgaatagttatcattataccttataaacttaagttctgccagtaccaaaaggcacataaatatgaactgcgaagattgcagatacagaaaggaatgtaaaagagcatggaaaaacatgatcacagacataaggaagaactcttacagcagatgcgcagacaggcagaaatacggccagagcaaaacgattcggaacctgccgcatcttccgataccggtacgttcaaaatccgccttgctctggccggagtattattattgacgatcatattgctggatcaaaaaggcaaatgctttgccgggatctccatggatcaggtgctgcactatatcactgacgcagattacggcacttatcttaagacctgggtggaaactgcagttaacggttcgcaagctctgtagtgatctcttcccaggtgacatccttttccgccatcagcaccatcatgtgataaaggaaatcgctgatctcgtatttgacctcgttggggttaggattcttggcagcgatcacgatctctgtagcttcctctcccagtttcttaaggatcttgtcaatgcccttgtcgaacaggtaattggtataggacccctccttggggtggaccttgcggtccttgatcacatcgaagacttcctcgaatacctgtaagggattgttgctttcctcataatcctttttcgtgatctcattgaagaagcagcttctgcttccggtatggcaggcagcgcccacttgagataccttcgcaaggattgtatccatatcacagtccgccaccagttccttcacatactggtaatgaccgctggtcagacctttcagccataattcctgacggcttctgctgtagtaggtcatcttgcccagcttcagggtctgctcataggcttcctcattcatataagccatcatcagaacttcctgtgtccggtaatcctgtacgataacgggtaccatgccgtcactgttctttttgaaatcttcccacttgtaggcagcctggaaggattcaatgggaatatcgttctcccggcacagatccttcagggctacgatctctttcacattgtcatttatcgtattgccggtgacaccacagacattctcataagcaaaaatctccagcaatttattcaatgccacctgattgatctgcacgaaaaacggaagggaaagaatggcctgagtctcccggatctgatgagggttcatcaggatcatggcagagatatatttctcaatcttctccttatgtaattccagaacggacgggtcgttgtaagagatcagaatcttgtccttaccgaatttcagagagacctcttcggtaatctcaatattactctctttctcatagtcgagaactgcttttttacatccggcataaagtaatttcttaatgtcctccatacgcttgacattgccggcaccgatgacatccacttccgccctggtacagatctccttgatgatatccagtgcggcatcatgctccgcatcaccttcggacatatcgaaaacgatcagctcatccgcattgtgctcacagtaataatctgccagacggacgggatccgtatccacgatggtggtatccgtaagattccgcaccgcatgctcatgatataaataaatgcagggaacaaatttcttgatgatcatagtaatcctcacgtctttctatacctgcaaagcctatgccgcaggcacgtattttttacagacttcctttggtacttaaaacatccgttaccttcggattataggaaacggcctgatccagcgccttggcaaatgccttgaacatggcttcgatcatatggtgattattgctcggagacaacattttgatatgtaagttcattccggcactgtaggatacggcatagaaaaattcctttaccagctccgtatccagttcacctaccttcggtacagtaaattcacattcaaaattaagataaggccggccgcttaagtcaacggcgcacaaagcaagtacctcatccataggcagaataaaatagccgtaacgattgatgcccttcttgtctcctatcgcttttttgatagcttcaccgaagacaatgccggtatcctccaccgtgtggtgaccgtccacctgcagatcgcccttcaccttgcattccaggtcaaaaaagccgtgcctcgcaaagccgtccagcatatggtcaaaaaatccgatgccggtagacagatccgcttttccggtgccgtccagatttaaggtgatggcaatgtcggtctctttcgttgtacgggtcacagttgcaattcgttccataatatccgatgactcccttcccagaggaaatgattaatcttcaaatctaactttaatactgtttgcatgtgcggtcaagccttcactcttggcgaaggtctcgatctggttgtgcaccttttccagtgcctgcctggaataagagataatactggtcttcttgatgaagtcgtccacgtttaccggggagaagaaccgtgcggtaccgttggtgggcagaatgtggttcggacctgcaaaataatcacccaagggttcggaagcatactctcccaggaaaatcgcaccggcattgcggatacgggtcatggtatcaaaaggattctttgtaatgatctccagatgctcggaagcaatggcgttggcggcatcaatagcatcttccatgttgtcggctaacagaatgtagccgtaattgtccagagacttctggataatgggagcacgctccagtacttttacgaagccgtccacttcctcggagactttctccgccagttccttcgaagtggtaatcagaatggcacttgccagttcgtcatgctctgcctgagacagcagatctgctgcaacgtatctgggggtagcggtctcatctgccagtaccaggatctcgctggggcccgcaatggaatcaatgctgacatagccataaacagcttttttggcaagagctacgaaaatgttaccgggaccggtgatcttgtcgaccttaggtaccgactgggttccgaaagccatggctgcgatagcctgggcaccgccgaccttatagatggtatccacacctgcaatatcagcggctaccagagttccgggattgaccttaccgtcttttccgggaggggtggtcataatgatctcatccacaccggctaccttggcggggatcacattcatcagtacgctggaagggtaagcggctttaccgccggggacatagacaccggctctttcgatggcggtgatcttcatgcctaagatcgtaccgtcgggcttggcatcgaaccagctgttacgaagctgcttctggtgaaaagcgcggatgttttccgcagattgtctgatcacatcgatcagattctcatccatctgtgcataggcttcggcaatctcttcctttgtgacacggatattctctgcgcttaaagcgaacttatcaaactgtaaggtataatcgaacaatgccttgtcaccctcggcacggactttttcgatgatctggtttacagtgctctcatactggaaataattgttcggacttctctttaaaaggtcgttcaaaatactctgctttgattctttatccaatgctacgattctcatgacggtactctcctttaaatactttttatgacgatgcttatcgtctcggtcaggcctgtatttttaactgctcccggatcgcacccaccagcttgcggatacggtcggcttccatctgcatactcaccggattgacgatcatacgggcggacagaggacatacctcttccagaacctccagcccgttttcccttaaggtggaaccggtctcaacgatatccacgatgacgtcagacagctctaccagcggccctaattctacagaaccgtttaatttgatgatatctacggtctgatgctttttattatagaaatactctcgggcgatattggggtatttgctggctacccggatccgctcatggtgtttcaacaactctctggcggaagcaggaccgcagacacacatccggcatttgccgaagccaaggtccagcacttcgtagacattccggttttcttccagaatggtgtccttgccgaccacgccgatatcagcagcaccatactctacataggtgggaacgtcgggaccctttgccaggaaaaagcgtaatttgtattcttcattgacgaagatcagctttctggtatctttatccttcatttcttcacaggtaatgccgatctgttcgaaaagctccagtgtctttttggcaagtctgccctttcccagagcaaacgtaagatatctttcttcactcattactgatctgcctcctcgttctctgtgatctcgggggaaagcacggtgggaatcccttctttcctcagggttatgacttcggaaagcttcgccagataatctgcctcgtctcctgcccggtaatacacggttttgccggaagcgggaatatcgatattcactttctggcgggataatgcttccaacaggtcgtcaatgacgatgacgaaaccgatagctgcggcattcttgccgaatttccgaagcagattgtcgtaacggccaccctttaccacggcatcaccgataccgtaggtgtaagccttgaagacaacgccggtataatactgatatttgctgagcattccgagatcaaaggaaatgtattccgccacaccgtactgctctaagcgttcttttaacttttccagtcttgcaatcgcctgtaaggatctttcatttttaaccagtgccttggcagcctccagagactctatattttcgaacatatccgccagctttaacagaatgctgtgataaggctcggggatctgcttctgctccagtaattcctgggcagcgaaaaagttcttgccggagatacaggaacgaagttccttttccgtatcctcatccagaccggcttcctcacagaggccgcggaaataatccacctcaccgatagtcacctggaatctggtcagtcctgcgcttttcagagcttcaatcaccatactgattacttcggcatccgcctctacggaaggatctccgatgagttctgcacccatctgggtcacctcttttaatttaccctgcagattggaagtgtttgtaaacgtattgccgttgtaactgaaacgaagcggcaccttttcctccataaaatacttcgctgcgcagcgggcgatggacggcgtaaagtctggccgcagcaccatcgtattaccctctttatcaaagaacttatacagctccttactgggagtggttccgatctccttggagaaaacatcgaaaaactcaatggaaggggtctggatatcttcgtaaccgaaacaatggatcgcctgctgcagtttctgttctatagccagcttctttgcatattctttgccgtaaatgtcccggacgccctccggcgtatgtaaaagtctgttgttcataagcgttcctcaattcatacactttaatatattaacgtgctaccatattatcatagtagcatgcgaaactatttgtagtatactaggagacctctccgctgtcaagaaattattatttattattcctcccggtcttccagatcctttttcagaatatccagatagggaaccaggattccctgatgcttcgggataatatattccgggttcagttcctcgaaacggaagcttttccggccgccctcctgtgccctgtcccagaaaaagcggagcatttcatagggaaggtaatataacagatccttatggctgtaaaatatcaggaaaaaggcgatacccccctgtttctcgaactgatgcatgaactccacctgatggggatggatattttgcagggaaaaggtgtccaccgcacattccttggcatcaaagcagaccggaatgccctgtacgacaccgatatagtctacggtactcttctgttcgaaaaaggctagggtgatctggcggctctccttatccattttgaccggggtaatgggggtggggatcttctgaatcagggccagaccggcctcggcatatttttcattggtgcggttgaccatatcctccagagtagatccacgaagccctctggtattccatgttgccattgttcttagttttcctttctagcaggcgaaatccggtgtcagattcagagcctgtaagatctctgcaaatttatggggaagcggtgcgtcaaaagtctgaccgctcacctttgcaagaggtccttccgcttcttccgggaaacacactcttccggcatgcagaagctggtggtgcagagagtattccgattgcatcctgcgatttaatttgctgtctccgtacttggtgtcaccaagtaacggatgtccggtgctggccagatgggcacggatctggtgggttttgccggtgaccagttctacggtcagcagggtatattccccagccaccgcactgggagtgtagattgtttttataaaggaagcatcttccggagcctccgccatatctggaaatacctgtaccgtattggtgcgttcgtccttgtacagatagccttccagggtgctttcctgtaaaatcttgcccttacagacggtctgataatatttctttacggaacgatccttgatgatccggctgagtgcctgggaaccggccagcgtctttccgcacaatacgataccgctggtattgcggtcgaggcggttgcagaccgatggatggaaggtggcaagatcggtttcttttatggcatcggcagccagcaggtggccaatcagccattcgttcagggaaagatcttccggtttggctttctgggtcagaactccggcaggtttactcagcaacaggatattttcatcctcataaagaacgctgatatcctttaaggaacggtaagccttacggtaatcggaagtatcttccgctaccccggcaccggacagagaggcataagtttcctcagagaaaaaacattttacctcgtctccctgggcaaggatttctttaccttcagcctttttcccgttcaacgtaatatttttcttgcgaagcatcttatataaaaatccggtgcctgcattaggtaacgctttttttaaaaatttgtccagacgttgtcccgcctgatttttgccaatggtaagcaactgcataggacaccctccttttgagaagtaagttatagagatacgctctttaaggtctggcagatcccggcagacagttccggctgtgaggaaagctcctttaactgatcacatcttgtcagatacttgtccagatcgttaaatattttcacagagacttctctgtaattgtcttttttcagaatgtcctgaatgtgcttgtaaaaagcctgttccgcaaatttcggatccgtggtgtagccgcagaccgtattaccgcagactgtcagatgatagataacataattcttttcataggaagtaaataccatatcgtagagagtggtaaggccttctgtatgtgccgcgatttttgcagctacctgctcgtcacagccccggtagcgcaggaacatgaacatttctaccagactcttgcaggccggaagacatcccagtaccgccacgatggtcaggagattctcacggcttccggtgctgacccatccggcgataaacagagacagagagatggcaaaataaagcacggttcttaaaatctcataaattttctgtgtgcggagatacccgcgggttcctctataggcatcagtggtaaacattcttttgaattgcatgaaaaataactcctttatttatgatttctttccagcggcagacaagacttcgatctcttcttccgtcaatgcccggtattcccctctttgcagggaaagatccagggacagggggccgaagcttacccgctccagtgtaagtacctgattatcaaccgcctgcaacatccgttttacctgatgaaaccggccttcatgaatggtcaataacagatcaccgttttctgtaagtctggctttggacggggctgtcggtttctcatcaccgatgtcaagcccgttttccaaccggtggatatcttttgcggaaagcggcttttccggctttaccagataggtcttatccacatgttttttcggtgacaacagatcatgggccagagcaccgtcattggtcaggagcagcaatcccgtggtatccttgtccagccgccctaccgggaacagatccttttgttccgggacagtaaggagacttaccacggttggggctgtattatcgttggtggcagagacaaccccctccggcttatttaacatataatagacatatttcctataatggatcggctgtccctgacagaccaccgtatcggtctcttcattgacttttgtctccggctttttgattatctggtcgtttactgtcacctgaccttttttgatgtactctttcacctgacttcgagtgccaatattgttatcgcataaaaatttatccaaccgcatgggctttgatctctttcttagacttaatttttcttcatcggcatatagtatacaaacctttcaaggcagacagccatgaaaaaaatattcggaatctgtttctttgttctaatgaccggctgtattctgactcattcttccctgagccttgcctatgctgccttgggtctgaatctttggtatgaaaaaatggtaccggtgcttctgccgtttatgatcctgtccggcactttgatccgtatgggcatgacggacagcctgatccgcccagtaagacctttgttcggaagaatctttcgcctgcccggaccgggaatctatgtgatcctggtgggctttttgtgcggatttcccatgggtgcccggacgattgcggatttacggaaccgacaggaactttcttcggaggaaggacaatatctgctggccttctgcaacaatctgggaccggtatattttctgggttttgtactgccgctactgcataggaagctggtgctcccctatgtatttggtatgtatggcattccattgctatatggtatttccctgcgttatagcgtatacagaaatcggattccagagaaaacagaccaagctttcggaagagacaacgcagcgaagtttttggaaccggccggtctggctccccttcctgccatgtccctgccggatgccctggatgatgctattaccgctgccggaagaagcatcttacagttgggaggctacatgatctttttcaatctgttgaatcttctgccaagacttttacttcccgacagtttccggtatgcaccgcttttggagatcagtgggggcctgaagctgctgggagacagattccctttgtatacgttattgcttttgccttttggcggcttaagctgtatcgcccagaccggaagctgtatccgcaataccgggctttctctcaagtcctacatccttcataaaatggtactgacagtgcttactgcagcttattatctgggatggtttctgttgtctccggatacttttctgctttgatttttccgtcttcgttttctgtgtctgccctgttggatctggtataacaaaaagaccagtaacaacagcactaccagaatcccacagatcaccagaaaaacaccgaaattcacttccggacttttttcggaaggcaccggagtatttccggcggcatcggccatggtgatcacggaactgccagcttctgtgatctgttcctctgcagcccgggaagcttccgctgcctcctgtgccgcaagactttcctgtaatgcctcttcggcagctttttcctgatcaataaaaggctgtgcaaaggtgacaggatcactctctgtgaacagatccgcctgattgtaaccgcggacggtgatcaccggctgttccccctttgtgaaggtcacggaaaatgtgaaggtatcgggataggtcccggccataatatccagtcccggccagggaagcagttcggaataagtcctgcctccatcggtactataatcgtaatacatcatggggcagtcatagtcggctgccgtcacctccagagagacttctccggtctcatagtctgcattctgcaaagtcagctggcagatatccggttcggtcttgtcccgcacagtggcaggcagaatggattgcagcgagacttccggaagagcgtctgcctctccactgtagtccacaccaagacttgcactggataatccgaaatattttgcaacagacaaagcatcctccctgccgaatttcttccagtcctcttctgtctggcagtaaggagtgtctctgctctcatccacatgacaatgctcgatgatggcggagggaatggatctggaggtactttctcttataattccgtaatagtcatcaccgttatctttaagtttcgtcttgactccccgtagaaacagtcccatgtcctgcatctgttgcatctgttcccagccgaactgataaccgtaagcgttgtaaggctgtacggaagagatccagacttcggatccgaacagatcatgatccatggaagcgttgtaatgaatactgaacaggaaatccgcattccggtcggcagcaaattgtgcccggtctgccagagacatggtcacatcatccgtatgagtcagatagacatccacattatcgtattttgtcagttcctcgtacatggccagcgcggtcaccatggtcatttttttctcctgtgcagggccttccagcgttccctcgttatcaccgccgtgtccgggatcaatgacaatgacgaccctttctccggtctcctgcgctctgggagccgcctgtgcaggcagggaatttccataaaaacaggctgccacaagactgaccgcacagatcattgtcctgactaacagccctttttgctttttccatactttcatttatcgtattcctttatttttaaaaaaccagctttcagcagaaaactggtttttcgtactcgttgtttggacatgctttacataacgtccagattgtcttcggcatccgcagcagtatctacgtcatcaagatcctcatctacggggtgcagctcactgcggttggactggatgatgtcacgatactggttcagattgccgatcagagcatcgtaattggcgctggcctgctgtgtggaggaagaaataatattctccagatgtgccagcatatcatccatgtactgcatggcagcggatttgacattgttggcctcaatagtggcattgtccagaatctcctgggcctgcttactggccatggtaacgacctcgttggcctgggcgtaagcctgctgcatgatctcatgctcgttgatcagctcgttggtatgcacggtagcctcgttgatcaatgcttctgccttggctttggcatcgtttaggatggcttccttgttgctgatgatcttctggtagcgcttgatctcatccggggtcttcatacgcagttcccgcagtaactcatcaatctcatccttattcacgatgatttcggtactggacatgaacttcggcttgcaaccctcgatgtattcttctatttcatcaattaactgttcgattctgctgctcatgaaactctccttatttacacatcactatgctctgaaagctttttctcgcgatatttgtcgtagatcagtttcgccacaaaatccggaacacaaggggtgatatctccatcaaaacttgcaatctgcttgatggcggaagaactgaggtaggcatattccagactggtggtcaaaaataccgtatcaattttgccatgggacaacatccggttggtctgtgccatctgcagttcatattcaaaatccgtaatggcgcgtaagcctcttacgataacatgcagatctttttccctggcataatccactaaaagcccactgaaactgtcaatctgcacattaggcagatcttttgtggcttcttctagtatcttaacacgttcctctacagaaaacaacggtgtcttttctttattgttcaaaatgctgacgatcagaacatcaaatatttcggatgcccgccttatgatatccatatgaccgttggtgacgggatcaaagcttccggtgtaaacagctcttttcataaaaatcatgcctttcagtgttacttcctgcggaggaacacatgcttgttggttttgtattttttctcacggatcacttcaaaccctaagtcttccgcataggagaaatcggtatgcagagaggcttctaccaggatcagagtctcttcggagacatatttggcatagcgcagctgctctaagactctgcgctcctgctcctgatcgtagggtggatccatgaagatcacatccacgtgcttttcatagatgcccgtcagtcctgcgcaggcatcctgttttaatactatagcacggtctttcattttcgtaaatgccagattgtcctcgatacatgccagggctttcggcgcattttcaataaaataggcttttctggcaccgcggcttaatgcttcgatgccgatgccgccgctgccactgaaaatatccacgaacacacagtccggaatataggtctgcagcatattaaaaagggtttccttgatccggtcggtggtgggtctggtatccattccttccggagtcttaaggggcagacttcttgcagttcccgcaatgactctcatatgattactctccgttttctctataaatgttgtatgaatgattctgtttaaaaagttacactctcactttggtgcccttgctgtcacgtttgccgagtttcagattattcaggatgagctccttgcccttatattcaatggtggtctctacggcattcttcgtataatatacattttccacctgatcaccgtcgcccagtttcatgccgcggacgccgatggcacctttctttttctcggggatctcatctacggcaaagcgtagaaaaaaaccggcctttgtctgtaatacgatattccgctgatccgtaagagccgtaacgctgacaacgctgtcgccctccgacagcttcgtagctgcaacggtgcgcttggtcacatcgaactctccgccatctaccaccttcaacatggactgtgcagtggcaaagatcacctgacacagattcagttccttctgactggtgatatagacgatctcttcggtcttctggctgaagttactcacgttatcaatgggcatgcctttgtcacggaacttgccgtaaggcaggtccagcaccttgatagtgtgcatctgtccggtgttggtgaacaggcagatccttccggtatttttacaggtgaagacgtatttattttctgcatctgcggcttctttattccgctcgtaggtggagacatccacagtcttggcatagccgaatcgatccatgagaaataccacatccatctcttccagttctttttccttgtagaccgcttcctgtccgttctcgatgacagttttgcggggatggctgtattccttcttgaatccgtccagttcattcatgatgacctgggccatggaatctctgcggtccagaatatcctcatagcgatagatgtttgccatggtctcttcgtgttcgttgatcagtgcttccagttccagaccgatcaacttatacagacgcatctctaagatggcattggcctgtttctcggtgaacatcagctgggctgccatgatcctggattccttggacttgaacttgatgccgtcgaccttgccctctacgagacaggcttttgccatggcacgatccttggatccgcgtaaaatttcaatgaccagatcgatcacattacaggccttgatcagaccttcctgaatctccttgcgctcctgctctttagccaatagattggtatattttctggtagccacttcaaactggaagtcaacattggccttgatgatctgctttaagcccatagtctctggtctgccgtttgcgatagccagcatattgacaccgaaggtatcctccagacgagtctttttatagagcatatttacaaagttctcgggatcggcatccttacgaagttcgatgacgatacggatgccttccttggaagattggttggaaatatccacaatatcctgtgtcttcttcgtctcggaaagagcggccacgtcggataaaaactttgcaatattggcaccgatcatagtatagggaatctcggtgatcactacattggtctttccagcttttcccttctggaattccactttaccccgcaacttgatcttgccggttccggtctcatagatgtcttccagttcatccttattgataacgatgccgccggtgggaaaatccggccccttcaggtaacgcatcagttcttttgttgtgatctcattattgagcatataagcctttacggcgtcaatgacttccccgagattatgagggggaatgctggtggccatgcctacggcgataccttcggaaccattaaccaacaggttcggaatctttaccggcagtacggacggctctttttccgtctcatcgaagttcggaacaaagtctaccacatccttgtccagatctgccaaaaaagcttcctgcgtcaccttctgaagtcttgcctcggtataacgcatggctgcggcaccatctccttcaatgttgccgaagttaccatggccgtcgatcaggggcatgccctttttgaaatcctggctcatgactaccagtgcctcatagatggaactgtcaccatggggatgatatttacccatggtatcacctacgatacgggcacttttacggtaggggcggtcgtaacggatccccagttcatgcatatcgtagagagttcttctctgtaccggcttcaggccgtctctgacatccggcagggctctggcaatgataacgctcatggcatagtcgatgaacgatttctgcatctcctcggagtattctgtttttatgattctgctgtcgtccatttctaatctccgttcttctgatatctgatattaaatatcaagcgccgcatccgtagcgtgatcgtaaataaaggcttttctgggcggcacatccgtacccatgagaagctcggtcatctcggaagccatgcgggcatcctcgatctctactaatttcaacaatctgcgttccggatccagtgtggtctcccacagctgttcggcatccatctcacccagacctttgtatcgctgtaaggtaaagggacccttgtgggtcttgcggtatttttccagtgccttatcatcatacagatatttttcttctcccttggagggcatggccttatataagggaggcattgctatgtatacgtggccttcgaagatcagatccggcatgaaacgatagaataaggtcagcagcaacgtggaaatatgtgcgccatccacatcggcatccgccatgataatgatcttgtcatagcgcagcttactaatatcgaaatcgttgccgtagccctcggaaaatccgcagccgaaagcgttgatcatggtcttgatttcggcgttggccagtactttgtcaatgctggctttctctacgttcaggatcttaccgcggatcggaaggatggcctgatacatacggtttctggcagtcttggcactgccgcccgcagagtcaccctctacgatgaagatctcacacttggagggatctctggactcgcagtttgcaagttttccgttggaatcaaaggagaacttctgcttggtcagcatattggtcttcgctttttcttcggtcttacggatcttggccgccttttccgcacagccgataatgctctttaaagtctccagattgcggtcgaagaaccggacgatctcttcgccggtcaccttggccacggccttggcggcatcctggttgtccagtttcgtcttggtctggccttcgaaacggggatccgggtgcttgatggataccactgccgtcattccgttccggacatcggcaccggtaaagttcgcatccttttcctttaaaatgttcagctctctggcataggtattgatcacattggtgaactgggtcttaaagccggtaaggtgggtaccgccttcagagttgtaaatgttattacagaagcccagtacattctcatgaaattcattcacatactggaaggccacttccacagagattccttcgctctcgccggaaaagaaaatgacatcatggacggtctctttggaacggttcatgtcttttatgaagccaatgatgccttccggttcatggtaggtaaccttctccggttcttcttttctcttatcttcaaaaatgatcgtaagcttcggattcagataagcggtctcatgcagacggctcttaacctcatcttccttgaaacgggtcttgtcaaagatggtgtcatccggcagaaagttgatagtcgtaccggtctctctggtcttgcccactacgggaagcagaccgtccaccagatccatcacggggatacctctttcataacggtcctcatagatgcagccaccactcttgactcttacagtcaactttgtggaaagggcatttaccacagaggaacctacgccgtgcagaccaccgctggtcttgtaggcggaattatcgaatttaccgccggcatgaagagtcgtgaataccaggcgctccgcgctgattcctttttcgtgcattcccacgggaataccacgtccgttatcttctacggtggcggaaccgtccgcctccagagttacttttatcgtatcgcagtatccggccagatgctcgtccacagagttatctacgatctcgtagatcaggtggttcagacccttggtggagacactgccgatatacattccgggtctctttcttaccgcttccagaccttccagaacggtaatacttgaggcgtcataattattgtcttttgccatgaaatggagctccttctcaatacattattgtctatagtatatcacagattttgtgtttggaaaagcaaaaaatacaagggatagggctttgccggaaataaaaaaccaccggttccctgattctgaactggtggtcaaaattatctgttaggaaattcttaaattacaccgtgatcttcttacagcatgccagtgccagggcacctgggccgatgtggcaggcaacacttaaggacagtggatcgatatggatatcatagccggggaattccgcctctacctcggtgcgaaactgctctgctgcggccctgtcgtgggtataagcgatctgtaaccagatgtgcctatcctccgtcatgccgccgaaacgctcgttgatgtccttcttaatagcattgatcatcatggttttgccctgcgaggtggttcttgcctttgcaaaggcatccagcttttcaccctgaatggtcagcaccggtttcaggcgaagcatggtaccgatggctgcggccgccggagtgatccgtccgccttttttcagataatacaaggtgtccagcataatatagatactgctgttgaatttatcattttccaggaattctttgatctgggccgcgtctttaccggctgctgcaagctgtaaggcatccagtgcagactgacgctgggttacggagattctctggttgttcacgacctgaactctgccatcataatctgccgcaaaggccatggcactctgacaggaaccggacagaccgctgctcatgggaatgtgtacaatctcgtcatattcctgcaaaagcttgtcccacagactggtgacactgtcaggagacggctggctggtggcaatattggcaccggatttcagcttttcatagaactgctcctgtgtcaggtcaatatcttcataataagtgacttcatcaatcataaaaggcatgggaagtacataaattccaatttttttcccctccgcctgcgtaataccgctgttactgtctgttacaattgctatttttgccatttggtatctaaaccttccctttgcattattttgcagaaattacccgattcgcagtttgaaactttgaacctaaaagtaattttactgtcagatggtccgaaagtcaaccatatttgccgagcgatgttcctcaaaatattgccgcaacggcagcgtgtcttcgctgctcagttccggatctgagcataacagcgtatctacggcttcagaagcctcctttaacagtgatgcatccgtatagatatctcccagtacaaaagaaaattcaccgctctgccggattccgaagatatcaccggggcctctcagtttcagatcctcggaggcgatatggaaaccgtcgttggaatggttcaggatctgcagacgttccatggtctctttggcctcggaagtactgatgaaaatacaatagctctggaattctccacgtcctacacgtccccgcagctggtgcagctgtgccagaccgaagcgctctgcgttctccaccatcattaccgtggcattgggaacattgatgccgacttcaatgactgtggtagagactaagacatcaatctctttgttggcaaattcttccatgatacggtttttgtccgccggtcgcatctttccatggagataagctacctgtacagatggaggcagagctgcccgaagcttttccgtatagtccacgacgttctccagatcttcagattcaccctcttccaccataggacagatgacataagcctgtctgccggcagccacctctctggcaatgaattcataggccttgggacgataggaagttcctacgacgcagttcttgatcggcagacgatttgcaggaagctcatccacgacagaaactttcagatcgccgtataaaatgatggccagcgtccggggaatgggggtggcactcatgaccagtacatggggttcttttcctttggcggccagtgtctcccgctgtcttactccgaaacggtgctgctcgtccgttaccaccagtgccagggaggcatattccaccttctcctggatcagggcatgggtcccaatgatcagattggcctcaccggaggcaatttgggcgtaagcctcccgcttctcttttgccgtcatggaaccggttagaagcaccggacgaaaagcaatgccatatttttctacatagcccgaaatggtctcaaaatgctgtacagccaatacctccgtaggggccatcattgctccctgataaccattagccgcacacatgagaagtgccaacactgccaggatcgtcttaccggagcctacatcaccctggatcagccggttcatggcataaggacttcccatatcctctctgagttctccccagacctttttctgggcttttgtcagaggaaacggcagctgctccagaaatcttacggtatccgcagtctcatacatgggaaaatgattctccgtcttcgccgccagatctttatttttccgaagaaccagtaaaaaagaaaagaattcttcgaatacgatacgattccttgctgccagcagttcctcccggttttccgggaagtgcagtgaattgacagcttccctgtgggaaagcatgggtattttttgcaatacggactgcggcagatattctttttccgggggataatattccagtgcctgggctacggacttctgcaccgtctggttggtcagtcctttggtcagggcatatctgggcagaagccgacctgattttttctgatattcctcccaggtaaacattctgggctgctccatgatcttatgagtgcccctctgctgtaccagaccacggaacagatagaatccgccgggttttaacaccttttttaaaaatggcatattgaaaaaagttagctgaatggaatctccgttgtcatccgtcagcacagcgttcaggatcgacagattccggaccttcttcacattgggaatggccgtgatctgcccatagatggcctgcacactgccggcagacgcctcccggatgggtaccggagcatcataagtctcgtaatccctgggataatgtccgatcagatcctccacggtaaaaacattgatcctaccaaacagagccgccgtcttctctcccacaccttttattctgttcacaggtattgcatcactcatcccagtccctcttttctatttaaatggaaagttagttaaatacattggcaaaatccacgaactcccggagcatgcgatacacatgtctcgatgtaaggtctccggatgtgaattttctacgaaaagtgatgagtagttctcgtcatgacggggccgcctacagtcgacatccatgtcgacaatcggctgacgcggacatcgtgtccgctttccccctgcctttcagcacttttctagaaaatgtcaacatcctccgacaaacatcttcgacatggcaccgcatacgccgggagttctgcgttttggaaagctttcaaaaaccagtagccccggctgggtataagaataagcagtgccgtaagcagacgtcggtaccatagcgtcccaagggacgcattgcggtcgtattgtgaccgcttatgtaccgctacgctctgcgacaggagcgcatcgtactaaagtacgagcgtgccgcgtttcttataccctgccaagggctacggggatttgatagcatttctttactaactttccatttactctacagaaacagtatagtaataaataggttgtccgccatactgcagttcaatatcgcatgcaggataagcctcttccagatctgcacgcagtgcttcagcagcatcttctgccacatcacagccatagtatacgctgatcagttcggaatcctcatctaccagctcggcgatcatatcacgggtcacctttaccatatcggtgccaacggctacaataccctgatcaccgatacccatgaagtcatccttcttgatctccttgtcatcgatcacggtatcacgtaccgcataggtaacctggccggtcttgacattcttgatctcacgaagcatggtctcttcattctcttccacagacagctcaggaacaaagttgatcacagcagtgataccctgaggaatggtcttggtgggaatgactaaaagctccttgtcagtcatcagttccgctgcctgattggctgccagaatgatgttcttgttgttcggaagcacgaagattgtcttcgcattcaccttgtctactgcatccagaatatctgcggtactggggttcatggtctgtccgccctcgatgatataatccacaccgaggctcttgaacagttcactcaggccgtcacctacagagactgccagaaatcctacttccttgggaggctgtgcagccttctcttcttccgctttcttctgcgctgcttctttttcggagagcttgaacagcttctcctgatgctctaagcgcatattgtcgatcttcatgttggataatgcaccatacttcaatgccttctggatagccagaccgggatcattggtatgtacatgtaccttgaccacatcgtcatccgcaacacatacgatagaatcaccaatggactctaaaaatgccttgaaatccatctctgcttttacgttgaaaggcttatttaacagaatgatgaattcggtgcaataaccgaacttgatctctgcctctgcctgtacttccagagaactcttggtatcctctgccttcgcagtagctgcgggagctacggtcagatcgatctccttacctaagaatgcgtcatacgcaccacttaaaacttctaccagaccctgtccgccggaatccactacgcctgcctgctttaatacgggcagcatctcaggcgtctggctcagtacgtaacgggcatgttcgatcacagatcctaaaaactgctccagatcctctgcaccatcttcacacagctcctttgccttatcggaagcacctcttgctaccgtaaggatcgtaccttccttcggcttcataacagccttgtatgcggtctccaccgctttatcaaatgcacgggtcagaacaggaatatccagaacctgctcttccttgatgctcttggtaaagccacggaacagctgggacaggataacaccggagttacctctggcaccacgcagggaaccgctggaaatagccttgcacagggcagccatatctgcatcctcgcccagtgcggacacttctcttgcagcagacatgatcgtcatggtcatattggttccggtatctccgtcaggaacggggaatacgttcagttcgttgatccattcctttttattctctaaattcttggcgccggctaagaacatcttggaaagcatcttagcgtcgatttgttgtaaagccacaattacttcctccttaatcaatcactcttacaccttcaacaaagatgttgatctttttgatctcaataccggtaaactcttccactttgtattttacgttgctgatcagattgtcggtgacagccagaatgctgacgccgtaagctacgatcacgtggaagtccagaaccagtttattgttgtccagggacacattgatgcctctggtgatgctgtccatcttaagcagctttaccagaccatccttcatgctgactccggccatacctacgataccaaagcactctaccgccacgctgccggcatactgtgcaatgacttcattatcaatgacaatatttcccatatgggtattcatagaagaacctttcatatagaacctccttcatattcggatcacttgtttcttccgatatgtctgcctgaaaatctacagttcagacatatataaatgtattttaacagctttcctttgaaaaagaaacaagaaaataaaaaaaataaatattttttgcttgcttttattttggttttctgttaatatatcaatgttgtgagcatttcacatgtattttattgaaaaaatttgtttaaaagtaagcgtaagatgcgcgttagatcgaggaggtgtcaagatggctaaatgtgatatttgcggtaagggcgttcattttggtaacaacgtaagccattctcatagaagaagcaacgcaatttggaactctaatgttaagagcgttaagtgcaaggttaacggcggagctagaagaatgcatgtctgcaccagctgcttaaaatctggtaaagttgaaagagcttaatcttctgcgataatattggattttaaaaagccagaaatgaaattcatcatttctggcttaattttttgtttgtaattttccatgcagttaccagaaccgctcttcctgtttccgtttcagatattccttgttgatctgtccggccagttcaccgtcaccgaacaggttgtccggatgaaagatcttaatcagatcccggtatctcttccgtaaagccagcggattattgactccccggaataaaagctgtaccgctgtaaaactgccctctccgggagcctgccctgtggcctgctgttctctggcttcctctatgagtatctgccgttcctgttcgaacttcttccggtcttcttccagctgtcggaacccctcctgtaaaatggccattttcttctcaaaaaacagattctcttccttcagccgtttccgttccatgattgtacggcggtttaattcatccagctcgtcccgcagtttcacccgctcatccagaaatttgttccgggcctgttccagttccgtacgctcctgctccagctctgagcgttcctgtttcagacgcatattttcctggaaaagccacagttttatttctttcagttcttcggtactctctgccttaatgacctcttcccaatcaatcatactgcaccctcttactcgcaaccacagaaaagataataccctgcaaataataaaagtgctaccatgatcaagccgataaaacggttatggatcacgagcatgagcagcatgccgacagccacaaaaaagagtatcagaccaatgatcttcttcatctatcaaacggatccagactgttctcactttattatatgcagagtattttaaatattacttgtcttctgtagttttctcttcctcttcaggaaatgcgatatctaccacttccgcatcggacatttcttctttttccttcggctgggtaaatttatctacgatatcgggaatcatatccagaatcttggtgactgtatcctgattcttgatatttaccagcttggtggaaccgtttttgatgaccagaaccgcactgggggtcatcttaccgcctaagcctccggctccggatgcggattttttctcggaattattgccggctccggcaccgacaccaaaggtgacatccacaagcggcaggatgatcgtatcgccgatctttgtagcctcaccgactacggttttagtggataatacggtatccatacccttcaacagggattctacaacgccctgaaactgattctctttgtctgccataacaaacctcctgttttacactgttattttttctgtgtcttctgatattgtctgattttatgcaacaattcccgtaatcgccgatctaaaagtagtcggacggaatggaataatacacaggccgcggtaaaatgtccggaagccttgaaatccccttccagaatcgcctgttcaaaatccggggtaatgcagatcccctttcccagcttcggaagcaccattccgtagataccatacagatatcccgtagtatccggagaaccggtgccgaccgtggcattgaccgtaagctttctcgggcgcagccgcttccagatatgtccgaaacgtttcccggcatgtttcaaaagtccctgggtatccgggtcattccataggttcttgtaaaatgcaatgttttccagaatatttttgattttatcacaaatctttcggactgtgtaccggattcttgtaaaaaatccgtacagacgatccgtagtcttcccgggagcttctcccgctggctccggcgttcccggttccgggattctggaatcctccctttccgcagcagactcaacatctgcggccgttgccgagaatgccgtgggatcttctgcttcgatcagcttaggcgtcccgacagattccggggtatgttcttctgttgtctgctccgcagaagcgggtgttttctcgttccctgtcgtttccgtagatgtccggtctgttttctccggcttctctatggaagaatcatatagcgtaaagaataaaaactttacgcaaattttcccgggatcaggataatcgcagttcatccgcaatagaccgaacagccattttactctcgcggtgatccagaattcctctgccgtccgctttccggcagctttgtaagaaatcggaaagaacagaaccaggagaattaccaccagtgcgattcccaacaggatcagaagcacgatcccaagaatactcaatattttaaaaagaatcgtcaacatagtaaatactcccgcagattacagtcccctctggctttcaggcactctccggtgatccgttcgatcagctgcagcgcatcctcgtagccggaagccataccgagaacgagaaattcttcgtccttataatgaggctgtaccaactgtctggcatcaaaaatatccagctgatccgccggatttctggccggagtgatcagatatacattggccagaagaggctttttattcagcctcttttttagtttatccagtttttccggcgcgatgccctctccaagatagagattttgcgcaaacttcagctttcctgccatacacaagttccttaaatctttttctcctagtatagcatagtttcctttatattacaatttttgttacttgactttttagcatgatattttatacttgaattagtacaaatgaggaggatacagctttgaaggttattactaaaatggagttacagccagatatggtcctgggggaggacattctggatcaggatcgtgtgatctaccctgcaggaaccaccatcactccgcagatcattgagaaattgaaacggtacaatctggtatgtgtcaccataatggaagatgttgatttcgccactacacattatgccaagattcgttttgattctaatttcaaagcattcgaacgtgcttatccgttgtttttgggacaatataaattagccatgaaacaactgctgatcatgggaagaaaaccggcggatattattctgctgacaatttacaacgaattgtattattatattacttccggcccggtactgttagactatctgtacaatctgatgcccagtgaggatgaactcacctatacccagggactgaatgccgctcttctggcggggaccttcgctgactggctgggaatgagcgaagaagagaaaaataccctgatcctctgtggattctattatgatatcggcaagctgcagctgccctatgaactgttatggaagcccggcaaactgacggatgaagaattcaaagttatcaagactcatcctgtagtcggttataccaccgtacgtaatcaggatctgaatgagcatgtgaaaaatgctgtgatcatgcatcacgaacgactcgatggcagcggctatccttaccatatgtccggacagagaattgatgtcttcgcaaggtatattgccattattgatgcctatattgccatggcgtctcccagaacctaccgtaatgcgttgacaccgttacagattcttgggaatttcgaaaagagtctggataaatatgacgtggaattattgatgccgatcatgaaacgtattgcagatgcccagatcggaaccagcgtggaactgaatgacggaagcatctgggaagtactgatcattcatcccaacaaatactcccgtcccattttaaaaaatgataaaaacgaatttgtagatctcttgcagagaccggatctggaaatcgtcaagaatgtttaaaaatatttcagaaaagcaggaataatcaatttttccattgattattcctttttctttcctgataatccgcataggctttttccagaatctgcttttcattggcaaatttcagaagatggtatgcttcatgatatttgtaaaagccggaatccacaaaatactcttctctctggggcttgctgtaatagctgtccgttcccatcagataccagtggacttccttctccaccacatcttccggtacggtaaaagaatactcgcttctgccgatataatctacaatgtatgccttggaaccgctttcctccagcacttccctgagtgcggtctcctcatgggtctccccggcttcgacggtacccttcggcaatacccagccttcatatttattcttaatgttcttatacagcagcaggatcttcccacggaagatcacaacgccaccgcaactggtagcctctatcatgattcttttgactcctccgatcactctttctggttgaagtaagcatcaaacagacgtcttgcaatgggaactgcgtaatcaccgccacttcctgcaccttctacgataatggtgacacagacttccgggtcttctgcgggagcaaaaccggtaaaccaggcatggctgtcacccttgatattattgtattccgcagaacctgtcttaccggcagccgtatagtttaaacctcttaacttggaagcagttccctcttccacaacatcggtcatcaactgtttcagaatcgcagattcgtcctctgtcatcagacggccgtattccgatgccttaaagctttttaccacagtaccttcatcattttccacatgatcaatgacatagggtttcatcagaacaccatcgttggcaatggcacaggtgatcatattcagatgcatcggtgtgatctgggtcttaccctgaccgatggaggtctgcatcatttccgcggaaggtgtactttcggagacgatagccgagcttttggcataattcagcgtaagtggcagatctttattgaacaaaaggtcattcagagtctcctgaaaagcctctctgtccaggctcattccaatattggcaaaggacgagttacaggattttgcaaaggacttctgaaagctgacctgtccgtgactggaaccgtgataacaactgattttgctgtctcccacccggaaagaaccattacagttataagaataattctgatacgtggtgggattctcccggatatattccaatgccgttacgatcttgaaggtggatccgggcggataaagtccctgggtggcgcggttcaacagtactgtactggaatcattgtcgatcagatcatcccagatctccggaatggtattcggatcaaaatcgggatgcgacaccattgccagaatcttgccggtagacacttccgttacaatgatggcaccacggtaaatatccagctggtcgttggccacctgctggatctggacatccagtgtggtatatacattatctccgggattctttttcccggcagtatcgtttttcactttattgctcagggaggtattggtgttgatcagatagtaattggccagagcctccactcccatgcgtccctgagtggaataacctacgatatgagaaaacagattcttatacggatagtttcgagtctcctcttcatccgcatccagtatcgtctctgccagaacatccccatccctggaataaatggatccgcggtaattgcgggacagcagaatctgctgacgggaattataactgttgttgatcatatcctgttcgctggttgccacaaaatgacacagatagaccaacaggcacaagaacaggacaccgatgcttccggcagaaagccagatttcccgctggttgcccatacgttttctgttccgggcgtcctttttgctgtcggcatcttttttctgtgtatttttctgcgtattctgcgccttattttctgccacctctgcgctctccttccttctgcaggcgaatatagattccctgtataatgaaaaacatgatcatggtcgtcatgacggaacttcctccatagctgatgaaaggaagtgtcactccggtcagtggaatgaacttggtaccgccgccaatggtcaggaatatctggaaaatatacataataccgatgccgtatacgatcagctgatagaatctgtcatgaatgcatactgccacccgcatcatttccagaaaactgctgacacagatcaggatcagacatattccgaagatcacgcccagttcctcgcagatggaagaaaagataaagtccgcttccacataaggaatcgctgtgggattaccttttaacagtcccatgccgaaccagcttccactgccgatggcaaataatgactgggtgatctgatagcctttattgtcaatatatttccagggatcctgccaggccagtactctgacccgtacatgatcaaacagctgataagccagataagaagccgcacctccgccgacaagtcctgccagaagatacagataatttcttgtggcagcaaaaaccacaaaaacaaagcccacgaaaaagatcaaagcacttcccaggtccttggatactaccaggatcaccacatgggctcccgcaatgatcgccgtcagaacgactctctggaaggagacattttcccacaacgctcccgccagaaagaacaggaacaggatcttgacgaattccgaaggctggaacgtgattcctcccagggaaaatgaaatcttggaaccatgggtcacctctcccaggatcagcaccgtactgagcagcgcaattcccaacgtggcatacagccaggtgatcttcttaaaaaagtggatctttcccagcagatacggaaccagcagggaaaagatcagagataccagtacgatcacatattgccggatggccttgtcaaaagataatctcgatacgatgcaaagaccgattcccagaagcatacacatattattcagcaaaagcctgttaatattctcgtagatcagcgataccatcgtgatcgtagcaaacagaaagatcagtataaatgcaaagaaaaacaaatactgaaaatctccgctgacaagggacaggttcagaaaacagaggacctgcaccagaaacatcaaaagaccctgtataataaatactccacgatgcttctctcccaccggataccgaaaggtataaaaacagcttgccgtatataacaccataaaaaaggcgataaaatatttggataattcaatcacatattcctgcatggatccaaaacctttctgtctactctactccacgtttttcatgaccggtggtatattccccatagggcaattccttacgggtaccggcaaaatactccaggacttccaaagtctcggtctcattttccgtggtaaaatccagccgtccggtcaccaggccgctccatttacataattccttgtgcaaggaaagcggaacactgttatagatcacattaaaacagtgggtacaattccgctgaaccggaaatcttttatgatagcggtcgatcagatccaatgccttcggattctcctgcggctgacaccggtcagtggtcttctgcacgcagttggcggtgaccatcatagggatcctgccgtatattactttttccgcaggaaacgcaggatccagaatgtccctttgctctgcggcattcagctccaatggcagacaatagccgtctaaaaatgccttccagaaatcccggctggtccggttccagagatacagactatgatccccatagatttcttttccggtaaaattccattgttttaataacgcgatatgttccatatttgctgcctgaaagccatttatatatgccagattttccagcagcaatttccgtaatttttcaagatactgcccatcccgcaggcgcaggatcttcggcagagcgatcacagattggatctctttttcagtaaggcttctcaaaatcttctccgcagcggacggatcctgtaacaggaaatccgcatccagatagagtctgagttgtccggcggttctgaccggatctttccagaaggatgaactgcaaaagccctgccattgttccggggtccgtatcgtgatagcccatttttcatcggatttttgagactttatactatcgtttttccgaaaatcaccatcgtcagccagtgtcggagctttttcggaagttctctcataaaggaagccgtttgcaaggatcacttgttcttccagcagggaaagtccctttcggcgtaactcgttgatagcttttaacgggtagaaagcattgtcacttacccggattccgatggagtcctccagatggaagtgactgtcgccaagtttccccagctgttttgctatattttcctgtgtgatgggctgtcgggaagcttcttctaccacattcccttctacggtgacggcactttctccggtccacaaatacaattttgcggtctccccggtcagaaattcagcctgcatggataccggaagggtcagcctgtgttccagatgcttcttccggatattctgaagcaaagtctcattactaccgctgtaagccgggctgtccagagtcaccatctccccgccgttgtgcttgtgataataaccatcctgtctctcactgcgaatatagaggcaggaaagcgtatgcatatctgccgcagaaatcttctgaggagctttggaatccgcataataccggtcaatatatttgcgataaattgccgtaactccggcggcatattccggcttcttcatacggccttcgatcttaaaggagtcgatccctgcctccagaagctccggaatatattcaatggtacacatatctttcaggcttaaaggataacattccttcggatgttttccagtggtatagggcaggcgacaaggctgggcacaacgtcctctgttgccacttctgccccccagaatactgctgaacaggcactgtccggaatagcaataacacatggctccatggataaagcattcgatctcaagccctgtgacttccttgatcctgcggatttccgcaaggctcagctctctggcgggaactacacgacaggccccctgttccttcagaaaagctgccccatactcccctgtaatggtcatctgagtgcttccatggagttccatccctggaaaatgttctctgagatatgcaaacactcccatgtcctggacaatcaccccatccagtccggcccggtaatagggcaatacatattcatacagtccggaaaattccgattcttttaccagtgtgtttaccgtcagatatacttttcgctgaaaaagatgagcataccggatgcaggcaaccagttcttcttccgaaaaattttccgcataagctctggccccgaaacggctgccacccagatatatagcatccgcaccggcatggatagccccgtaaaaggcttccgcatttccggcaggtgccagtaattctactttttttgctgctttcatagatttcagatttcctctattgcattcgattcatataagcaaatagctgcccgaaaacggacagctatcaatttatttgtcttttaattctgtctccagacgtacaatcttcttggcgtcttcatttaactgcttttgcagttccttcccctgcttttctgcattttccagtttgatctgtgctgaaatcagttcatgcttcagatcataaagctctttttccttgccctgcagttcttcctccagaatggagatctgcttcttggctttaaaataatcatctgcaatattcaactggagcagaatgttctgcttatccagaggttgtctgcgaaagccgtccagcttcccgtattcggtaatctttccattgatgtaggaagcaattttctgcatataatcttcactttcatagccgcttaaagtaaatacttttccgcctatgatcacttctgtatctgtcttaggtgacatctccacacccctcttaacactcttttgaaaaacacaatatatgccatttacgcaaaaatataatacaagatttattatatatcagaatgtatagggtggcaagtaaaatttcgtaagctgcacgtatcaattcagtcccagatgatgataggtaagatctgtgactacacggcctttgggtgttctgttcagaaatccgttcttgatcagatagggttcgtagacatcctctatcgtaccggcatcttcaccgatggcagctgccagggtatccagacccacgggacctccgtcgaatttctcaatgatcgtgaccagaatattgcggtcgatatggtccagtcccatcttatcgacatccatcagatccaatgccgttctggctacctcctcggtaatgatcccgtcgtatttaacctgtgcaaagtcacggacacgttttaagatccggttcgccagtctcggtgtaccgcggcttcttctggccatttcctttgctccggccggttcgatccccacgtccaggatccgggcggaatgcatgatgatctgctgtaattcctctatggtataaaattccagatgatggatcatgccgaaacgatcccgcagaggtgcagtcagaagtccggcacgggtggtcgctcccaccagagtgaatttcggcagctccagacgcacagatctggcactggaaccctttccgatcataatatcgatgcagtaatcctccatggccgggtacagtacctcttccacctgacggttcagccgatggatttcatccacgaataacagatctccctcctccagattgttcaggatcgccgccatttcaccgggcttttcaatcgcagggccactggtcaccttcatatgcacacccatttcgttggctatgattcctgccagcgtggtcttgcccagtccgggaggtccatagaacaacacatggtccagtgcatctccgcgctgctttgctgcggtaatatacaccttcaggttctctttgatcttggactggccgatatagtcgtccagtgtctggggccgcagagagccttccagtttgatatcttcttctgtgatatttgtctctatcattcttctaggcataatttatccggttccttaaaacaattttttcagggcagctttcagaatcgcgccggaatccatggtctccacatcctcaagggcattgacagccttgaggctctctgcctgtccgtatcccagtgccaccagtgcttccacggcttcctttttcttctcactgtcaatgtgcaggctaccggcagtcaggattccctgggctccgcctgcggcgatctctctggagatcagtgtatcatcaatggagagcttatcttttaattccagaatcaggcgctgcgccgtccgggctcccactcccggggccctggagattgccttggcatccccggacataatggcaaaccgcagagcatctgcatccatgaccgataatattgccagcgctcccttgggaccgattccgctgactgtaatgcacagcttgaacatttccagatcacttcgggagagaaaaccatatagtaaaaaggcatcttccttcacataggtataagtgtaaagccgaacttcttctccgattcccggcagcctggaggctgtatccgcagaaatccttacattgatgccaaatccgttgacatcgatcacagcgttatctaccgtggcatcttccaaaaagccattcacatatgcaaacatatatactaagtcctcgtctttcctgtcctgcaaatagtaacctgtaaaaatcggctacgatatgtttatcataccatagccgaacatatgtttcaagcaacttttctgttttctgatttccatcagctctgaatctgtttcaactgataaaattctccctgcagagccataagttcttcataagtgccgtactctgcgcagcgaccgtctgcaatgacagcgatcctgtcggcatcccggatggtggacagtctgtgggccacgataaaggtggtacgcccttctgtcagattgttcagcgcctgctggatcagcttttctgaaatactgtccagagccgaggtggcttcatccagtacgatcaccttcggatcccggatcagtgctctggcaatggagatacgctgtctctgaccgccagacagtttgccgccgtgctctcccaccatggtatccagacccttaggcagtgatgcaatcagatccgacagattggcagctttgatcactttctgcagttcttcctccgacacattttcgcaaccgtaagtgatattgtcacggatcgttccggagaacaggatcgaggtctggggaactaccgccaggtgctttcggtaggtgcgtagatcgatcttactgatatccttgccatcgatcaggacttttccgctttccgcctgattaaaaccgatgaccagattcaggatcgtagactttccggcgccggattctcccaccagtgcaatagtctctcccgatttcacatgaagattcagatggttcaatacattatgctcgttatttttataatggaaacatacgtcctcaaaatcaaaagtaccggtcacctgttccagtttttccttgccctcattatcttcgatatcttcagataacaatacttcaccgatggaattgacggattcaatacccttggcaatggtaggcagcagggtgacgatggaggacacctgattgactaccgtggcaaaataactctggtacaatgtgatatcgcctgcctgaattttgccgccaatggccagatatccggtaaatgccagacagatcacctggaagatctggaatactgcccagcccaccgagccaaacaatgcctggatcagatccagtttgtagcctttttccgccacagcaaaaagctggccgctcatttttgccacttcttcgtcctccagggcatgtgctctggtcacaggcacaagttccaccatttccatgactctggcggaagtctcttccatttccttacggaattcagtgttccgttttttcatgatattccggaaagtgaccatggtgatggctgctaccggtgtggtcaaaaggaaaaagataaatacgatccggctcttgctgatggtgaccaccagcgccacaccgatattcagcgcaatgttcagaatgcttaaaaataactgtgtggaaagcccctctaccgcttccacgtcacgcatgatcttggactgcaatcgcccggactgagtctccacatgataggaaatggataactgctgaagctttcggatcaatgctttcctcagtcccgtctccgcatagcgggtggccagactcttgtaggaagtatacagatagttcatcggaatgttcagcaggatcagccctgcttccagaatactgtaaaaaataatgttccgaaaagtatccgggttgtgggatgtcacatcattgatgatattggccgtaatgatcggcagtacccagacgcaggcatgctttgcaaaaaagcagatgactgccagaacaaatttatgataatttcccttgtacagatgcactaacgtccgcagaggatgcccctgattgttccggtaacattcgataaaccagctttcgatatccattttctgcctgggggatgtttttgcttcaaaatctttcataccgcttttcatgcctttccgtgatctgcgcatttatgtcttttcctgtccgcagatctgtttcatgtttcaatgccacgtttctattttccgggcttacttattcattttatcgcaattaatatgtattttccagtttgtttttgcggttttcctttgaaaacaactgattttttgccaaaaaaggctgtgtcagaacttttacattcttacacagcccttttgtcatagcattggattttttacagttgattagttgttgatcagcttatcactctcgttgttccagctgtaaagcttacggatctcttcgccgactttctcggaaggatgctcagcagcaagctttctcatagccttgaagtgaacctgcttgcctgcgggagacatatctaacaggaattccttagcaaaagtaccatcctgaatatcggacaggatcttcttcatggtcttcttggtctcctcggtgatcagcttggggccggtgatgtagtcaccatactcagcggtgttggagatagaatatctcatgcctgcgaaaccactctggtagatcagatctacgatcagcttcatctcatggatacactcgaagtatgcatttctgggatcgtaaccagcctcaaccagagtctcgaaaccagcctgcatcagagcacatacgccgccacacagaactgcctgctcaccgaacagatcggtctcggtctcggttctgaaagtggtctccagaacgcctgctcttgcgccgccgatacccagtgcataagccagtgccagatcctgagccttaccggttgcatcctgctctacagcgatcagacagggaacacccttaccagcctgatactcacttcttacggtatgtccgggtcccttgggagcgatcatggtaacatcaacgttcttgggaggtacgatacatccgaaatgaatgttgaaaccatgagcgaacatcagcatattgccctcttccaggttgggctcgatgtcgttcttgtacagatcagcctgcttctcatcattgatcaggatcatgatgatgtcagcacgctttgcagcttctgcagcggtgaatacttcgaacccctgtgcctcagcctttgcccaggacttggagccctcgtacagaccgatgataacatgacatccggaatccttcaggttcagtgcatgtgcatgaccctggctgccgtagccgataattgcgatagtcttaccctctaataaagagagattacaatcttcctgataaaaaatcttagccattttcttctcctccgttatgagacataaaatttataactgatagggatcttccctagagctaacataaagtgtgaggtcttacgcctgtcagtcctcaatcttcaatataggtaacgttctcgatacctcttcccagacctgtgataccggttctggcaagctccagtacttcgtactcttccgtaaaacgctggatcagcgcattgaccttgctgtgattaccggtaaattcaacgatcagattctccgcacctacatcaatgatcttcgcacggaaattgttggcaaggaattctaccccctggcgaatctccagacgcttttcgggatctactttcaccttgaccagtaccagttcgcggtacacgctgtcatccgggtccagttccttaatatcccggacatccacaagctttcccacctgcttctcgatctgttccagaatatcgtcatctcccgatgtcacaatggtgattctggtaaaacggggatcggcggtcacacctgccgtaatactttcgatgttgtaaccgcgacgggaaaacaatccggcaatacggctcaacacacctgaagtgttgtcaaccaacagctgaaatacttttttctgcatgaatatctaccatacctttcgtatttctacagccgtcctccctgacggagcagcaactgtattcttaatatagcaagatgactacagaatgtcaattagtgaatttaacattatgattgatgtattttaatcatcattttccgtgcattttgataatgccaaggttcctgttcgagctacttccacaatactgatggtctgaagcatcttgatcagagtgtcgattttctccggagcatcgcaaatctgcagcatcataaagtgttttgacatatctacgatctctgttttcataatgtcacagatttctataatatccctacgattattcttgttatatttaacttttaataacattaattcccgggtatagcactgttcctgggacaaagtcttcactttgatgacatccagtttcttattcagctgcttttcaatctgctctagggtacgctcatcaccggagcttacaatggtcatacaggaaactgcatggtcatcggtctctcccacggcaaggctgtcaatattaaaacatcttctggagaacagaccggctaccttgcacagaacaccggaacggttctctaccaatacggaatatattctcttcattttaagtacagctcccttccgttattttaccagatccatcggatcgatcagacattctaacagcatggtattgtcttccgccagaaaagcgtccagaatctcatccacgtgttccatgttgttcaatcgcagatacggaatatcataggccgcagatattttctccagatccgggcttccggacagatccacgacagaataatgatctttgtaggtatagtgctggtattcccttaccatacccagataattgttctttagcacgatgatctttaccgggatattgtgctgtctgatcgtagccagctccatcatggacatctgaaaggaaccgtcaccgcataccgcaataacctgcttatccatggccgctgtcttggctcccatggctgccggaatagaataacccatggttcccataccgccggaggtcaggaatttgccttttttcacaatgtgatagccacaggaccagatctgattctgtcccacgtccgccacatagacaccgtcctcctgcatcttctcggaaagtcttgtgataaatgctgcaggatccacataatcgggattgggggttctcttcttctccatggtagaacgatattcattcaatgtagtgagccattcctcgtagttacagtcaaattcttctttctgaaaatcctggaagatgtgttttgcatcacctaccagtggaatggaaggacccgcatttttgccgatctccgcaggatccacgtcaatgtgcaccagcactttgtttcttgtgatgagatccggctgactgaccgcgcgatctgccactctggctcccaccatgatcagcagatccgattcattcatggcacggttggcataagtcttaccgttattgcccaccattccataataaagcggatgttcggtaggcataacaccgatacccatcatggtggacaccacgggaataccgtgttcttccgcaaagctgcgcagctcctcctcggcctcactgagcaggactcctcctccggcacagataatgggacgtttcgcccgctccagctctttgataaccttcttgatctgcacggcatgtcctttgacggtaggcttgtaggtacgtagattcacttcttccggataatggaaatttttgatcgttgcattctggatatcaatgggaatatcgatcaataccggcccttttctaccggtattggcaatataaaatgcttccttgaacactctgggaatatcatttacatttttcaccagatagctgtattttacaaaagattccacggcgccggtaatatccgcctcctggaacacatcactgcccagcagttcactgttgacctgaccggtaatgcagatcatggggatactgtcagcaaatgccgtggcaataccggtgatcacattggtggcaccggggccggaggtcaccgcacatacaccgggtcttccggtcatacgggcaacaccgctggccgcatgggccgcgttctgttctgtacggatcaacaccgttttgatgtcagaatccagaatgctgttgaaaaaaggacatatggcaacaccgggatatccgaaaacagtacttaccccctctgcttccagacatttaataatcgcatctgctccaatcattttgctttgctcctttatctatactccattatttctgttgtttcagactcttttacatcaggcttttggccagtttaacggcatccgccgcatccttggaatagccgtcggcaccgatctcatccgcatattcctgcgtaatgacagcgccgccgatgatgatcttggcggtgatgccttcttcttttgcggctgccacgatctcccgcattctctgcatggtggtggtcatcagtgctgacagggcaataaattccgcatgatgttctttcgccgactccagaattttcgcctgcggcacatccttgcccagatcgatcacatggaatccgtggttttttaacatcagtgccaccagattcttgccgatatcatggatatctccttccaccgtggcaatgaccaccaccggcatttcttctccggtgcctccggtctgcagcaacggttccagcacctcgatggaattcttcatggcttccgcactggcaatcagctgcggcagaaaatacttgccctgatcaaagaattcacctacctgattaatggcaggaagcagtacctgattcaatagctccgcaggtttctctccgctttccaatgcttccttcgtaatctttacaatgccgttacggttgcccttcagtaccgccgtcttcagcttgtcctgcatttcattgatctgcggaccgttatcagcagtcgtttctttggcggcattgccggcagtgcctgtcttggcggttgttccctgattttccagcagtgccagtttttttgccagttccgcttctttctcttctctgcgctccctgacgccaccggcgtactcgatatagcgaagagcggcttcttctttgttcaacagcagatccgcagccaaagcacagctcatcagaagttcctgggaaggattggcaatagccatggtcagtcccgcctgaattgccagcgtcaggaatgcggtattaacaaaacttctctccggcatagcgaaggaaatgttggacagaccgcagatcgtggcaaaaccgttctctttgcaatagcggatggtctccaacgtttccagtgcagctttcggattggcacctaccgttgccaccagaccgtccaccacgatatcttctttgcacattcccagagaaagtgcccggtcataaatcttgtgaataatctctttcttctcttctatatccttgggcagtcccgcatccgacaaagggagcaggataaacatagcaccgtatttggctacaatgggaagtagtttttcaaatttttccgtctccagagatacagaattgaccagagcacgtccgggataattacgcagtgcagcttctaagacttccacgtagctggaatccagggaaagaggcaggttcgtgacaccgctgacttcctccagagcccgaagcatgctggctttctcgtcgataccgctcatgcccatattgatatccagtaccttggcaccgcaggcttcctgttcttcggcaaactgtatcaccttttcaaagctgccctcacgaagctgtgcctgaagtgctttcttgccggtaggattgatacgttctcccacaacgaaaaagccgtcatccagcccaaagctgtgggtaatacgttcggaggtcagataccgaattccatccggtcttcgggatgctgcaaccttcgcatctgtaccaaatcgttcatggatctgtcttatgaattccggagtggtaccacaacagccgccaagaatcgtagctccggcattgaccagtacttccatctcttctgcaaactcttctgcttccatgttgtagcaggtagttccgttttcatccagaaaaggaagtccggcattgggttttgcaattacaggaattctggtatgggataccatctccgaaataatgctctccatctgagccggacctgtggaacagttggctccgatagcactggcccccaggctttccaacacaatggccgccgttttcgcatccgtaccgaacaaagttcttccatccgcttcaaaggtcagggtagcgattaccggcaaatcacagacttctttcgccgcgatcagtgccgctctggtctccgccaggctcatcatggtctccaccaccagaagatccgccccggcgtccaccagacaaagaatctgctctttataaatatcgatcagtgtttccagctccatttttcccatgggctttaactgttcaccagtcattgtgagatcaccggccacataaaccggatgtcccggagtactctctgccgctttcttcgaaatagccaccagatcacgaatcatggaagtcatatttttttccagatgatattctgccagtttgacgcgattggcggtaaaggtaggggcatacaggatattggttcccgcctgcacgtaatccttctgtaattgcagcatgacatcctgatgctccaggatccactgctccgggcagacgccggaaggcattcctgccttcaccagattggatcctgtagcgccgtccagatataaaatatggtctttacttaacgtaataaattcttctcttgtcatagctctcttttcctgtatcttgattcttttaatcataccacaatgtccttttattcgtaaaggggacgttttaacattataaggttgcgtaaaactgcagaatatgataaatttttagatggatcaaatgatttggaggatataattttgaagaaaaaaatacttgcccttacggccggactgctgaccgcacttacgcttaccgcctgcggaaaggatcctgcgctgacacagtttaaggaggaaatagattctttttgtaccgagatctccgatatagataccgagatcaacaacgtagacgcgacatccgaaaatgccaccgatgaacttctcggttatctggatcagctggacagtgcttttcaggattttgcagcgttggattttcctactgaatttgattatctggaatctcttgccgatgaagcaagcgaatatatgaccactgcggtagagagttaccacgatgcctatgataacggtggttacaatcagctgaccgcagactatgcaaaggaaaattatgccagagcttacaagcggatccagatcatcatcactttcctgcacggtgaacagcccgaagatgtgaatctgaccactgcagaggaaacagcggctgcttctgctgcagaatagttacattttttaataatcacagaaacgtgcgctgccaggcgcacccataaaaagaatccccaatgcaatgaacatcggggattctttttatgacttattgtcatttttattattttaaaatcttgatctgaccaatcaggggaacttccttctcctgctcctggcaagcataaatcagacccatgagccagcatacgaacaggaaaatgctcaggatagtgccaacaataccacctacgtaaggaatgtagttgattactgctgcaacgatctgaccgatcagaatcaccagagcctgattcagatggaacttagcaccctctttgtcacctgcgcaaaaagcaacgatccagccgatccaggtaatgtaagcaatgatacccgtagtttttttattcatgttttctccctctgcacttttgtgcgataaaatattctgtatatgtaaaaaatgcaaatacagtcataatgtaatgtgaaacttcagaagcaaaatattcttcagaataaagttccctatcatgatccctaccgccgcatacagatgccattcatgaaagcgccagcctttgatcctgccaatatgtaatctggcaagggtctgacttagcataaaacctccaaagataacaacagtatacgtaaccagtggatgataccaggtggccagtagcggatgtccagtaagcagtgcacttaccgctctcgttccaccacagccgggacagtaaatcccaaataatcgatagaccacgcaggtatatccctgcagtctcggaacgattatatgaagatacagaaagcttccgatgcttccgaccagcagaaatatccatcctgcaatataaagctgatcttccaggctccgctggtttttagtagtagtttgcaagttcactcataaatgctacagaaaatacagcagctaagattgtaatgataattcccagtacaataccaatgatagaacagatcagtccagcctttgccaggccggtcttgccctgcttgttggcaaatactgcgcaaatgataccaccgattccaaacagtgcgccgatccatccggtgcagcatccaagtacgatggaaaggatacccagtaccaggctgacaatagccagtacattggtttctttgttctccggctgctgtacaggagctgttgcagctgcctgaggctgtacatttgcggtataatcctgataattgttcacaggctgttctgttaccggggtctcctgtacagtttctgctgcggagcttacttctgttgcagtagtatctactgtaacattgttttcattttcaaaattctgtccgtccattttctcctctttctggcctggaaaaggcctgatattaatctgccaggggattacccttgccgtctgtgtcgatcttgccggtcaggatcatgataccttctaccagtccccagatacctacacccataacaatgaatacgccgactaccacacagcataaaaggattcccacgatggaaagtaccaattgggtaactgccttaccggtatagcccagatagaaattatgtacgccgaacgtaccaaggaaaattgccaacagaccggctaccagtttggattttgcatccggtgccggtgcctgcttattggctacgccacagtttaaacatactgctgcatccggagctaaaggcttaccgcagttatggcagtaattattcccctgtcccttggccacaccgcactttacgcacattacagcttcgtctgtcatataaggctcgccgcaattcttacaaaagtacatttattcttcctccctcttttttgttcctgactcatttctcagtcattactgtacattatacaggatgtttgtatattttaccagtgctattttcacattataggccctcataacgtgcaatttctaccggaaagcgaagttatttccgccttttgtcacaaaatatgaataatttccgatacaattcgtaatatccaaaaactgccatgacagagaataccggaatggtattatatagatatctggctcttgcctcgaataacataacaaataaaaacataccgataaatgtaacgatcatcacagtagaaagacacagccggtcagacaggttctcttctgtccggtatttgggtctgcggattgttgacaccgccgtccacaaaagcataccagcctctgttatgactcccaacagtacaaaaagccataatccctggctgatcgtcgtaaaccagatataattgctgccgtcctgccagtaaaaagccctcagaggttctttccaggagctgtctatgttcaacggatattcccacgcctgaaaatacccttcctgataccagctgaacgtcccgtcgttaaaattcatgacctgcttacgcagccagaaccggattgtaccccaaataccacgatcaccgattcttttgcggattccttccatctcatattgtatccgggtatttttatccgtaccagcaaaagatcgtacgatctcaagtccctctccggaacaggccccggtagtatcctcattgaggccgttatacatataattactccagccgatctccatatccgcattataatcatactgtacggaacagtagattccctgcttacagaaagccccaagtccgaaagccgctatcagaagcaagatttttaagccggtcttctgcagccgcttacgcattggcacctcttcccaggcagaccataccagatccaccagtactaccgcaatcaatgtgacatagcaggtggctttcatgattccgccaaggcaccccagaaacattatcaaaaaccataaaaggtatttccgttttctcccattcttccggaacaatgaatacagtagaagaatcaggatcggcatggcaatggtgcttccgtccgtatagggaataatcttccagggagagattcccagaaagatgctctgaaagaccagggcaatcacggaaattccaaggttcctgctgacctgaaggaccagaagtactgaacagaataccgccagtgacagcatgacgcactggaactggatccagataaattccggattgtagggataccccttaagtcctgaggcaaaagaatacaactgatacaaaagccatgtaacgggaatattattactgtagatcgtatagtaatcgtcataccccagtgtctggccctcataaagccagcgggcggaattggccaccatgccgcaatcccagccaccataaaatgcaatgcatttggatatttttatattcacaagacagaacagaatacagactgccagtgtgatcccggtaaaccagactgctatgcgtccggtgtaaggaatctttcgcagaaaatagtacgctgcccccagtacagccactccgatcaccgcgcacagggatagtactttatttccctccacggtaatgatcttatgcatttcgttgtagttcatattggtcccgtagaatactatataatagaaaacaggaagaaacagtacaagcaaaagcactgacagtgttgctgtactgatacattttttcttcattgtcagaaattcctttccattcttgttctcaaaatactattggtaatattttagcatttctctgaactatttacaatgtaactacagaaaatcaatctcgtagatcctctctaccggaatttctgttccctgtatccgaaggctttttgtgttctcatcgattttgcggacacagccttctacggcagtataactgccgccgtcctttttctcatccggcacaaaataaataattttcaccggcactgtgtccagcggatgctgttgtaaataagaaatctggcggtcgatctcctgcttcctgtcctcatccagttccacaaaacggtctgtccggcgggccgtttctctcagagcgtcatcatatcccgccaatgctgcaaacggtgaaaactgtgcagcacggtcctgtaaagccattcggggataggtggctgacaccgggtgaggcagatggagcatgtccttatatttttcattcatctttttactcttttcctgttatcggattttgtggtccgataaatattatgccttatgtccgccaatctgacggttcctgtctatggttgtggctccctcctgcagatcggcagccttcagaatcgcattctttccatactttgattttacgcttagcattgcttcctgcaagtgtttttctttttccagccgttccttttccagctgctttgtttcccgggaagtttccttctgccccgtttgcaaaaagcctccggagaacagatccagctgttcgtagaacggctcttcctttacgctgtccgcatcctttagatgattggccaccagagtgattcttcgggtcagcagcatgggatctacaatccgttcatataatcccattgttgtctctgtaatcctgctgactgacgcagtcattgcatcaaggtttccagtgccgtgggcatgcttcggcacgcttctgccataacgatctaccgtgatttcaccatgataatgatctgcgatctccggaatcttcaggttgtcaatatcatagccaacagtcagcacgatctgatctgtgaccagctttttttccaccagatccattgccagctgttctgccatttcccggactacgatcttagcctgcataaaatccgtggcgcaatgcagtacctgaccggagctgatacagttagtctccggtcgataggatttgatcaggtccatggtcaccggctcatacccccaggcatgatcgatcaaaagctccgcattgatgccgaacatccggtacagcaaatcttcgttatagtaatctcccggtcctccgatagagcatctggccacatcgcccatggtaaacattccggcggcttccagcttcttgcggtatccggcgccgactctccagaaatccgtcagcggcctgtgatcccacaaaagttcccgatagctgatctcatccaattcggcgatccggactccgttatcatccggttccatatgcttcgctacaatatccatggcaatcttgcacaggtacagattggttccgattcctgctgtggcaatcagtccttttttctcgagaatctctgttgcaattctggacgccagttctctcgctgtcataccataggttttcagatattgtgtcacatccaggaacacctcatcaatagaatagacatgaatatcttccggtgcgatatatttcaaataaatattatagatctgggtactatattccagatatctcgccatccggggcgtggcggtcacaaaaccaacttccagttccggatgcctctgcaattcatccgcaaaggtgctttttcccaaaaatctgccgccaggggaccgcactttccgcatggcatttacttctcttactttggagatcacttcgaacagtcttgcccgacccgggattccataggatttcagagagggagataccgccaggcagatggtcttctgcgttcgggaagcatccgccaccaccagattcgtattcaaaggatccagccctctgtcaacgcactccacggaggcataaaaagacttcagatccatggcaatataagtatgggattgtgattccattgctgcctcctttcaaacactttctataaatgattatagcagaatgcatgttcgattacaaagtaattttgtggaaaaaaagactcccgaacaatgtcgggagccttgaaatccttgatttatctgattttatgttttagaacttaccagccttagctgcttcctcaatcgatacagcaacagctacggtagcacctaccatcgggttgttgcccatgccgatcagacccatcatctcaacgtgtgcaggtacggaggaagaaccagcgaactgcgcgtcagagtgcatacggcccagagtatcggtgaaaccgtaagaagcgggacctgcagccatgttatcgggatgcagagtacgtccggtaccgccgccggaagctacggagaagtacttcttgcctgcttccagtctctccttcttgtaagtaccagctacgggatgctggaatctggtagggttggtagagttaccggtgatggatacgtctacgttctccttccacatgatagctacgccttcgggaacgctgttagcgccgtagcagttaaccttagcacgaagtccctcggagtaagcgattctctctacttcggtaacggtgttggtgtaaggatcataagaggtctcaacaaaggtaaatccgttgatacgggaaataatctttgcagcatccttaccaagaccgttcaggataacacgtaaaggcttctgacgaactttgttagccttctctgcgataccgatagcaccttctgctgctgcgaaggactcatgtcccgccaggaaacagaaacagtcagtatcctcttccagcagcatcttgcccaggttaccatggccaagacctaccttacgggtatcagcaacggaaccggggatacagaatgcctgtaaaccttcgccgatagctgcagctgcttcagatgcctttctgcagcctttcttgattgcaattgcagcgcctacagtgtaagcccagcaagcattttcaaaacagatgggctggatcttctttacctgatcgtatacatccaggcctgcatcttttgtgatcttctctgcttcttcgatagaggagataccatagctgttcagtacagcgttgatcttatcaatacgtctttcatatgattcaaataaagccattttttctgtcctcctgtatcttattgttttctgggatcgatgatcttaactgcatcgtctacacgaccatactggcccttagccttctcccatgcagtgttggcatcgtcacccttcttgatgaagtcggtcatcttgcccaggttaacaaactggtaaccgatgatctgatcatccttgtccagagcgataccggttacataaccttctgccatctccagataacggggacccttcttcagagtaccgtacatagtaccaacctggcttcttaagcccttaccaaggtcttccagacctgcgcctacaggcagaccttcctcagagaatgcactctgggtacgaccataaacgatctgtaagaacagctctctcatagcggtattgattgcatcacatacaaggtcagtatttaaagcttccataacggtcagaccgggcaggatttcagcagccatagctgcggagtgagtcataccggaacatccaacggtctcaaccagagcctcctggatgataccttccttaacgttcagggtcagtttacatgcaccctgctgaggtgcacaccagcccacaccgtgagtcagaccggaaatatccttaacttcttttgcctgcacccattttgcctcttcgggaatgggagcacaaccatgatgtacgccctgtgcaacgggacacatttcttcaacttcttttgaataaatcatgtgaaatctcctttcaatatgtacttataatactattgataaaataatatcataatggtcgtgttcattctctcatatttcctttaaaaaatctaggggttttgacaatttttttcaatagtttatagaaataaacaccgtatcccccaatgaactgcataggaaatacggtgctttgtgattgttgaaaatcaattatcaacagcttaccaactcttgataaaggtatcaatgtaattgtccagacactttttaatgacttcaattgcctcatctctgttgcccttttcattgacagcagtggtcttgttctccagtgccttatatactgtgaagaaatgctccatctcgtccaccacatgactgggcagctcggaaatatcatgatagcagttgtaattgggatcattgaaaggaaccgcaatgatcttttcgtcatttttaccgttgtccagcatggagatcacgccgataggatacgctcttaccaaagtcatgggctgtacaggctcggagcacagtaacagtacatccagcggatccccgtcatcaccgtaggttctgggaataaaaccgtagttcgcaggataatgggtggaggtatgcaggatacgatccaggatcagaaggcctgtctccttgtccagttcatacttgttcttgctgcccttggaaatctcgatgacacagacaaaatctgtgggagtgactctctgggtgctcatagtgtgccaaatacttccatttacttctttcataaatcttctcctcttcctctatagttatttccgacagatatctttgcatacaggacaaaatatccagccggagaatacgcagattatccgcctgtggcgggtcgcaaatgcttatctgcggatctgaccgtttccatgtatcttgtatttataggaagtcagctccttcaggcccatggggcctctggcatgcagcttctgggtgctgataccgatttctgcgccaaatccaaactcgaaaccgtctgtaaatcttgtggaggcattgacataaacacaggctgcatccacttcgtttaaaaaactctctgcagtctccgtattttccgtcacgatacattcggaatgcttcgtattgtaacggttgatatgggcaatggcctcttccacgctgtccacagtcttgacagacagaatataatccagatactccgtaccgtaatcttcttctgtagcgggaatgcagtccggcaggatctcccgggtgctttcgtctccccgcagttctacgttcttcgtcttcagggcttccgccatcttcggaaggaacttatcccggacggcacgatgcaccaccagagactcacaggcattgcagacaccgatccgctgggtcttggcattcatcagtatttttaccgccatatccacatccgcatccttgtccacatagacgtggcagttgccggttccggtctctatgacggggatcgtgctgttctccaccacgctgcggatcagtcccgcaccgcctcttgggatcagcacatccacatattccttcatcttcataaactgcgcagtgaccgcacgatccgtatcttcgatcagctgtacggcagtcctgggcatactgcaggcttccagtgcatcctgtaatactttgacaatagcgatattggaatgaatggcatcactgcctccctttaagatcactgcatttcccgtcttaaagcacaatccgaaggcatccgccgtcacgttgggacgagcctcatagataatgccgataacccctaacggtactctgactttatcgattttcagtccgttgggacgttcgaaatgttccatggtctcaccgatgcaatccggaagagccgcaatctgccgaaggccctctgcaatctgcgcgattctctctccggtaagcttcagacgatccagcagtcccggattcattccgttgtttttcccgttttccagatccagtacgttggctgcaaggatctcttcctgtctttcacacagatcatttgccgctgtctgcagcgccttgtttttctcttctgtagtaagcttctgcaatacatatttggcatcgcaggcattttttcccagttctaaaagttccgacattccttccccgcctttccaaaaccaaagatttataccaaaatcacctgatagggctttacatctgtctcttccacaggaacactttcgacctgctggcagcggaacccgacagcaatactgcgaagtcttaaggcttccctgtctgccagatagcggtcataaaatccgccgccatatcccatccggttgcccaggggatcaaatacacttcccggcatcagaagcagacagtttgctgcctcttcgggagcatattcatagctctccgtattgccttccggctccaggattcccttatagccctctttcaattccgccagggattgaatccggtaaaaacgcatttcctgaccttccaccttcggaacatagacacgtttgccatcctgcagggcattctccagaatctctgtcgtgcagatttcacttccgtagctgacaaagcccagaatcgtatccgagaggtaataccactggtgtcccagaatccgctcggtaatgagaagattccctctctcccgttccggctccgtcagtgccgccctgcgggccagcacttccctgcgcagtttctttttcacttctctgcgttcttcagcgctcatttcttctttttataggacggctttaatttttcaatggtgccgtccggcctttcgatttcgatgctgtccagctgcgccttcatattgcgcttgatgctgtccacgtattcctgtctgagaatggactgttccagcttttcttcgtcggtcagtccctcgcgctgggatttatgataaagctcattgatgcgctttattctttcatccatattcataatgtattcctcttttcgttgacgtatcatcactgatttttgtgcagattctgtacaaattccggcagatcaaagctttcatccttatgtgccacgaataaagtaccttcgttttcaccggataacagacgatgaagtactccgatgtccttgctgttggcaatgatcatatccacatccgaactggtggcaatcttcgccgcgatcattttggtattcatgccgccggtccccacattgctgccggtactggccttgcccatatgcatgaattcctttgtgagttcatccacctgttcgataaatttcgcattgggattctgcctgggatcatcggtgtagaggccatcgatatctgacaacaggatcagcagatctgcatcgatcagtgctgccacaatagccgacagggtatcgttgtcaccgatctcaatctcgtaggtcgctaccgtatcattttcattgacaacgggaattgctcccattttcaatagctgggtgaaggtattatgggcattgtagcggttcagattgtccacgatggtatttttcgtcatcaggatctgtgctgccacctgattgtactccgcaaaaagcttctggtaggtcatcatcagtcttgcctggccgatggcggaacaggcctgcttgatcgccatggattctgcctgagtctgtccctccgtagtctttaaatgcactgcctgttttccggcggcgatagcaccggaagtcacaagtacgacttctttcccctgattgctgatatcgcaaagctctcttaccagcttttccagacggatataatccaggtctcccgtctcggcatgctgtaaggaggaagaaccgatcttaacaacgattcttttcttatccttgatttgttcccttatgttattcacgtgattgcctttctaagtccatattattacagtaatattcagcgcctcccccgaaaaaccgatctgcaggatgcaatctctgaatatttgaatcatataacattttctgccatacgtcaacgctgtagcggagcaaactgtgaagcgatctgttctgctacgcggataccgtccatggcggcggaagtgattcctccggcatatccggccccctctccacagggatagcaaccccggatggcagactgtaactcttcatcccgttcgatccgcaccggggaagacgtcctgctttccacaccggtcaggatcgttcccggagaggcaaagccgcggatctgtctgtcaaagctgtccatcccctccacgaaggcccggttacactctgccggaagaattccggtaagatccgcccattcataagcacctttacactgtggttccaatgcttccgggccacttctttgtactccgtccgtttccgcaggatgctctccggtgaccttctccctgaaatctccgtaccgctgtaccggcagtttcccatcgcataattcataagctctctgttccagtccccgctggaattcgattcctgccagtggatgctcggaaccgtaatccgcaggagtcaccgcaacgataatggcgctgttggcatttttcccgtcacggccgctgtagctcataccgttcaccgccagtcttcccggctcggaagatgcgttgaccacatagccgcccggacacatacagaaagaatacactcctctgccggtgcttgtcttagccgtcaccttataagccgctgcacccagaccttttaccgactcagcaccatactgactcatattgatcaggctctggggatgctccacacggaatcccactgcaaaaggtttcgccgacatgggaaactgcttccggtacagcatggaaaaggtatctcgggcactgtgccccggtgccagtaccacctgctcacaggggagcacttccgtgtcattcacctttactcctgtgacctgcccgttctcagtaaggatctccgtcacctgactatgaaatcggacttccccacccatacgcaatatttcttcccgcatgctttttaccactttgctcagaacatccgtaccaatatggggcttggcctgataaagaattgccggatcagcaccgtgctttacgaaagttttcaatacttccgtatttctgccgtatttgtcctttaccaaagtattcagtttaccatccgaaaaagttcctgcaccgccttctccaaactgcacattggaatccggctttaatctgcccgtctgccagaaagcttctacatccgcctgtctggcatccacgtctgcaccccgttccagaatgacaggtgcatagccgtgctgtgccagataatatccgcaaaaaagtccagcaggacccattccgatgatcacagtgggatgcttctgctgcgttgagccttctgcaggaaaaagatattccgttttttcggtcagcagaacattggcttttccaagtctgcggcaggcatccttatatactttttcttcctttttcaccgttacattcacactgtaactgtaaaaaagtgccggcttttttctggcatccagagactgccttacgatctgcagttcgaggatatccgccgccgggatccgtaagtactgtgccgtcttatgtataagctgctcccgggtatgatctaccggaagcttcagctgatttaatctgatcattttcatcctcatatctttcaatggcctgccgcctttccggagcttttgcaccttacgcaggcatacgtcacgtgtaaaaaattattttatgctaacgcagcgtggtatcccgccagataaccactgctccaggcccattggagattatagcccccgcatcggccatccacgtccaggatctcccccgcaaaataggccccggggcagatctttgattccatagtaggctttacttcccgtacatccacgcctccggcggatacctgtgcattttcgtaaggattgctctctgtgatatgcagtttcaggttacggcagagattataataagcatgaatcttttcctccgggatctccttcatgggagtagccagacgaatccctgccatttttagcagcgcagcggtcagttttttatgtaacattccggtaaagaattcctctgctgtccggtctccctgtaaaagtttccgccctgcctgtaattcttcatagctttcctgtgtcagatccggcaaaaagtcaatctgtgctgtcacgttccgcctgtcccggagcagatagttcaccctgcggcttagctggaaaatgggaatgcctgagatgccgtaatccgtcagctgtagttctccccgttcccggcatatttccccgccgtcacagaagacccggatctcactgtccgcccggacaccggcaatcccctttagcaggtcggtctcctgacagcgcagctgcaccagtgcgggcactgaaggaatgcaggtgtgtcccattttttttgcaattttaaatccactgccgtccgatccggtagccggagctgcttttccaccacaggtcacaatcaccgcatcgaactgccatgtcttttctccgtcactgacctgcagctttccggaggccagcttttcgacctttgtgatcttgcactgatactgtatctccacaccgagtgcctgtaattcataacgcagcacatccagcaccgcagccgcctgctcacacacgggatatagatagccgtttttctcctttaccatcagaccgatactttggaaaaagcgtatcgtatcctccgtatcaaaatgttccagcacatcccggatccattccaaatctccgccgtgataacactccacggaaagcgcacgatttcccagattgcatttcccgtttcctgtctgcaatattttctttcccacacggtcattacgctccaggatcgtcacctgtgcaccttcttttgccgcggttatggctgccatcattccggcagcaccgccgccgatcacaccgatctgttttttcatctgcatcacctttattcagaattctaggacgaatacgtctccagaaaatcatacaatgtttcttcatccggaacaaacagcatgtccatgatctggagctgtatctgttccggcaattcttccagcgagatcccggtattgatatataccgtggatctgtcttccagatagactaccacttcattgtccgacaccgccagataaaaacttgcgctgggctggacataacggtaatccatacggaccattactttttcccgggaaaaagacaatacctccaaccccacaaagccccgctcgatctccgacaatggcggatgggccgcatagagttccatggtctccagaaaattttccctgttcatcccaatatatttatgtgggatcttccatgaggtctccactgtggtcccccgtacaatatctgcctcttccaacacatattcggtatccgcacaaagtgtctccccggaggctgccgcctccacactgggtgccgcctcataaggatctgtgtctgccgcagtctcctcttccgtgagcggcagggcaagtcggttctcattcagatcctgccattgtccgggatagaaaaaatgaatgccccagacaccaagaaagattccaagaattaaaaacacaaccggaatcacaaaaaagtaactgatacgttttacaaatttcatactgcctcacatccatgatgtttctattgactctttgtatcagtatcagttattttatcgaaaatatacatccgtaaaacagttttaaagcagccggagcgtttttccgaaagcacgcagcactttaccgccgggaacataattcagatcctgtccacggaaactgcgtaacatcaaaagcaaaaaccagtagaccgcaccggtgatcaccagttccagcagcaccgttaccattgcccccagatggggcaggcagatcttctccagcccaaaagccagcaatccgcaggcacagcagcttccggtgggaattgccagtgtccgcaacagatccggccaggtcttcattcgaaggcaggcaagtatgccgagaacaattcctcccgctgccgtccccagcacaaggcttaaagataatgccgttgttgtatttcccgtattcagaagaatcagcaatatcacgatgctcacgatatccagaatgccgtatcctgccaggagcagatgcttttccccccgaagttccagtatctccgaaaaataaaacaaaagcagaagccacagaatcagcgaagatcccgtagtgaacaaaccggtgagtgccatttccgcagatttatccaaagcctgtgacagtggtattgccagtaccgcgatccatgccgtgaaaaagaatccgtgtaccaccgccccctgtactcctgcctgaaatgcagttctggcatatctttcttcttttttgcggatatggctgccggttctggccacccccggcagaattcccgcagttaaaattgctacgggcatcaggatcgtgatcagatatctgccgacgaaaataccatacgcagaaacggatgcataaatatccgccgatcttttctggaagaaaagcaggccgatccacaaaggcagtaataaaaacatgtctctgagaatatccccacccataggaatcagtaatgtacgcagctgcgaggagaaagagtccgttcccttcataccgcttcccgcttctcttctgcctgccatgctgccacggtagatcacaaagacaaatagcagtaccaacacctccgaaagcagcattcccactgcgatacccatggctccgtacatggatgtaaagtctgtcctttttaataaaagacttactttctccccgtagttccggaaaatccccaggaacaccagacccaggcccaggaaaaatacctgccgcagcaccgaagataccgcagatggcatttccgaaccttcactctgaaaatatcctaaaaataccgactggatacaacgaagaaaaagtgccgggcttaagatccacaggatcatgcttccgtaaggcaccagaaagactttttccaaaaggatccagcccaggctcatgcacaaaacagtcccaagaagtccctctgcgatctgaaacagcatcatgttcttacgcattctggagacattccgatactgccccctggcatttctgccccgaagcattctgcccattctgtccggcagatttttcccggtaagaacccagaacagggcaaataccagaacagccgccgccagatatcccagaccgttatctccgatgcttttcccgaacacccagatattgatacaggcaaggacataggaaaaactctgtatttgtcttctttttacttccacctgattcatgtaagctacctttacgtgtatgacacgccctttttaatctcttgtaattccaagggatgcgaggacctgctcctgctttgcctccattacctttgcctcatcttcttccatatggtcatagccacacagatgaagcatactgtgagcgaccagaaatgcgaactctctcttctggctgtgtccatagctttccgcctgctctttgacccggtccacagaaataatgatatccccgaggatcagttctcctgtatccggatcaaaataatctgcctctctgtcctcagagatctcaaaatccccaggctcatcgaaatccagattggggaaggacaatacatcagtctcccggtcaatctttcggtattccttattgtaagcatgaataccgtcattgtctgtcaacagtacatttaactggatctcatagggacatccctccatatccagaaccgccgtggctacctgctccacggtctcctctatggggaaactgttttccccatttgaaaatgtctcatcggtttcattttcaacgtaaaaagtcatagtataatttctcctccttgaatatcttctgcatccggttccagtcccttaaggacaggtcacattcgctgaaaatacctttttcccggattctctcaaaaatcctgtcaatcacctgctcataatccggcttcttctccggttccttctgcaacagcaaaaggatcgcactgactaccgcatccgaacaatacagcactgcggtctccgcttttttgtatttccgggttcctttatattcttccaggatctccgatgcgcctgccgggaattccatatccggcatctcctgcataagatcccagccttttctgtgatataatccggcacatttcagggcatccctgcccagttccagcttatttgcgatccgctcacagaaataggctgtatgtacacacaggaaatattcggatcggtcttcctcgcggtactttaccagtacctgattctcggtgtcattcagttccagatattttacacgatccctgaacaccactgtacccgaaaaaattttcaaaatacccagaagcagtattcccgacacgatcagatttgctgccggaaccagaaactgttccagacttaaatgttcattggcaagcagtaccacatttgcggtctcgcacagcaaaaggcagaacagagataagaacagggggatcccgatggcaaattcctgctctaaatgctggaaaagacaggctgcaaaaacaccgctgataaaatacaggaaaaaaatgcccaccgactgtccccacagcgtggcaatcatcagaaacaccccggaaaacacaattcccactgatagattgctgaacagggacaataccacaaagaccgccagaaacggccatcctcccgccggaaggaatgcacaggccagcgaaaacaaaaggctgcaccagacagcggtccagaatctcatcaggtgctctccgttatcataatccaggcgggaatccactacttccctgcgcaggaaaaatcctgacactgcaagtcccagtgctgccatcacggcatcccgcagggcattttccacagacaactgttttcccaaaagtcccagtccgtagactgcggcacctccgatcagtaccgtaaggatctccggcagcaaaagccgcgaaaatccgtttttctctttgttcttcatatttatctgtttcctttatccggacgtttgtttaatctcggacttcttttgcttttgatcgtccgggcttcatagtcatcgtaagcttttacgatcttctgtaccagcggatgtcttaccacgtctttgctggtcaaggtacagaaggcaatatcatcgatatttttcagaactctggctgctacatccagaccggattttgctcccacgggaagatccttctgggaggagtcacccgttacgatcactttggagccgaaaccgatacgggtcaggaacattttcatctgtgccggtgtggtattctgtgcttcatccagaataatataggcattgtccagtgtccggcctctcatataggcaagcggtgccacttcgatcagacccttttccatatttttggcaaaactttccgctcccatgatctgatacagggcatcgtacaggggacgcagatacgggtctaccttactctgcagatcaccgggcaaaaagcccagcttttctccggcttcaatggccggtctggtcaggatgatacggctcacctcgttgttcttaaaagcggtgatcgccatggccatggccagatacgtcttaccggtaccggccggtcccagtccgaatacgatcatgtttttccggatggcatccacataagccttctgccccagggtcttgggcttgatcggctttccgctgatggtatggcagatgcagtccgcatccatctccatcagtttttcctcctggtcttcttttcccatttcaatggcataatccacgctctgttcttcgatctcattgccgtgatccgacaatgcggtcagctgtcgtaatacccgggaggccttcgaaacgttttcttcttccccggtgatcattacacttccgttgcggtccacaatagttacctgaaaatcctgttccagcttcttgatgtacgcatcctgcataccgaagatcttctgcatctgttctgtatccatttccagacggattgctgtcacactcatttatgtcttaatcctcatttctgtccaaatcttctgctccggtatcctccgcccgggaatctaccagactgaccgccgcttcccgcagcaaaagttccccgtgtgcggtccagccggcgcgctttgtttctattttaacatctttcgagattatttgtacccctttttcatctaaagtttcaagaaaatccatgatttttttctgtaaaaccgtttctgcttccgacactgtataataatattctgttttctgatactctctgtacgtgatcctgcctaccatgcaggggatctgcagatactccaacgcttttacgggacatgcttccagcacgctgtcatattgcaaaaaatccatttttttctccggtttccactcccggtcaccgaaatggataaaataaaatgtcttttgtcttccggtgtattttttccggatataatctgccggaagatatgcctgaaaggttccggtatgctccagcactatatccgcatccggggtcaccggccgatattccctgacggttccatcctctgcataaatggggatcctgccttccaccagaatatctccttttgccacttcactgcctatggatactttcgggacaccacaacgcacgatcatatccgtgatcaccccgttgcattctgccaccagatcttttcctgcatctgccgcatcctgcacgacttctggaaccgacatatcgttttcctttacttcgatcaccagtctggtcccgtccagacggccggaggtccaggtaacctgcgaaaacttccgtcttatctgtttttccagctcacctatattcagttcactccttcgcattccggtgtgaattccctcctgctccaggaaggaatagaacacgtcatccgtcacctgataattgccagtcacctgaatatcccacacaaataaagacgaaatcagccagaaagccaccgccagaaataaacctgccagaaacgcttttctgcgcagcattcccggcacaaaaaagggtagtccatatctttccgatatgactacccttacttttgtctttctggcgatgggccgcagttcgtaaaaagaccgcaggccgatgcacatggtataaacatcttcctgtttttctatattccacagcaatattcccttattactgcacagattgataaatcgctgcggtgcaaagccccatacccggatcttcacataaccctgcagacgtttgacccattccgtcatcctgttaacctctcatccaaatgattattcacgcaaatatcgcagtgcactgatatttccgctgatcttcatatcttcattggtataatagtcgatggaaagtctggttccctccaggcacacctgacaggtcttggcctgcaaaaggatccgctctccggtatattccaggattcctctgtaattttcaatccaggcttcggagtttcccgtcagcgtcacccgcagtgctcccatacagacatccttgggtaactgcagggaatcgatccatttttcttttttcgatggcattctcttcattttcatataaaactatatgaaagctgatgccggaatatgttactgtaaaatccctttgatcagaggttctgcctccggctgatggccggtgatgaaataggcactccggaacttttccttcgccgcttccaggcgtttctcatcattggcatgaaggtatcccagtacctctccctttttcaccgcatccccttttttcttctctaagaggatgccaacagacaggtcgatctcactttccttggtctctcttccgccgcctaagagcagagaacaaattccgatatcctcacaggcaattttttctacaaagccgtctctgtccgcacagacaggaaccaccatggatgccttcggcagaagctccggatccgttaccgccgcagggtcaccgccctgggcctccacaaactgctccagcttccgtaaagcacttccatctctgatgacatttgtaagcatatttctggcctcttcgacactctccgccttactaccggcaagtaacatccgacttcccagtaccatacaaagttctttgaaatcttccgggccctctccccgcagggttgcaatggcttccttcacttccagggcatttcccacggcccggcccagcggctgatccatatccgagattacggcaatagtcttacgtccggcattcttaccgatcttcaccatttcctccgccagagcaaaagcatcctccctgctcttcataaaggcaccgcttccggtcttgacatccagtacaatggcatctgcaccggctgccagtttcttgctcatgatggaactggcaatcagggacatattatctacggtagctgtcacatcccgcagggcgtacagctttttatccgccggtgccagatctgcggtctgtcccataatggcaatgccgatccgattcacattttcaataaactgctccgtggtcagtgatgtggaaaatccgggaaagctttccagcttgtcaatggtccctccggtatggcccaggcctctgccgctcatcttggccaccgggatcccacaggcagccaccatgggtgtcaatgccagagaagtcttatcccccacacctccggtactgtgtttgtccaccttgcagccatggattccggacagatccagcatctcaccactgtgtgccatggccatggtcagttcataagtctccttctcggtcatcttctgaaagtagatcgccatcatcagcgcggatacctgataatcaggaatctctccacgggtatagccctcgataaaaaagtggatctcttctttcgaaagctctccgccgtttctttttttcatgataatgtcatacattctcataggctttgctcctgtctgcggcagtagatttccctgtccgccttttatatgccgacttttttacagatgtcactgatacagcatttttcgcagtaaggatgggttctggcggtacacacttctctgccgtgatataccagtctgtggcagaaatcgctgccctcttcgggcggaatgatcttccacagctccttctccacctttgccggttccctgatcccgtccacaagtcccatacggttcaccaggcggatacagtgggtgtctgtcacaatggcaggtctgccaaagacatcccccatgaccagattcgcactttttctgcccactccaggcagagacaataattcgtcaaaatcatctggaacctttccgtcatatttatcccgcagaatcttcatgcaggcactgatatctctggctttgctgtgccccaggccacagggctttacaatggcctcgatctcttccaccggagcctctgccagggcatccacatccgggaacttctcatacagcttttccactacgatatttacccgggcatcggtacactgagctgccaggcggacactgacaagcagtttccatgcctgatcgtaatccagagtgcatccggcatccgggtattcctttttcagacgttctataatttctaatgcacgttgtttttttgtcatatacttctacttttactctttatttatggtaaggttcgtgctgaatgatccggaatgcacgatagatctgttcgcacaggatcactcgcatcaactgatgaggaaatgtcattttggaaaagcttaaggccagatccgctcttttacagacacttggatgcaaaccaagcgatccgccaatgacaaagcagatatggctttttcctctgacagtgcaatcttcaatccatgccgcaaattcttcggaagaaaagtttttaccggcaatctccagcgtaacgatcagggcatcctgtggcagtttcgccaggatcctcgccccttctttttcacggatctgatcttccagagccgcactggctccatccggtgtcatttcatccgtcacttcgatgatatttaacttcgtataacgccccagacgtttgctgtattcttctatggcgtcccggaaaaatttctccttgatcttccctacacatacgatggatattttgatcattcttctgctccgtttgtatccgggaagatctgttcatagatctttgtgtcaataaggttctccagcatctgctgatccagattcataaactgatgattcatctggctgcggattacttcgaatctcttgtaataaagagcctcttccggtgtatctgcagcattttcaatctgagcgtcaattttttccgccgtcagattttcttcactccacttcagaagagtatccaccagagagttctcggactctgcctttttctcaaaaagctttgcattccgcatggataccacgcccatgacaatgaacagaatgaaaacagcactcatcactccgtagaacatataggggttgccgatgttcaaaggaagtacgccggtaattcccaggatcatgacaagcattccgaggattcccaccaccagcagtacccaggcagaggaacgattctcctctgctttggctccactgttcatataagtaagtccaccctgggcggaagctgttttcagcagttctccgggattgacttcctccgatgcttcttctgtctccggcatcaggaattcatctaccgcagcctcttcctcagcagcattttccgtccgctctttttcctgctgttccagaaatacccgggcaatcgtcttcgcctgtttttcctcttttgcatctacaaacagttcatagacctgctccgcctcatcgaaggaaagtttgctcttgcggatcccattgtatgtaaggaagtctttcagtttctccatttcgtcctgttcaccgaacagcacggaagtccagtccgtcaattcttcctcgcttaccagcgtttctccgcaatcgggacatacggtgattccttcccgatattcgtttttacatttcggacaccatgccatataccaacaccatccttaatactcgtaatccaggcaggctctgttgcctgccacggatccaatatattcctttgctgccagatgatccggatgcacctgataggcagccagcgcctcagtatctgtaaactcagagatcagagccacatcccggttgctgctgtccagttcattgatgatcacttccacctttacggcaccgggaaccttctctttgatgggctccagtaactccttgatcttcccggcggtctctttcttttcctgttttgtcagattgccttccaaactccacataacaatatgtcttaccatgtaatcctccattccatcctgtctgtggacaggatccggggtgtttattttgtactcagatattcgtcaatgcctttggcagcagcttttcctgcgcccatggccagaataacggtcgctgctccggttaccgcatctccgccggcatagacaccttcctttgtggtcttaccattgttctcgtccgcaatgatgcacttccacttgttggtatccagtcccttggttgtagaagagatcagaggattcggggaagtacccagagacatgatcacggtatccagttccatcacgaattcagatcccggaacctctacgggacggcgtctgccgctctcatcgggctcacccagttccatgcggatgcacttcataccggtcacccatcccttatcatcggaaagaatctcagtaggattggtcagcagatcaaagatgatgccttcctcttttgcatgatgtacttcttccactctggcaggcagctcctcttcgcttctacggtatacaatgtgtacctccgcacccagacgaagtgcggttcttgctgcatccatcgccacgttaccgccgccgacaacggctaccttcttaccatgcatgataggagttctggagtcgggatcaaaagccttcatcaggttgcttctggtcaggtactcgttggcagagaagacaccgttggcattctcaccggggatacccatgaacttcggcagtccggcaccggaaccgatgaatacagcctgaaaaccttcctcatccatcagctggtcgatggtcacggatttacctaccaccacgttagtctcaatatgaacgccgagagattttacattctcgatttcttttgccacaataccggtcttgggaagacggaactcgggaataccgtataccagtacaccgcctgcctcatgcagtgcttcgaaaatggtcacatcatatcccagctttgccagatctccggcacaggtaagaccagcagggccggaaccgatcacagctaccttcttaccgttcttctgtgctgcgggagtgggcttgatgccattctctcttgcccagtcagccacaaaacgctccagcttaccgatggagatcggatctcccttgaagccacggatacattttccttcacactggctttcctgagggcatacacggccacagacagcgggaagggcgctggattcactgataatacgataagcctcttcaatgttgccgttcttcacctgttcaatgaactgtggaatctggattgctacggggcagccctttacacactgtgcatttttacagttaatgcagcgggaagcctcttccattgcttcttctttgttatatccgagacaaacctctttgaaattggtagcacgttccttcgcatcctgctctctgacaggaattctctttaatacatccattttattttaaccatgcctttctgatttatcgtgttcaaacttttgtatgactactggcagttaccgcagccaccgtgatgggtatctccctcttccagggccagcattgcacgtccctctgcggtcttgtagatctgctgacgtctcattgcctcgtcgaagttcacttcatgtccgttgaactcggggccgtccacgcaggcaaatttcaccttgccaccgaccgttacacgacaggcaccacacattcccgttccgtctaccataatggggttcaggctgacaacggtgggaatctctaattctttggttaataaacatacaaacttcatcatgatcatggggccgatggcaatacacagatcgtactttttaccttctgccaccagatccttgatggtctgggttaccataccacttcttccataggagccgtcatcggtggttacatacagatttcctgcgacaacttccatctccttctccaggatcagaagatctttggtcttgcttcccacgataacatctgcagcaacgccatgctcatgcagccattttacctggggatataccggtgccgcaccgacaccaccagccacgaagaggatcttctttgcctttacctcatccagaggctgttctaccagctcggaaggacatcccagaggacctacgaaatcatggaagtattctccctcggaaagctgtgccatcagttttgtaccggcaccaacggtctggaacacaatggttactgttcctttttctctgttgtaatcacagatagtcagagggatacgctcactctcgctatccattcttacgatgacaaactgaccgggttcacaggtctttgccactctgtctgcttctacctccataagatagatgttggttgtcagctcctgtttttttacgatcttatacatttctctttttccgtcccttctgttaggattatatatctaaacgatcaccaagcgtataatggcggccgctttcgtcggtctgcaatttgtacagttcccgggtataggcatttacggcgaacagattccccgtctttgtgactgtcccatcttctccccggtagatctcggcaacaacatagaaatcatctatcttgttgatgttcgtcacatactgatactgatagagatatgccgcagcggattcatcaaagcttccggatgcttccgttattttaccactttctatggcataattcactacttttgtcacggcatcctccggcataaactccgtgttcatgaccagattgtagcttttctccacgatctcgctctttcttccttccgcaatgcggataaaccggaagactgatttgccaagaggcatggggatcggtccattatacaccgtggaattctgcgtaggatcggaatcatccgttgtgtaataaacatcatatccgtcggtcacctcgatattgattgggaattcataatccccactgaccgccgttacctccggagcactcagttcctcgatctcaatatggtaatttttggtaaccactggactactgatcccattctcattgatgtagacggctttgatacagtaatcaccgctctctaaaaggatgggtgccgtatacagcagactgtgttctcccggttcggtttcgtcggtagtatagtagatcttaccacttccgaaagttgtcagtttcaaaggctggatgctggtataatatccctcctgcagactgaattccggttccattgccatatagctctggtatttactcataatatttacattaccacagttcaacaacagatcattaatggtcttataatcttccctggccgcatagatggcgatcagctttccataagcactttccagttgttcggaagtagctgcggcatccgcaacaatctcccgaagcagatattcatattccattttgttgttcttctgaaaataaatatccgccagttcaaattttaaggtgatgttccccggatcgatttccaacgcacgttcataacaggtgatcgccggatcgtattccccggaagctacatactctctcgcactctttatctgatattcagcggaatgatagtgggaataagagattccgaaaccggtacataccaccgctactaccgcaagcaccaggatcagcacaatgaatttccagcgaaagggatgttttgccgtattttccagcggttcttcatcccagtcctgcaattccgtcatgctctgctgtgcatcctgatcgtccgtggcatcttcttccggtgtcatttccctggcaatatcatgcagagtctgctccatattgtattcaatttccggttcaaaatcgggaacaatatggatatcctccccacagtgctcgcagtaaagcgtaccttctttcatttccgccccgcaattcggacacttcatataattatcctcttactgcctgcaaggataccgattccaggcagttattcatcagcatagctatggtcataggacctacgccgccgggaaccggagtaatggcgctgcatacaggctccacactgtcaaagtccacatcaccgcacaacttgttttcttcgttgcggtgaattcccacgtcaatgacaaccgcaccctcttttacatattctgccgtgatcatcttcggcttgccgacagccaccaccagaatatccgctcttttggttacttctttcagatctttggtacggctgtgagccaccgtcaccgtaccgttctcccgaagcagcaacaatgccatgggcttgccgacgatattacttctgcctaccaccacacactcttttccggcgatctcaataccggaacgcttcagcagctgtatgactcctgcaggagtacaggacacaaagcccggcttgccgatgcagagtgcaccgacattctggggatgaaatccgtctacatcctttaaaggagaaatggaatccagtaccttttcttcgtcaatatgtttcggtaacggcagctgcaccagaatgccgttgacatcggttctgtcatttaattcccggatcagctccagtaatttttcctctgttgtctcctctggaagttcatatgccagagaccggatacctacatattcgcaggcctttttcttgttgcggacatatacggaagatgcgggatccgcacctacctggatcaccaccagcgttacttcgcagccctgctcttttaaccctgcgattttttctttgacttcatctttaatctgtgcggaaataacttttccatctattaactgtgccatgagacactttcctccttactagaacaagcctacgatcctaccgctgtcatccacatcgatattgtaagcagctggagccttgggcaggcctggcatggtcatgaccgcaccggtgagcactacaacaaaaccggcaccggcagacacatagacctctcttacattcaattcaaaaccggaaggtcttcccagtaacgtaggatcatctgacagagaatactggttctttgccatacataccggcagatcaccaaagccaagttccgtcagtctctttaactgttttgctgccgccggagcaaacactacatcagacgctccgtagatctcctgcgcgatctttttgatcttatcctgaagagacagttcattttcatataaaacatggaagtggttctctttttcgtcgattgcttttaatactttctcagccagagcgattccaccctctccgcctttctcccacacttcggagagtgcgaactcacagcctcttgtctcacagaattctctgacataagcggtctccgcctcaccgtcggtgataaaagagttcagggtaaccactacaggcacaccatatttctgaagattctcaatatgtttctccagattcacaataccttttttcaacgcttccagattctctgctcccagatccgcctttgcaacgccaccgttgtatttcagtgcacggatggttgctaccagtaccactgcatcaggagtaagtcctgccttacgacatttgatatcgaaaaatttctctgctcccagatccgcaccgaagccggcttccgtgatgcaatagtctgccatcttcatggctgccttagtagctctgacggagttacatccgtgagcgatgttggcaaacggacctccgtgtaccaatgcgggagtatgctctaaggtctggatcagattgggcttgatggcatcctttaacagtgctgccatggcaccgactgctttcagctggccggcggtcaccggctcaccctgatagttgtaagccacaacgattctggacaggcgctccttcagatccttcatatcgtctgccagacacaggatcgccatgatctcactggctacggtaatgacaaaatgatcctctctgacaaagccgtctgtcttgttgccaagtcctaccacaatattacgaaggactctgtcattcatgtcctcacagcgcttccacacgatctgccgggtatcgatgtccagatcattgccctgctggatatgattgtccagcaacgcagccaacaggttgttggcagaggtgatggcatgaaaatcaccggtaaaatgcagattcagttcatccataggcactacctgtgcatagccgccgccggcagctccacctttgataccaaagcaggggcctaaggacggctctctgagcgcaattacagcctttttgcccattctgccgaaagcttctcccagcccaacagtggtcgtggtcttaccctctcctgcaggagttgggttgatagctgttaccagaatcagttttccattgggacgatcctggatcttacgtaaaaattcttcggaaagctttgccttgtattttccgtaaagttccaggtcatctgcttcaatgccaatactttcagccactttggtgatgggctccattaccgcttcctgtgcgatttcaatatctgttttcatgtcctttttccctccgtttattcagacagtctcgaacgaatgtcagatttcctccaacagctgttcgaactgttccatgctcataagtacttttctgggtttagtgccttcttcttcacctaccacgccgtattcgcaaagctgatccatgattctggcagcacggttgaaaccgattttcaacacacgctgcagcatgccgatgctggccttgtctttatcaataataaaccttgcggcctcctcaaaatattcgtctctgtcgttaccgccaccagagccgcttccggaggaaccacctgacgagccgatatttttgatcttctcttcaatatcttctgcatagttgctataggtattgcccagtgcctggttcttgagataatccaccacatcggatacttccttgtcggacacaaaagcgccctgtactctggccggtttggaataaccctgcgggtagaataacatatcgcctttaccaagcaatttctccgcaccgttcatatccaggatcgttcgtgaatccacaccgctggatacggagaatgccacacgactgggcatattggccttgatcagtccggtgatgacatccacactgggtcgctgggtagcgatgatcagatggatacctgcggctctggccaactgtgccagacgacagatagattcctccacttcgccggggcataccatcatcagatccgccagctcgtccacgataatgacgatctgcggcatcttcttcggtgcttcctctccttccggaacaggcatagtctctattttcttgttataccccttcagatcacggacattataatcggcaaacttccgataacggtcttccatctcactgacgccccagtgcaatgcagcagatgccttcttgggatctgtcactaccgggatcagcagatgaggaatgccgttatagacactcagttccacgaccttcggatccaccatgatcagtttcacatcatccggatgcgccttgtacaaaatactcatgatcagcgtattaatgcatacggacttaccggaaccggtagctccggcgatcagcatatgaggcatcttggcaatatccgccaccacagtcttgcccgcgatatccttacctacggcaaatgcaatattggaattaaactcctgaaactctttgctctctaacagatcccggagtgctactgtcatgttctctttgttcgggacttcgataccgatagctgcctttccggggatcggtgcctcaatacgaatatccgttgccgccagattcagcttgatatcatctgccaggcctacgatcttggatacctttacgccctgttccggctgtagttcatagcgggtaacactggggccctggctgatatcggtaatcgttacctttacaccgaaagtatttaacgtctgctgcaagcgcatggcggtctctttcaattctctggaggaatctccggtagctgcttttcccttctgtaacaggctcagaggcggaattcggtattctgccggaggctgtttggccgctttcgcaatatccttatgtatctgatcctctgccagagaattaccctttggtggctccggtgccgtgatttttggtcgtatgcggctttccgtcgttgctgtctctgcagattcccgcacgacaggctcagtctccggctgcagctgccgcatatcggaggatgactgccattccgtaaccggttcctctacaggctctgggatatcttccttgtgaatccggatagattccgcctgaggtgtcaggagtgctgcctcctcctgccaggattctctgcgttcaaaaggttttttgaaggtagcagcactggtcacttcctccacggggatctcctcgtaaggttcttctgctgcggcctcctgcatggtcacctgatgcattcccgttaccttgatcttatcaaaatcgctggaggtcactctggtctcttccacaacaggaatctcctgtgcatcctcttcataaacgatctcatgaatatcttcccgtcttcccacaggctgtgcctcctgctttttcagggaagtgtccatcataacaccgctgacttttttctctctgcggggaatggcgtttaagatctgctcattctctttctcttccgcacggagtctgcgctcttcctcacggatccgtcgttcctcttcccggatacgacgggcttcctctctctgggaattacgttcctcctgttcctgtctgcggatctgtgcattttcccgtctgcgcactgcatcctctctggacagttcccggatccggtcaccaccgtttcgcatactgtttaagaaagaacgctccgttaccaggatcagactgatcacagaacacaataagaccaccagaaccgttcctaccgtctccagataatgcagcaacagatagcagatacttcctgccagaatacctccgccctttttaccggtactgcagtttgtatataacagtttgatatcatactgttccatagagccggcagtcctggcgatcagatcacagatcacaccgagcatcagaaacaatacgacacctgcaatcattttgcgtacagcggtagggttcccctcattggcgaaccagaaagccaccgccagaaatatcacaataggtgctatatatgcagtaaatccaaagataccgaataagaccccgctgatcgcattgccgaccgggccgataataccaaaattacaacaaaataatatcaccattaccacaaacaaaacgatcagaccgatctcatggaacagttcactgtcctgtgctgttctctgcgcctgcctgctgcggctgtttgtggtactttttctcgtcctattggaagatgatgttcttttgcctgatgaagatgccatgtcatcatactcctaacttcattatagtcataattagaagtatatcatttttccatggccttgtcatccctttttctgttcccttcgatcatcttccgaagcctgcagatggcccggtcgatacctcccacttcgtcaataataccgtggttcaccgcttcttctccaaccagaatgcttcccacatccttcgttaagaatccggtctccatcatgagttcttccagttttgtccggctgattttacagtgtttgcatacaaagcccgtgatccggtcctggatcagtttaaaatattcaaaggtctggggcacaccgatcaccatgccattcattcttaccggatgtatcaccatggttccagtgggtacgatgaaggaatagtcacaactcaccgcaataggcaccccgatggaatgactgccacccagcaccagggatacggtgggtttgcttaaagatgccagcatctctgcaatagccagtcccgcctccacatctccgcccatggtatttaaaagtaccagcacaccgcctatttcttcactgtcttcgatggctgccagttgtggcaggatatgctcatatttcgtagtcttcgaattaccggagagattatcatgcccttcgatttcaccgataatggtcagcagatggattttttccccggatgccgcatccgacagcgtcagttgtcccgttttttcaattctttcgtctctgtgttcttccgcctcggtcttcggcgcttcattcttgttctgattgttatctttctgattctgcatggcctgtttcctcccagtttcaatgattttatgattttgaaaatttaaataacaaaaaaagacgacacaaaggcattccacctctcgtatcgtcttttagtatgtccgtcaatccaacatttcattaggaaaccaacagatttttaatgatcaaaatcatcgtcatccgctaccggataatcaaaatcactgtcatcgtcattatccagcttataatccagtaccttaggcacatgctttttcggcaggggcagtggattttcgatcagctgtattttttccgtttctacaggctcttcctggaaatccgctggctcttcctccgggaattcctcggtctccagatcctgtactttcagccgggatctgcgtttcaccgtttccgtactctccctttctttttcctgcatcatggtcacatagggaatcaggctttgtactccggctccaatgagaagataacgaagccggacatgcatccacattccctgaatatccggggttgtgatctgaaacgtcatcagtaactccaacacaatccacaaaaggatccagatactctgacgttctctgcgtttctgacaccagaaaccaaatacaccgagaatttgcattgttaccaataaaaagatcagaatcttgccggctaccacagtatccgctccggtcgtcatagtaccgtcgtaaattgcaaccggccaggaaaaagcagacggttggaacagccgtccccatgcagtgagaacatttcccataagtttcccgctgacacaggcgtctactgcgattgaaacaaagaatccgactgcgcctccgaaagctgccagtaatgctgcccacattctatgtaaaaatcccacagtttcctcttccgctgtctccagtgcaaaaaccgaaagtatcggaagatacagtaataaacccgtgatatccagataggtcagcactcccattgccacaccagcgataaaaaaactgagaatcgggcggacgcccttctgttcaccttttcgtcggaaggtattcagtgctgccgcaaccagacacaggcctatcatccataacatctgataaagttcctccggtcccaatactactaccttccagcacaatggccagagcattccaaatcccagcgccgtaactgccgcagccggtccagttaatcggcggaccgcaaaataacaaagaatccagccaagaatctgtaagcccgcctggaatccgagtgccacggtgatcttattgccgaggagcagcaaaagcccgtgcagtatctgcagatacagataaaccgcgccatgtactacctgtgggatctgcgtctgtgttgtcactcggaccgtatcaaaccagacatcctccgccgctacatccagatccatcagctggatttcacgaatcctcaggacaatccccgccgctaccaacagcactgtgaggattccctcgaccacaagtgcagtctgccgattatctacgtttgtttttttctctctgctcttttgcaatcctcttgacagcagaaaagcaacaagccctgtgacagcaagccatacacctgctatcacaaggccgatccattgggattcctccggagcgcttggcatagtgaccatcatcgctccggttcccgccataattgcagaaagtaaccacagtattacacttattacattctttttataattcattatttcagtaccttttcgatgttatatctgggacgatgttttacctcaatgtaaatcttgccgatatactggcccaccagtccgatggccattaactgaataccacccaggaaccagatggacaggatcagggaagtccagcccggtaccacatgtccggtacaataagagatcagcgcataaatagctgccagaaggcttaaggccacaatgatcataccggcacccaggatcatactgataggcttcacactgaaggaagaaataccgttgaatgccaatgcaagcatcttcttcagaggatacttggactcaccggccactctttccttacggtcatagtatacacagtccgtctgataaccgatcaaaggcatcatacctcttaagaacagattggtctcctgatacttggagaactgttctaccgcgcgcttggacatcagtcggaaatccgcatgattgtaaacagtcttgacccccatcatttccatgactttataaaatccctgcgccgtggtacgtttgaagaaagtatcggtcttacgctccttacggacaccgtatacgatatcacagccgttgtggaacttatcgatcatttcctcgatcacagctacatcatcctgcagatctgcatcaatggaaaccgtcacatcagacagatccatggcagtgattagtccggcagtcagtgcgaactgatgtcccacattgccggccagctttacaccgcatacctgcaccggatgtgcctgatgctcttcttcgatcagctcccaggtacgatccttactgccatcatttacaaacagaataaaactgtcttccgcgatctttcccttatggatcagatcatccagcacacccctcagtgcctcggaagcaatctttaacacctcttcttcattataacaaggaactacaattgcaagtttctccatgctgttacccctaacctttcaatttattcgtcccagttatgatatactgcctgaacgtcatcatcatcttccagcagttccagggttctctgtaagttcttcactgcagtctcatcggtcagtgttacataattctggggaatcatggtaacttctgcactgatcatgggaattccggcatcttccagagccttgcgtacctcttcgaagttatcgggatcagtcaggatctcgaagctgtcatcctcttcggagaaatcttccgctccggcatccagagcgatcatcatcagatcgtccgcttccatatcacattcttccttgtccacgatgatctgtcccttcttatcgaacataaaggatacacatccgggagtacctacattaccctgtcccttggtgaatgcgcttcttacgttggcagcggtacggttggtgttgtcggtaagtgcatctacgatgatggcgataccgttggggccgtaaccttcgtaagtcacatacttatagtttacattgcccacatctccggctgccttcttgataccgcgctcgatggtgtcgttgggcatgttgttggcttttgccttggcaataacggttgccagtttgaaattgttggcgggatcgggaccgccctcttttacagcgactgcgatctcacggccgataatggtaaaaatcttaccttttgcagcatcgttcttttcttttttatgcttaatattagcaaatttggaatgtcctgacatttttgttactcctttgaacttaaagtttctttctctttgtatgcgtagtctttacgcaataacgctctttctatcatagcattattttcttttttcttcaagcactgattgtccgtcttctgcattctgcggtgttttttcctccggaagcttccggaccaacacacttcctatcatttttttgaccacggaaaggattttaaaattgtatcccttatagtccacatcgaactgctcgtccggttccgggatccggtccagtctggagatcaggaaaccgttcaaagtctcgaattcttcctcgtcgaaggtaatacccagaagctcttccacttcctttaacggagtcttgccttccatgacatattcgcccttgccacggttcttgatgtattcctgatcctcatcatactcatccatgatattgccgacgatctcctccagaatatcctccatggcgatcagtccgtcggtctgtccgtattcgtctaccacaatggccatctgcagcttctgggactgcatttccttgaacagttcatcaatatttttcgtctgcggcacaaaataaggctctctgagcagcccgtccagttttgcgataggcaggtccagcttgtcatcactgatatggaaccgcatggcatccttcagatgcaggataccgatgatatgatcaatattctcctcatacacagggtaacggctgttcttgcctcccagcatggaagcaatggcatctttcagtttcgtctcaccatcaatggccacgatacttccacgatgtgtcatgatatcctgggcttccttgtctccgtattcgaaaatgttggagatcatctccgcctcactggcctgaatgacaccctgctcatgaccttcctgcaccatattgatgatctcttcctcggtcacatcattttcatccgtattgttgcggacaccgaagaggaacaggattcccttggctgtcagattcaccagccccgtcaggggtgccagcagtctggtgataatataaatcgggtcaatacaggcatacgcccacttctccggctgtctggatgccattttccggggaatcagcacaccgaaagtcaacaggatatagatcatggcaataaaagacaataccgtggcaatccctgaaagcactcccgtaggcacattctccagagacatgcctcccacattgatcacatgaagtcccttgtcaatggtctgcagccagatattcagataaaaagctcccattaaaatattgatcagcgtaataaccagctgtaccgtattgatatagatccccggacggctgatcatttcactcagccgcatggaccggcgatccttttcttcctctgctttatgtaggatctccttttcattcagattgtcgatggcggcatcaaatccatagaaaaacatatccaccagcaacagcaggaaaaagagaaaaatggccacaggcccactcatgtccatattttatttcatcctttcgtattttatcctattttcggatacactatgcatcgggctatgtatccagctccaggctgactttcagtgcccggttcactctccgcataatgtctccgtccagatggcataccttatctttcagcctctttttatcgatggtgcgcagctgttccagcagcactacggaatctttatccatatcgtagcggcgggcattcagttcaatatgcgtaggcagcttcgccttgttcatctttgaggtgattgcagcgcagatcacggtgggactgtgtttgttccccacatcgttctggatgatcagcaccggccggatgccgccctgctccgagccgatgaccggtctcaaatctgcgtaatagatatctcctcttctcatttctactccttcatcagcgatttaacataagtattgccgattcttccggagttatacgaacactttagatccgtcagaaattttcaaaataatcttttacttctgtgatctcaccatttcgacggtagactctgggaattcgttttcccagtgtgcagacaaactcataattgaatctaccggaaagttctcccagttcttccgccgtgatccgctcctgaccatccgcgccaaggagcgtcaccttatcgccctccatggctccgggaattccggaaatatccaccatgaactggtccatgcagacccttccgaggatgggggcctttttcccgtggatcagcacgtagccttttcccgacaggcttctgggatacccgtctccatatcctacagggatggtggctactctggtatcttttgttgcggtaaacaatcctccgtagctgacactctgccccgcatggatcgtcttgcagtaaatgatatgactgtagagagacattgcagcccgcagaggtacaatatccttacttacttcttcggaaggatataaaccgtaggtcgtgattcccgcccgtaccatatccatgttggcctggggcatttccagaattgccgcactgttggaacaatgctttaccggaatctccagtcccagttccgactgtattctatcaataaaattctgaaacagttccagctgatggttggcagaagtcttatccgcttcatccgattttgcaaagtgggtaaagataccttccacttccagtccgggatgttccatgacaaattttacaaaatccagcccttcgtcatccggagtgataccgatccttcccatgccggtatccactttgatatgcactttggctttcttaccggcctttgctgcggcctctgccagttcttccacggtatccctgcgatacactgccgggcggatctcttcccggatcatttcctcataacaataaggaaaagtatatcccaggatcaggatcggtttcttcacactggcttccctgaggacatgtgcctcctcgtaggtagctgccgcatagccgaacataaaatccacatcctccagcattctggcaatgggaacaccgccgtgtccgtaaccgtccgtctttatgaccgccagtatcttcgtctccggggcaatattttccttcatatggatcatattctcccaaatggcatccagatctatttccgcccatacccgttggtaggaattcatcttttcctgtagtttgcttgtcatttcttcacactttctttctcatcatagtctttcatcaggcaatccgcaatatctcccgccattaccccatactccgtatggagctttgccgccagctcaccggctctgccatggagatacacaccgttcacagctgcatcacttgcattcataccctgagctaaaagtcccaggatcacacccgtcaggacatctccgctgctcgcagtggccataccgctgttgcctgtagtattcagataaaattctccctgttctttacatacaatcgttcttgcatccttggcaaccgccacaccatgaaaccgttctgccagttctctgccacactccggaagctccttcttgcattccgggatggtcttcgcaagcagtctggacaattctcccacatgtggagtcagaatgataactctgccctctgctccctgggtatgcagcttctcttccaatgccttaccgttttcttctgccagaagattcagtgcatccgcatccagcactaatggctttctgctcttttccactacttttttcaggcattcccgtgcctgttcctctctgccgatgccgggaccgatagcaatgacatccgcccattccaggctctcagacagttgtctgcaggatccgtacaaagcttccggaattccctgctgtaagatctgccggttctcctctgcggtgatgacttttaccataccggctccggtacgatacgctgctcttgctgccaggattgctgcaccggccatgccgtcgctccctgctaccaacagtgctttgccgaaggttcccttattcccggaggatgttctgtccggcagatgctgttcacagctgtcataagtatacatctccgggctctgtcccagaaagctctccggtccgatccccacatttgcaatgtgtacctgcccggcataatcggttcccggatacattacaaggcctctcttgcagaaaccaaaagtaatcgttgcatctgccaggaaagcacaaccaagcacccgtccggtgtccgagcagatcccactgggaacatccagtgccagcttaaatccttccgccacattcatctcttctacggcttccgcatagatgccttccaccgggcggctcaatcctacaccgaacaaggcatctacaatcacattatattcatctgcctgcgtattactgtctgtcttcaccggaaaatgttgcagggtctgccactggctcttccattgctctgtggctttctccggatttcccacaagtcgtaccgctaccgtataaccgtccgccgcaagaagtctcgccaaagccagaccgtctcctccgttatttcccataccagcaaaaatgagcacttttgtccgttccttcacggcatcaaagcgctctttcagaaaatcctccgcagccagagccgctctttccatcagaaccggccccgggatgccgaggtactctatggtatttttatcgtattgcttcatttcctgtgcagttaccagatatctcatactatttttgctccggattatatttcatgtcaaacagattgaccacttctgcaccaaaaatatcatgcatgtagttgtagatctcctgattctgctgttccatctgctgtttttcgatcagacgttttttcagttcgatacggatcgcacccacccactccgcagtctctttgatctgtttgtcattatccttcataatatcatagcagcagtccatagtaaacatcataagctgaagatttattctttcgatctctctggggatatcttttaactcatcttcgtatgcttccagcttctcattgcattcctcgatcaggcgcttatgatcctcgatctgtttgttcagcttactgttttcgccctgctgttccgcctcatccaccatagggacgatctctttcatcagcttctttttcagattccggatatccttcgactcggtattgagcttaccttgtcgtttcaacagctgattcagggcatcttccgtttcttttagcggaacggaaccggtcttattcaacaaccgataccatttattatccagggtgagtacgggcagatgctttcccgtcaatgcatttttgaaagcagcctgtcggtcctgtgcattttcttctgcgttaccgttgcccataatatcactcctttgatgccttacttcatgttgtattatttctcggtgcgctgaaattcataaaagcggctgcttcgcatccgtcatcgccctgcgacttttccttttattcattttcagacactccgcctatgaaataagcaatcatacgcttgcttatttcatgtctgaactgtaacggttaatattataggatagcttcattaagctgtcggacagatgcacgttctccacctgaattccctcgggaacattcagatccacatgagcgaaattccagatagcacggatcccgttagccaccagcttatctgccacttccacagcactggtcttgggaatcgtcagcacagcgatatcgatgtcattctcccggataaaggattccagctgatccatgggcataaccttcacaccacggacatccttccccacaagctccgggttcgcatcgaacattcccttgaaaataaaaccacgacgctcgaagttcatataattgcccagcgctcttcccagattgcctgctccaatgatgacgaaattatgctgcttatccagtcctaagatcttaccaatctcacgatacagagattctacattatatccatagccctgctggccgaaaccgccgaaattattaaaatcctgacgtatctgggatgcggtcaccttcatcagtccggaaagttcctgtgaagagatacgttctacaccttcatccttaagttcccccaaatatcgaaagtatctgggcagtctgccaatcacagcctgtgaaatttcttttacttccaatactttcacctccgatttttttagtatacaccatatgttaaaaacttgtcaatgaattgacaggttttcttcttttcgttacaataaaatttaaaaagcccggtctccgtgggctggaaataaaggatacttactaccatgatattatcttgtcagaatatttcaaaagcatttgtagaaaatcaggtattgaaaaatgtctcttttcatatagaggatcatgaaaaagctgccatcgtgggcatcaacggtgccgggaaaacgacactgctccgcatcatcgtaggggaaatgactcccgatgacgggcaggtggttctggcgagggacaagaccctgggataccttgcacagaacagcactgtggatacctctcacaccatttacgaggaactgttatctgtcaaggcggatctgctgcgcctggaagaaaagatccaggaatgtgaaaacaatatgaagcatgccgaaggagatgcgctggaagacctgatgaagcagtacacctctctcacccatgctttcgagaccggcggcggctatctctaccgcagtgagctggtcggtgtgttaaagggactgggttttaccgaagatgaattctccaagccggttgccacactctccggcggtcagaagacccgtgtggcgttaggacggcttctgttacagaaccctgatctcatcatcctggacgagccgacgaaccacttagatatgaattccatcgcctggctggagacttatctgttgaattacaagggagccgttctcatcgtctcccacgaccggtattttctggaccggattgccggaaaagtcatcgagatcgaccagtccaaggctacaacctttatgggcaattactccgattatgccgtaaaaaaggaacagctgcgcgttgctgcctggaatgcctatatgaaccagcagcgtgagatcaagcatcaggaagaagttatcgaaaaattaaagtccttcaaccgggaaaagtccatcaagcgggcggaaagccgggagaaaatgctggacaagatcgaggtcatcgaaaaaccctccgaggtccgcacggatatgaagctgacactgacgccccggatcttaagtggcaatgatgtgctgactgtggagcatctggccaaaagctttgattcccataagctcttcacggatgtcaatttcgaaatcaaacgcggcgaacatgtggcgatcatcggtgacaacggtagcggcaagaccactctgcttaagatcttaaacggtctcgttcctgccgatcagggtacctttcgattaggttccaatgtggagatcggctattacgatcaggagcatcatgtgctccacagcgagaagacattgttcgaagagatctccgacgattatccctacctgaacaatacccagatccgcaatgtgctggcggctttcctcttcaccggggaggatgttttcaagcgtatcagtgatctgagtggcggcgagcgcggtcgtgtatctctcgccaagctggtactctccaacgcaaacttcctcatcctggatgagccgacgaaccacttagatatcatgtccaaggagattctggaggatgccctgaacggttacgaaggaacgatattgtatgtctcccatgaccgttactttatcaaccgtaccgcccacaggatcctggatctgacagagggacaattcgtaaattatgttggaaattatgactattatctcgaaaagcacgacaccgtgatggctgcaatagaagccagtgttccacagagtgctgacgcagataacacagttgccgctaaggttgcagaatccgaagtcaaattggactggaaagcccagaaggaagaacaggcgagactccgcaagaaagaaaacgacctgaaaaaatgcgaagaaaagattgccgagctggaagcccgcatctccgagatcgacactgaaatgtccgatcccgccatcggcacccaggtggcaaaattgcaggagctgactaaagagcagactgcctgccaggaacagttggagaaattatatgaacagtgggaagaactggcagagtaaatatttttaagggaagggcacagcaacgataaagtcgttggctatgcccttcttttggtacaacgctggaatatataggtttaaatcgtaatatcattgtttttgcagaacgaccgaaggtcttcttcgaatagtttataatctatcttgccctttttagaaacagcttttactgacgataatatattatttataatcagtgttttctttctggcaatatcggcattaacatattcctcgtaatcaatatgtagacttactgaggcaaaaccagatttaagttcgcacctcttatgagctttacaaagccctttttccaaaacagctgccggtgcaacgattggtactatgccaataatatttattgcatcactatatttcttctccctgacataatatgacagttctcggcacatccaatatatgtcatcgtcaacaccatactcactggtataat

SEQ ID NO: 5516 - DNA, 24914 bp, Unknown
  gut microbiota DNA sequence
gtaagcctgggataaaccaagggataacggaatatagatacacataccgatgaccataagcacaatgcacaggattgccatagttatggcgtcgaagcctttccctgaccgcaggagaaaatagcagatatcaaacggaagtgtacatgccgtattcagcaggatcagtactgcggagatcccgagcgattttttgaataagtatttgaagccgtagaacagattggcagttacagcaggtctgctgcaggcagtattcagataaaataatgtgatgccggtctgaaatactccggtgaaaatcgacaataaagtcgtacaggctgtcaaaagcagatattccgccagagatgtctctgcgcttccccccataagtgtccgtacggtaaggatcatagtgaagagcatgctgacggcaaaggtgagggaaaatacgatcagactccggcagatggacagcaggatggcattgccgtaatgccctgccatctgatctctggctttttctttgagttgggctctggatgcatattgtatcatagaaatcctcttttctttttattattgcgttctattggttattccggctgctccgggttttgatttcgtaaccgcagaatgcatcggaaaacataggcatgtcttacaggtaagattgccagaattcttccatatcgacaccgtacatctgctggtacatctgatccagcatattcatataagaaggatctgtgaataccgtgacaatgctgctgaccgtgatgaagataccgagtgccagtcccacacaggacagccagatcccggcaacacacatattgttcatgcgttgccctcttttccgggtgagcaatgcaaagagaatgcccagagcaccggtgggaatggacagcagtcccgtgcagcataataccagggaacagatgccgcagaccatagaagcgatcgacaaccccctgtatttcggatcgatctgtggtatattttgattcatttcgttattctgattctgataataatccatagaaagcctcatttccgggcggcatgtggtgaatttgtctgccgcgcttatattaagtactgtaccatcttttcctgtaataagcaaatgaaataaaaatgaaaagattgagaaaacttccgatttccagtataatagatccatgcggaaaacaaaatgacaatatgtcatcaggaggaactatggatattatacagaaaatcaaagaagaacttcaggtagaaaaatggcaggtggaagctgcggtgaagctgatcgatgagggaaataccatccctttcatctcccgttaccgtaaggaggtcaccggatctctgaacgacgagcagctgcgtaatctcgatgagagactgacctatctgagaagtctggaagataaaaaggagcaggtgctgaagagcatcgaggaacagggaaaacttaccgatgagttaaaggagaagattctggcagcccagacgctggtagtggtagaggatctgtaccgcccctatcgtcccaagagaaagacccgtgccagtattgcaaaggagaagggtctggaacctctggcagaatatattctgtgccaggaggcaacagaaccggtgcttaacgaggcagcaaagtatgtttccgaagaaaaagaagtaaagactccggaggaagcattgcagggagcacaggatattattgccgagatgatctccgacgatgcggatcatcgtctttacatccgcaatatcaccgtagaggaaggcattgtgaccggtacggcgaaggatgagaaggcccagagtgtctacgagatgtattacaatttcgaagagcctgtgaagaagatcgcaggtcacagagtattggcattgaaccgtggagaggcagaaaaagtactgactgttaaagtcaatgcaccggaggaacgtattctgcgttatctggagaaaaagctgatcacgaaggaaaatgaatatactacaccggtaatctgtgccgcagtggaagacagctacgatcgtttaatagcacccgctattgaaagagagatccgtaacgatctgacagaaaaggcagaggacggagctatcaatgtcttcggtaaaaacttagagcagctgttgctgcaacctcctatcgcaggcaaagtggtcttaggctgggatccggcattccgtaccggatgtaagctggcggtagtggatgctaccggaaaagtgctggatacgaaagtgatcttccctacagcaccgcagaataaggtggaggagtccaaagctgaactgaagaaactgatcaaaaaatataatgtggatttaatttccgtaggaaacggtacagcctccagagagtccgagcaggtaatcgtagaactgttgaaggaactggatcgtccggtacagtatgtgatcgtcaacgaggcaggtgcttccgtatactccgcaagtaagctggcgacagaagagtttcccaattttgacgtgggacagcgaagtgctgcatccatcgccagaagattacaggatcccctggcagagctggtgaagatcgatcccaagtccatcggtgtcggtcagtaccagcatgatatgaatcagaaaaagttaagcgatgccttaagcggcgtggtggaggacagtgtaaacaaggtcggtgtggatctgaatactgcgtccgcatcccttctggaatatgtctccggcattaacaagactattgcgaagaatattgtagattacagagaaaataacgggcgttttgtaagcagaaagcagttgttaaaggtgccgaagctgggacctaaggcatatgagcagtgtgccggtttcttacggatcccggatggtaagaatcctctggatgccaccagcgttcatcccgaatcctacgaagcagcggagcagctgatggcgaagctgggactgacaatggaggacattaaggaagcccagaaacaggcggcagctaagaaagcttccggcaagagcggggcacaggcttccggacagaagaacggcagtaatgtagccaatacagcaaagaaacgggaagagcagaaaggtaagaccgtaagagtgcataataccaataccgctatgggcaaggctctggcagcggccatgggtggtgtgagctttgataattctgcagaaacttctacaaagaaaaatgcaccggcagtacagaatgcatcaaatgatgcaaaagatatttccggactggaaaagcgtattaagaataagaaactgctggcagaagagctgggaatcggcgagatcacgctgacagatatcctgaaggaactggagaagccgggcagagatcccagagacgatatgccgaagccgatcctgcgcagtgatgttctggatatgaaggatttaaagcccggcatgattctgaaaggaaccgtacgtaatgtcattgactttggtgtgttcgtggatatcggtgtccatcaggacggactggtgcacatctcccagatcaccgaccgctatatcaagcatccgctggaagctgtcagcgtcggagatattgtggatgtgcaggtattgactgtggatgtggcgaagaaacgtatcggtctgaccatgaagatccagaagcagtaatattatgatgccagggtcaaaaggtctaagcccacatgagcttgctcataagtgggtgaaagaccttaggacccgccccgatatgagcatcaaagtcgggggcttttgaccccaacatcgtattataataagaagaaagagggataacacagcaaaatgttattcctctttcttcttatgattttataaccaataacaccaaacgatacgaaaagtgaaatagatctttattatgccttatgacctgttttgataatagggcttaaaggcttgtagatgagcagtgtcacaacagagaccagcgttcccttgatgagattcatgggagccacacatgccaccacgaagcttacaatgctgccttcctttgccagcggattgacttcggtacccattgccaggatggcatccagaggcattccgtagaacttggagaaggcgggaagcagatatacggcattgaatgcggtaccgaatatcgtcatgaccagtgtaccggcaatgcaggcaaggatggcgtttttcttagttttcttaaaggaatacacagcggaagcagggatgatcaggctgcagcccactacgaaattcgccagatcgccgatgaaagcggtagaggtaccttttatgcacagcttcagcagtatcttcacgaattccatcatgacacctgctacgggaccgaaagcaaaggaaccgactaagatcggcagctcactgaagtccattttatagaagccgggggcaaaaaagatggggaagtccagcacatgcaggatcatggcgatggcggaaaacataccgatcatggcaagctttctggtgttgaagatcggctcagaaactccgtttttcttctgggcactcttttccagcaccacagccaccaggaaacaccccacgatgaccgccaggaagatgactacataggccacattttcagttacagtttgcattaatttgttcatttcagaactcctttcctatgagaaaaatcaaggaaagccttcaaaaaaagccccggaatacaagcttccggggcatgggtatcacaaaaaaatataagtgatacgtcttctttcatccagactgtactgttggtcccggattcacaccggatcagccgcagaatgcatctgcgggtcgcggacttaaggatgacctattaccgccagtagggaattgcacccaaccctgaagaactttaccttatgcatggaatataacactttgtgaacatattgtcaatatagaaaatctttagaattttcccaacatttttttcggatttccctgttatagtagctgtaataactattcagaaccgcatgcgcaaaatcgcccttccagagctttccttttgcatgactctgaatagttgcaaatacttatagaaatgtgttgacactcaaaagatattattgtattatgcaaacagtacagtaacacaatgaagaatacgcagaaaatgtatcatgaaatgggagtatgtgaggaatgagtgcattagtagagatcaaagatgtgtgcaaggtttacaatcccggggaaaatgaggtgcgggcattggatcatgtgagcctgaccatcgacgaacaggaatttgtggccatcatcggacattccggaagcggtaagtccacgctgatgaatatgctgggatgcctggatgtgcccaccagtggagaatattggctccatggacaggatgtatccgcattgacagacgatgaactgtcggatatccgcaaccgggagatcggctttattttccagggattcaatctgatccccaatctgactgcggtggaaaatgtagaactgccactgatctaccggggagtatccagaagtgtacggcaggagctttccagagaagcactgaaaaaggtgggactggaacaccgtatggatcataagccttcggagatgtcgggaggacaacagcagagagtggccattgcccgagctattgctcaggcaccaccggtgatcctggcggatgaacctaccggcaatctggactccaattccacaaaagagatcatggatattctgaaaggtttacataatgagggaagaacagtcatcctgatcacccatgacaatgatattgcggcccaggcaaaacgggtgatcaagatcaaggacggcaaagtggaatccgattccggacagatcgttccggtggaggagctgcagacagcaggagcgtagtggaaaataaatctttcacatgcaatgccatgccgccggtcacggttaacaaattatgaaaagataagagtatgaatgaatatagaaaggatcataagtgagggatcatggaacagcaggaaaaaacagaacaggcactgagtgctaaaaaaatcaaggaaatgaagaaagcagaaaagagaaagcaaaaagaagcaaaaaaggaacggaaggcaaagaacccaggcaaaaagcgtaaaaaagcacctgttattattgcggctatcataattgtactgatcgtgatacgcatggtaagctgtgcgttttccggcaatgctggagtgatggtaagcaccactagtgcatttcgcggagacatcgaagaaaatgtcagcaccagcggaaaagtagccagtgaggaaaagaccgttttatttgctccggtcagcggaagattaagcgagatcaatgtggcagccggagatgccgtcaaggcaggggatgtcctgatgacctacgacatggatcagatggagcagcgcctgcaggaggcgtccttacagcaggataagagtaatgcttcttataacagtactatgacagagaacagcaaaagtacagcaaaactgaatgaggccaataccaatctagcagtgttggatcagcagcttaccgattacaaggcatatctcaaggaactgcaggataaactgagtacgagccagagggagacccagagacagttgtctgaggagagctacgatctgagcagaaaagcggcagacctgaacaaagaactgcaggacggtgtgacagcagaacgggccaaggaaatcaataaggaattacaggatatcagcagcagtcaggccagaaattcttacgtgcagtctattgctaattccagtgattatgtagtgagtatgcagaatgagatcgctaccgtgcaggagcatattacggaatgtgaaaattacaaggccgagatgcagagccagaagggcagcagtgagggaacgatcctgaatggctatcagtcgcaagcctatgcggcagataaggatctggcacagctgacctatcaggaggcacaggaacagtacgatgcggcgaaaaaaggaattgttgcggactttgacggtattgtaacggagtgtaccggtgtctccggagccagcgtaacagaaggagcacagctgatcacgctggagagcagccagaatgtgaaggtttcctttgatgcttccaagtccgatgtggcaaaacttgccatcgggcagaaagtagatattaccatctccggcaataaatacgaaggcgagatcagtaagatcaatcgtatggcaacactgaacgcatccaatacgcccatggtaggggtagaagtacatctgactaacccggatgacaagatcattctgggactggatgctaagctgaccgtacataccaacagtgcacaggatacattgttgatcccggtagaagcgatcaatgcggataaaaacggagatttcctctatgtgatcgagaacggcatggtagttaagagggcaattacctgcggaatctcctccgatgaatacacagaggtcctggatggcattaccgaggaagaccagatcattgtgaacagcctcacgggtgtcagcctggaggagggcatggcagtaacgactgtgcctatggaacagtaggaggcggatccatgacacaagtatgggaatacatcaaaattgcattgatgaatatccgcagtaataaaggacgttcgatcctgaccatgctgggcattatcataggaatctcttctgtgatcatgatcatttccataggtaatggcgtgaaaagtgggatcaacggagaactgaattctatggcgggcggccagatcgcagtttatagcaacgataccgcagaaaacggtacggaagtgatatttaccgaagaggatatggatgccattcaggagaaagtccctaatgtcaaggcggtaacaccgtcctggagtttcagcggaagcgccaccggcagaaagggaacctttgatgctgctgcaactttcggaaaagcaggattggaatattgcaaccaggatccgatcatcaaaggacgctattttacagattccgattattatacggcgaacaaagtctgcgtcattacggagagcagtgcgaaaacgctgtttggtaataccaatgtgatcggaatgagctttgattatacgttgtatggagtgacacaggaatttacgattgttggtatccgtaaggacaatgcatcgaaacttttcggaatggcaggagccggtacagtgaccatggaggcacccatctccacgatttcggacggatatggattctatgtggagtatacggatctgctgatcgtcagtgatggtgcggaaaatgcctctcaggtggcgaaggatgtggtgagattgttggagaaccgccacggcgttagaggccagaacgccatcttagtacagaactttaatgatattatgagccagatggatcagatcttaagctacatcaccatttttgtggtatttgtagcagccatctccctgctggtgggtggtatcggcgttatgaacattatgctggtatccgtgacagagcgtaccagagagatcggtatccggaaatctctgggagccaggaccggatccatcctgttacagtttctgtcggaatccgccatcattaccctgctgggcggcctgatcggtattctgatcggtgtggcaggagccgtcggaatctgcagcctgattggatttaccgcaaaggtgagtgtgggaacggtgctgggagccagtatgttctcctcggctgtaggtattttctttggaatttatccggcgaaaaaggcagcgaaattaagccctatcgaagcattacggcatgaataatatgtgataaaagttaaatcataattaaataaaatgtaaactataagaaccgcaggtcacagatattggaatccatgcggttctttacttgcttttttatgggaaaaaatttataatgttctctatagtatgcaatcctatgcgcagtcgccggatggtggggatgggattataatagcaagtaactatgcagtcacattattataaggaaagaactcattatggtagaattggatgtgaagattacatcgggggatttatatgactttttattgcggcacagctacaacagtgtgtccggacttctgggagcagtgattggagctttgggcgtgatcgtgggcatctcgagacagtactggatctatctgattcttggcgtggtgattctgttatatctcccatggacactctatatcaagagcaaacagcaggcagtaaacaatccggtcttcaaggaaccgctgcattatgtgttggatgagaacggcattaccatctcccagggggacagctccacctgtcagaaatgggaggattgcttgaaagcggtatccaccggacgcagcatcattgtgtatacggcgaaaaataatgcaacaatttttcctaaaagtcagatgcaggataagacaacggatgttattgaaatgatttccacccatatgccgcccacaaaagtgaagatccgcagctagatgcatggatacagcagaagaatagagcatgtggttacttcgccatataaaactgcttatctgcctgtatgcaggcattcgcagaacgcagttttgcatggctctgaatagttacgaattatataaaaagtaacagtaactgcataaccgtaacatgtaacaatagaaagcgtaaggaaaatgacaacaggcgattcagcagataacagagaattcaaaaaagaaatcatagagacccacagtgcggaagagacctttgcactgggacagcggatcggcagggaagcacttcccggacaggtctacacgctgatcggtgatcttggggttggcaagaccgtatttacccagggcgtggcagatggcctcgggatcacggagccggtgaacagccccacttttaccattgtgcagatctacgaggaagggcgcatgcccttttaccactttgatgtctatcgcatcggtgatgtggaggaaatggaagagatcggttacgaggactgcttttacggagagggactttgcctgatcgagtgggctaatctgatcgaagagatcctgccggaacattaccggcaggtgaccatagaaaaggatctggagaagggctttgattaccgccggatcacgattgaggagatgactacagtatgaagatattagctttggatagttccggactggtggccagcgccgccatcgtggaggatgacgtcctgatcgcggaatacaccacggattataagaaaacacattctcagaccttattgccgatgctggatgagatccggcagatgatcgatctggatctgcataccattgatgcgattgccatttccgcaggccccggttcatttaccggactcaggattggcgcagccacagccaaaggactgggactggcactggatcttccgctggtagaagttccgacactggaaggacttgcctttaatctctggggaacggacaggctggtatgtcccatcatggatgccaggaggaatcaggtatataccggaatctatgaattctgcaaagaagagactacggagaacgaaaataccgaacaacagcttatgatgcacagtgtaatagggcagtgtgccattgctgtggacgagctggtggaggcgttaaaccgtctgggacgggaagtaatcttcttaggagacggtgttccggtctatcgggaacagatcttacagaatctgaaggtttcctgctcttttgcaccggctgccaacaacagacagcgtgccgccagtgtggcttctctgggagctatttattatgcacagggcaaaacggtgaccgcagcggagcatgaacccgaatatctgcgcaagagtcaggcggagcgggaacgtgaggaacaggagaaggccgcaaaagaggcacaggcatgaagatagaagttcataagttacaggatacggatatcgaagaactgagccggatcgaggcagagtccttcagcatgccatggtcggtggaagacttcagaggccttttgacgagagaatattgcctgtatgttgtggcggaggcagatggtcatatcgcaggctgcgccggtttgacggatagttttcatgagggcaatatcgataatgtggtgacggctccggagtatcggaatctgggcattggcagcaaaatgctggaagagttgttacgcctcggcaatgagcgcgggatcacagcatatacgctggaagtcagagtgagcaatgcaccggccatccgcttgtatgagaaattcggttttgtctccgaggggatccgcccgaaattttatgaaaaaccgacagaggatgccatgatcatgtggcgccgttaacaagtattaccatcacttttccggcggattatccattataatgatgccagggtccaaaggtaacatttacagtcagaaaggtggaaacaggatgcgaaaagaagaaaacggtaaattacagcaggtaatctgtaacggttgcggcaaggagttgaaaatagaaaatgaaatcgtccgtgaaggatgtttcgccgcagatgtgagatttggctatttcagcaggaaagacgggctcagacacaagtttgacctgtgcgaagactgctatgacaaatggatccatacgtttgccgttccggtggaagaaatgccggagacagagcttttatagacagaaagaacaaaaagatgctgcttaggcaagattgcgaggaaagatgttagacgtttgcttattgggaaccggaggaatgatgccactgccttacagatggctgacctccctgatgatgcgctataacgggaaaagtattctgatcgactgcggagagggcacccagattgccatgagggaaaaaggctggagcccgaaccccatcgacattatctgctttacccattttcacgcggatcatatcagcggtcttccgggaatgcttctgaccatgggaaatgcagagcgcacggaaccgctgctcctgatcgggcccaggggacttgccaaagtggtggcttctctgcgggtgatcgcaccggagcttccttttgaagtaaaatgcatggagatcacggagaatgcccagacattttcttttgaaggatttcgtctggaagccttcaaagtgaaccacaatgtgctctgttatgggtacagtatggtgattgaccgtgcgggtcgatttgataaggacagagctttggagcaggaaatccccatgaaattctggagccgtctgcaaaagggggagactctggaggaaaacggaagagtcttcactccggatatggtactgggagcggaacgaaagggcctgaaggtgacctacagtacagacacccgtcctactgaaagcatccgtcagaatgcccagggagcggatctgctgattctggaaggaatgtatggcgaacccgacaagctggtcaaagccagagaacataagcacatgacaatgtacgaagcggcgaagatcgcaaaagaagtgggggcaccgaaactgtggctgacacattacagcccttctatgacgagacctgaggaattcatggatgatgtccggaagattttccccgcagcttatgcggcaaaggacggctggaccatggaattgaactttgatgaagggaagtaggaaaatatgaaaaaaaacaacacgtcgatgacgaaaattacggtttttctgatcttcctcattgtcctggtagtgggatattattcgtatctgtcgggaaaaagcaggacagaacagcaggaggccattatgtcagaggtggatacggcactctccagagatctgaccaataattatcctgcgacacctaaggaagtaatcagatattacaatgatctgatcaaatgcttctacaatgaagactgtaccacggaggagcttcaggaactgggcaggaaatcccttcagctgttcgatgaggaactccgggcaaataacgaagaagatacctatctgacccgattacagggagaggttaagaactataaggacaataagagaaaaataacaagtgtttctcttgcgtccagcaccaatgtggactattatacagcagacggatattcttttgcccggattgcctgtggctatggcatgacggaaaacggaaaaaagagttccaccatgctggtatatctgcttcgcagggatgaaaaccgcaaatggaggatctacggctgggagacggcggatcagttgaatgacagtctggaacagcaggagaataattaaaagcaaagtaggcagaaaaatggcagagacagaaaaacaaaaagatatttatattctgggaattgagagctcctgtgatgagacagcggcttctgtggtgaaaaacggcagggaagtgctttccaacgtcatttcctcacagattgcattacataccctgtacggtggtgtggtgccggaaatcgcatcccgcaaacatatcgagaagatcaatcaggtcattgagcaggcgcttgccgatgcccatgtgacgctggaagacattaccgccattgcggtgacctatggtcccggattggtgggagcacttctggtgggtgtatctgaggcaaaagcaatcagttttgctaccggaattcccctggttggagtacatcatattgagggacacatcagtgccaacttcattgagaataaagaactggagcctccttttatctgtctggtggcgtccggcggccactcacatctggtggtggtcaaggattacggtgaatatgagatcatcggacggaccagagatgatgcggcgggagaagcttttgacaaggtggctcgtgccatcggactgggatatcccggcggtcccaagattgacaaggtgtcgaaggagggcaatccggatgccatccacttccccagagcagcagtggcggagaatgaatatgatttcagcttcagcggtctgaaatccgcagtgctgaactatctgaacggatgccagatgaagggagaagagattaatcaggcggatgtggctgcttccttccagaaagcagtcgtagatgtgctggtgagccattccctccatgcagtgaaggcttatggactgaataaatttgccattgccggcggcgtggcttcgaattcttccctgcgggcagcgtttgaggaagaatgcggaaaacgtaacatagcattttatcatccctcccccattttctgtaccgataatgcggcgatgatcggtgtggccggctattacgagtacattaagggtgtccgcagcggttatgatctgaatgcggtgccgaatttaaagctgggcgagcgataagaaccgaaaaaagacttcaaggaaagacagacacaatatggtagacagagtagcacaggacagaaatgagacagaagattacagcatgaaaaatgagatggaaaacggacaggagcctcaggagaatggggaaaagcccagatgtaccgctattatccttgcggcgggcagcggaagccgcatgcagtcggcggtggcgaagcagtttttaccgttaaaagaaaagccactgatctggtatgccttgcatgcggtggaggaatcccggatcattgatgactgcattctggtgacggcagagcaggatattccctatgtccgggaagaaatcgtgcaaaaatatcattttaccaaagtaaatattattacttctggaggagcggaacggtatctgtccgtggggagagccttacagctgattgctgacggacggttgaaagtacccaatgagcacggatatgtgttcattcacgatggagccagaccttttctgacagagaagatattagaagatacctatgcagcggccgtgcaatatcaggcctgtgtggcggcggtacagagcaaggatacggtaaagatcagtgacggagaaggctttgccctgtccactccggatcgaagaaccgtctggaatatccagacaccgcaggtatttgagaccagcctgatcctgcaggcatacgagagactgaaaaatcgtcttcccaggatgcaggaacagggcattcaggtaacggatgatgccagcgtggtggaactgtttactgagacaagagtgaagctggtagaggcttcttatcagaatattaagatcacaacgccggaagatatgaaaacagccgaggcatttctggaggattaaatcctccgaagatgtcccggctgttcctttgtgcatttctatcaagagattgttctatttttcccgcatggcactgggggtcactccgtataccttcttgaaggcacgccggaaagtattggaattattatatcccacagcaatatacagctcattcagactgatatcggtctccttgatcagtcttgcggcctctgtcatgcggatattctccagataagtggagaagttgactccggtcttttccttgaacatatgggagaaatagctctctgagatctggaattcatcggagatcttgttaagccctaaggaagggtccttgtaattttccttaatatatttctcaatggtggcggataacgtattgtcatcctccttattgccgaagagattacacagggataaggcaagatcttcgcacaatttgaaggtcaggtgctcattgaaacgttcatccagcacctttacagcttcggaatctgcatcctgaggcagtgcaaatcttgcttttaataaagtgttacggatatctgacagcaggtattttaacaggttgaccggcagggtacgttcctcgatattttcctggtggatcagattgaacagctccagtacctgcggagtattgccagtggagatgaaatggatcagcttcgtggagatctccggcggataatagaacacgttggaatcctttttaatgaattcatacgggaagaaaatgtagttcttcgtggtatagctgacagcctcggaggcctgctggtagcattcccatacgttcatcagggaatccgtattgcgtccgatacctgcgaaaagccagatgtcgtaagtgtccagcagataatcatgcagacgcaggatgcagttgttgatcttcaggatcagatccttttcttcttcctctgagcagtgcagcaaaacggaataggtacggtccgaggggctgaaatagaacagcggtgtaccgaagaaattctccagtgcggactcgatgatcttttccagttcttccatggattccacgccgccggggagagtgatttctgtattgtctccgaaattattatagtagacgatgtacaacacattataataagaagaatccgcaatacccagatagttttccatgtaggtaacttcatcctcggaagtagcagtaccggataacagctgtctcacataggaggtacagatgatcggacgctgactgtctaccacttcctgcagatttttctgtacttccacagcggtctgcaattcctgcccaagctcaatgatcgggcggacattgcggcgggagaaataatagaccagacagccgcctgtaagcaatgccagcagggcaaaaaagatgaaaagcagctgggtgccacccaatccggcggtcgccttgtagggcgggaagctgaaatagtaagaataactggtgttatccgaaacgtatttccccaaagtaaagttctgcccatcgatccggacctctgcatagcccttattaaagtccagagaatccaacatttctgcggaaatgctgttcggagtatttatcgtaagcacggtggagtcatcttccgcggtcaccgccaggaaattatcaccatccatctgaacacagtcgaacagatccgccatcttatcctgttcgaagataaagcagaccttcgcattggcatccatataatagagatcgttcaggtcgatgatatacatatagtatttttcgctgtaatttggcatgaactgatccatgggaagaaagcggttctcgtattccggttccgtcatgtaggatcgccacatttctttttcggtagaaggatacttctggatccagctatagaaccgctttgcggatataaaataagtaggattcaatacatagtctgtctccggaaaatagacaaaggactcttttaacggaagaagagcttctgcatatacattggtagccagagagttctgcaattcatttcccatttccgtaaaaggataataggtattctcataattcatgactttccggaaagtgtcgttctgcagaagctgtctgcaatagacttccatgatattcagatcgctttcaaacagctctgcattgctgatcagggttgtctcgttctgctgatcataagaatcacgcgcgttatttatcgtagaacggtataaaaagatgaacaaaaccagaatgatcagcaggaaaatactgtaagaggttaccattttcagcattaatgtattgttgtggcttgtataatttgtatcattaagggtgtcttttttattaaaaatcattcatgatcactcccgtgtctcaatttttttagataatataccgaataaaccatgtatattgtatcagttacttacaaaggaagcaagatgtaacccctttcaaatttaaaaatatcaaatgtaagtgctttcaaagaatgcagtaaaatcaagggtttgcagaatcggtggtcaaaatttgcacccgaacgcaaaaattgtaacttgtttttccaggtgacggatggtaaggtgagggcaagtcaagggaatgaccccatgacaaatcatgattccaaatttttagggaggaaagaaatgaagagaaaagtattatccgtacttttagcatctgctatggtagcttccttagcagcatgcggaagcagcaatgatgctcctgcagcatccaccgacagcgcagcaactggcagcgcagcagcttctaccgaggcagcatctaccgaagcttacaatctggaggagattaacgtagtagttaatggtactctgaccgcaaccgttgataacggccaggctgaattcgttcagcagtgggatgatgcagtatccgaagcaatcggtcatcctattaagatgaacgtccagcagttagaccattccggttataccgatgcagtaggtcgtctgttcgcaggcggtgactatcctgatgtaatgatcatgagtgcagatatgttcaagcagtatgcacctaccggtttgctgtgggatatgtccgaagcatatgcaaacgctaaattccagtctcacctgatcctgcctgagatcaacgagaacctgaaggatgaggaaggtcatctgtatggtttcgctcctacctatggtaatggatgtgttacctacgttaagcaggcatggttagatgcagttggcctgaaggctgaagacatcaagacttatgatgattactacaacatgctgttaaagttccacaacgaagatcccgatggcaacggcgtaaccggtgatacctatggtgttatcgcagctggtttcgttggtaacgaggctccttatgtaaactatctgcctgagttctggcaggattcttatcccgcaatcctgcaggatgagaatggtacctggtacgatggattccagaccgatgctaccaaggcagctctgttaagattacagcaggcttacaaggatggcgctatcgaccctgagaccctgaccgcttctaccaagatcgctcgtgagaaatggttctctaacgatcagaccggttcttcaggtgtattcacttactgggcaggttcctggtatcagactctgaccgataacctgatcaagaacggtgttgatgagaagctggttgagctggctcctatcgctgaggttggcgcttacctgaacagagaagctcctgtatgggttatcattgatgacggtgacggagacaattcccgtgagcaggctatcttcgatgcattcatcgagaccatgatggatggtgacaaggtgcagacactgtggacctacggtgcagaggatgttcactggtctaccaaggctgaaagcttcaccatcaatgcaggtactgacaaagagaagtcttacgagtacgaagatggtcagttccacttaaagcagtctcctaacgatcctaactccgtatggaagaagaacgctatggatcccgctctggttatctgctctctggacaacggctttaacgatatctccagcctggctgcagagggtaacaagttcttcaccgagaactgcaaggatgctcctcagtctcctacctctgagacctacaccaacgagtccggtaccatctatgatgctaagctggcagctatcacttctgtagtagttgacggcggtgatgtagatgcagctatgcagacctacgttgacactgttggcggtatcattgatcagtgcttagctgaactgaatcagtaattgagaccgtaatatagtagcaaaagctgcaaaagcatgatataattatcctgtcccatcgggatacaaagcctgtgggacaggatattttagagagaaaagaatgtgtgagatgaagttgaaaggaagagggatggtatgagcaagaaaaagaaaatcaccacatccaccggcgtagaagtacgtcacaagcctttgggtctccggatctggaataacagaggctattatgtaatgttcctgcctgtatttatatttattttgatcatgtattactggcccatgcttggtattcgttatgcattctacgattacaagcccgtaggtgctcctacttttgtgggactcaagcacttttacagtatgtttaagaccgatgcgttctggagtgcattcaggaacacattggaactgagtatcatgaagttattgatcacgaccttcactgcggttatcgtatcaatcttcttaaatgaaatgggaaatctctttgcaaagaaaactttgcagactattatatatctgccccactttatgtcatgggcagtagttgcatctatcttcagcctgttcctgtctccctcctctaccggtctggtaaacggaatgctgcgtgactggggcatcctggcaccggatgccaagggaatttatttcctggcaagcactgcatggtggagaccgatcttctacattatcaatatctggaaagagaccggttggggaaccattatcttcctggctactctggcaggtatcaacccggagctgtatgaagcagctgatatcgacggtgcaacccgtatgcagaagatgcgtttcgtaacgctgcctgcactgtccaatactattatcactgtattgatcctgaaccttgctaaggttatgaatatgttcgagtccgtattcgtattgtacaacaatgcggtatacagcgtatctgatgttatttctacttatatttatcgtcagacattcgcaatcgctctgccgaactatggttactctacagcagttggtctcttcaagtccctggttggctgtgtactggtactgatatgtaactgggctagtaagaagacccgtggccgtggcattgtataggaggtgttaaacgtggcaaagacagcttatcgtaaacctaagaaaaaggttcatgtattcgatattgtaaactacatcgtatttattctcatcggcctcctggttctggtacctatctggaaggtagtagtagactccttcaatgctgtgggtgtataccagttcagactgtggccggaggattttaccttagatggctataagaccatcattcatacccagagactttacagaccgttcatcaactccgtgatcacaaccgtgctcggtacgttccttggtctgctcctgtccaccctgggtggctatgtactgatccagtttgatatgcccggacgtaacttcttcgcatatttccttctgtttaccatgatcttctccggtggtatgatccccgagtacctggtaatgaagcagttacacctggttaacagcatgtggatcctggtggtaaagcacggtatgaacgtgtacaacctggtactgatgcgtaacttcttcgaaggaatacctgccagcctgttcgaggcggccgagatcgacggatgttcccctatgggaatcttcttcaagatcgtgcttcctctgtccaaagcagctctggcttccatcggcctgatgttcgcagtaaccgtatggaatgactattctaccgttaagatctatattaccaatcctgaccaggttaacttccagtatcagttacgtaatatgatcatggatggtgatacccctaccacacagtattcggtatcccagaacactctgttctatgcagcgatcgtatgtgcaatccttcctttcatggcactgtatcctttcctgcagaaatacttcgtaaagggtgttaatatcggcgctgttaaggagtgattttcttctcgcacgtacttagacttagacaagggaaacttcggtttcccttgtgttgtatctgcgggcaaattccgcaagaaaagatgcgcaggggaagcgcagaaatgagggcagaaatgaataaaattttttgggctgcagattccacggtccagaccaatgactatacgacctatccgcagacaggcattggtcaggtatttcctttatttgtaaagccggaatatcaggtatgcaatcatgccaagaacggcagaagcaccaaaagctttatggacgaggggagactgaaagccatagaggagaaaattggtgcaggagatttcctgtttatccagtttggacacaatgacgagaaaaaagaggatcccaccagatatacagagcctttttccacttacatggagaatcttgaaacctttatccgtgtggcaaaagatcatagcgcttatccggtgctgatcactcccttagagcgcagatgctttatggatgagaaacacttggggatcggagctcattccgattatgtggctgctatgaagcagaccgcggagaaaaataatgttcctctggtggatctctacagcatgagccgtatggagttaaaaaaagccggagagaagaacagcagaagatggtatatgttcttcccagagggcgagtataagaatcacccggagaaatccgaggataatacccacctgcgttatgacggtgctgtgaatttcgcatcgctgatcgccagagggttaaaagagatcggtggaatctacgcagagatgctgttggatgatctgaaactgtaatcttgcagaccattatgaaaatacaaaaagtccgttttgcagacaaattttgtcagtgaaacgggcttttttgtatcttgatacaagaaccccatttttttataatgttgctatcattatgacagacagagggagaagagcatgaacccatttcagttaagtagaaacactaccttactttcggatgccgtaacagaaaaagccgtagaacttgcctgtgagcgactccggagagacatggaaaagactttgactgacatagtcaagaatagaaacaggatcattttgtgcaaaaaagatctgaaaccggaacaatatgagctggaagtgacagaacaggagattacgatctacggagcggatgcccgttcctttatctatgcattaaattaccttagtgaaacctaccttggagtgctgccattctggttctggaatgatcagaagatggaagtgaaatcttatgtagagatcccctgtgggatataccattcggagccggacagaatccggtatcgtggatggtttatcaatgacgaagtactgatcagccattggacagccggagtatcaaaagactatccatgggaaatggtgtttgaagcgctgctccgctgtggtggcaatctggtgatccctggtacggataagaactccagaatttacgctcctatcgcgtcaaatatgggacttatggttacacatcatcatgcggaaccactgggagcggaaatgttcctacgggcttatccggatctgaaaccctcctatctgaaacacggagacctgttcgataagctttggcaggaagctgttgaaaggcagaaggacgaggaagtcatctggaatattggcttccggggacagggcgatgtaccgttctgggaaaatgattccgcgtttgatacttccgagaagcggggagaattgatcagcaatattatgaagaaacaatatgcaatggtcagagaacagattccggacgcagtgttctgcacaaatctgtacggtgaaattctggaattatatcgggagggctgtttgcagattccgggggatgtgatcctgatctgggcagacaacggttacggcaagatggtatccagacgtcaaggcaatcataaccccagagtgtcagcgttgccggaggaaggagataagggacggcatggcacctattatcatgtatccttctatgatttacaggcggccaaccatattaccatgctgcctaattccatggagttcgtggaaaaagagcttacggatgctctgaggcatggaattacggacctgtggcttgtcaatgcatccaatatcaagccgcatgtatatcctctttcttttattgctaatctgtggaaacaggatgctctgtcggcagaagagcatagaaagcgttatgtcaccgaatactatggggcggagaatgatactgcgcagctttccattatggaagactgcattcgcgattatccgagggctatgttaccctttggagagaaagaggatgagcatgccggagaacaattctataattatgttgtgagggattttatctatagctggatgaagaacggagctgcagaaccggtggaagaactgttctggtgtattcataaggatacctttgctgcacagatggaatggtttacaggaaaatgtctgcagacgggaaaacagcttgagggtctgtatgagcgcggccttaccgttggggaaaatgaattatggaaagattccgtattgctgcaggtgaaaatccaccggaattgtctacagggagctaccttatttacagaagcatttgcaacatatgaacggaaggaatataagaaggccttcttcctgttgggtaatgctgcagaagcatttgaagcggcggacagcgccatgagggatcgggaacacggaaaatggaaagacttttatgccaatgattgcctgacggatgtgaaggagacagcttactgcctgaaacgcctgatgggctatatgagaaatctgggagacggaccggatttttacaagtggcagagagaagtgacctactctgagaatgacagcaaagtggttctgatcactaatatggaaaatcatatgacggactgggagttgtatcttgcagggaaaagcagacagtggtaaaaagcaaatagtaggaatatttgtaacaattacatgataacagacacaattcatagaaaaaactgtattcagcaaaaagaggaaaagcccaaaaacgtgataaaatgggctttttctcatcttaaaaaaataaaataaaaattgtgtaaaaatgtgttgacaatagcaaacctttttgttagaatagcttttgtcgtcaggtgagcaacacagatgacaaagacttaagacacacattcggagagatatcgaagtggtcataacgaggcggtcttgaaaaccgtttgtccgaaagggcgcgtgggttcgaatcccactctctccgctaggcattcgtgccgccgataattatatagattattagaatcaactatttggagaagtacccaagaggttgaagggacacccctggaaagggtgcaggtcgttaatagcggcgcgagggttcaaatccctccttctccgttggctgttgtaaaaagtcaaaaaacttgaaaaaagttgttgacaaacagaaatggttatgataaactatcaaagctgtcgctgaaaacaacagcaaagcaacacagctcttgcggagcaagaggttatgatctttgacaaataaacagtaatgcaaccctgaaaattccaagattttcagaga

SEQ ID NO: 5517 - DNA, 1233 bp, Unknown
  gut microbiota DNA sequence
gaaaaacggaaataaacagaagaaagtaaaaatcaaaacagaaattacaaaataagaagatggagataacaatgaataattatttggataaagtatttgatactcccaataaaaaagcatttatagctttccttaccgcaggagacccggacgcggacagcaccgtaaaatttattttagagatggaaaaggcaggggcggatctcatagagatcggtatccccttttccgatcccacggcggaaggcgtggtgatccaggaggcaaatatccgttctcttagcaacggtatgaccacggacggtgtgtttgagatcgtgaagagagtgcgggagcagtcacagattccgctggcatttatgacgtatgtgaatccggtattccattacggatatgagaaattttttaccaaatgtgaagaactgggtatcagcgccatcattattcccgatgtaccttatgaagagaaggcggaggtggaggctcccgccaaagcccatggcgtgaaggtgatctccatgatcgcacccacttccgagagccgtatccgccagattgcatcggaggcggaaggattcatctatgtggtaagctccatgggtgtcaccggtgtgcgcagcgagatcaagaccaatctgcctgctatcgtggaaagcatccgcaccgtgaccgacgttccctgtgctatcggcttcggcatcagcacccccgagcaggcgaaagctatggcatccatatccgacggagccattgtcggaagcgccatcgtgaagatcattgcaaagtatggcaaagatgcagctccttatatcggagaatatgtgaagagcatgaaagaggctgtagcagagtagacaacgatagggaggtatgacacaataatctaggaaacggttattgctgtaactacttgagcaaaaggaaattcataagattaaaatgggaagtttccaaatgctcaattgatttagacgtatcattgtggtaaatgtgaattgtcaagtatgttcattcttgcttcattgctttttagataacttaatcgtataattgtatcattgctagtacaattaaaggggtaaagttatgcaaaaggaagcatttggtaaattactggtaattttaaggaagaagaatggattaagtcagaaggaactggcagagaggttgtcgatttctacgtctgcggtaagcaaatgggagaatggagtttcccatagttaaagataccac

SEQ ID NO: 5518 - DNA, 3356 bp, Unknown
  gut microbiota DNA sequence
atctgtcagctgatatccgggttgtttacacagatattacatgttgtttacccgcccaggatagtgttgctgcaactgttttggtaacatataatgcgctttggagaaaaaagcaactgcgaaacaggatgtagcgtatcatagcacgaatttgcgggcggatggtacaatgaacatgaaataagatgtatataaagacacgggaattaacacaggatggaaggaaagaagtagaagaatgacatatagtgaaattagaaaaaatgaagaagtactgacatttattaaaaaaggaaatgcggatctgggtgccatgggattcaccgatcattcggaggcacattcgggacttgtggcagagcgggcagcagagattctgaaaaaaatcggctatccggaaaaagatattgaacttgtgaagatcgctggattcatgcacgatatcggaaatgcggtgaaccgtagccatcatgcagagtacggggcgtaatccatgttttttctttgttgagccccggaagtttccgacaagcggggcgtaattcgtgttttttctctgctgagccccggaagtttccgacaagcggggcgtaatccatgttttttctctgctgagccccggaagattccgacaagcggggcgtaatctacatttttcttctactatgtcccgaagataaaaccctccgcaatgagccacgctattcataagattgtcagcataaaacgctgccaatcttatttcatatcgcggcgttcgccgcatctcggcataagtgaagacagcgaatcatgcgcgagcgcccatcgctgtcttcactatgcctatgcgcggctcattgctcgcgtaactttccagttacatgcatgactgttttgcatatacatatagcttgtgttacaataaacagaaaagcaggaattggggagagaattgtatgaaagcacagggattattgtttcaagtgcaagataaaggttaccgtgattttcagagcaagctgatcccgacgatcccggcggagacgattattggcgtccgcacgccggctatacggaagctagcaaaagaatatgccaaggatccggagagtgcagcgtttttgatgcaactgccgcatacttattacgatgagaatattctgcatgccttgctggtggcggagataaaagattacgacacctgtgtaaaagaggtggaacgtttcctgccccatgtggataactgggcagtgtgtgatattttttctccgaaggtgtttaagaaaaacagagacagattaatcaaaaaaataaaagaatggacagcttcggaccacccctacacctgccgttttggaatggaaatgctgatgacgcatttcttggatgaggatttccgggtggaatatctggagatcccggcagaggtgcattccgaagaatattatgtgaacatgatgattgcctggttctatgccacggcactggcaaaacagtgggatgctgccgtcagctatatcgaagagaagcgcctgaatccatggacgcataataagaccatacaaaaagcacgggaaagttaccggatcacaccggagcagaaggaatatttgaagacactgaaggtgtaaacggaggataggacagcatgaatgataacatgaaatttcgcagggcacgcagagaagaagcagaagagatcctgcaattataccgttcactgatcggaaccgaatattgtgtctggacagaaaattatcccacagaacgggaagtggaatttgacctgtcgagaaatgcattgttttgcctgtatgagaaaatgctggaacctgatgagagaaaacagggggcgaggctgtcggaagagcagacagcggaacctctgccggttacgagaggacgcttaataggcacaatctccatagacgatgacccggaagtggaggcactgtcctgttggtcagaggaccttaccccggtggcagagctgtccagactgggagtggcggtagaatatcagaatcgcggcattgccaggatcctgttgcaggaagccatggcagaattgaaaacacagggttataaagcggtacacattttagtggcaaaggacaacgtgaaagccctgcgttcctatgaaaaattgcatttttccacagcaggggaatgtgagcttttcgggcattcctattggtgttatgagaggaaattatagaattgcatatatgtaatgtggatacaggcatgcctgagtcccatggaaaagatcactatgcaaatcaatgaaacagagaggaaagacgatatatggtaacgatcgatctgatcacgggcttcctgggatccggaaagactacttttctgaaaaaatacgcagagtacctgatggatcagggactgcatatcggtattctggaaaatgatttcggtgccatcaacgtggatatgctgatgctccatgaactgcggggagaccagtgtgaactggaaatgatcgccggaggatgcgatgcggagagccacaggaggcgtttccgtacgaagctgatttccatgcggatgtgtggttatgacagagtcctggtggagccatcggggatctatgatgtagatgagttttttgatgtactccgggaggagccgctggaccagtggtatgagattggcaatgtcatcgccatactggatgcaagactggagaacaatctttcaccgcaggcggactatctgctggcatcggaggctgccaatgccgggaaagtgatcctgagccatgcggatgcagctaccagaaaacagtgtgaggacacggtggcacatctcaaccgggcgctggaacagctccgctgcgaccggagaatcgacccagagaaggatatcttacagacaaatctcacggatctgacaaaagaagatttacaggaagtatccaaatgcggttatcgtctggaaagttaccgtaagatggatttagagaatgagcagagcttcgactctttatttttcatggaagagaagattacaccagaggctctggaacgcgcagtgcccagactgtttgccgacaagtcctgcggagaagtattccggatcaagggttttgtgaaaaacggagcaggacaatggatggaattgaatgctacaccggacagtcatacaatgcagtctgttgcagtggggcaggaggtgctgatcgtcatcggggagcatttacaggaagataaaatcagagaacttctgaaggaggaagagacatgtcaatcttaagtcagttaaacagtgtaccgatgtacctgatctgtggagggatcattgcttttgtggcagtggtctgtgtgatttttctggtgagggcataccgcgccgggcag

SEQ ID NO: 5519 - DNA, 1343 bp, Unknown
  gut microbiota DNA sequence
ttttgtctgtagaattcttagatttttctgaacttccaagaaaccgtggcacagaagaaaaaaatagggtataatcagaatttagagactttgagaaagcaggaaatgttatgttttttaaaaatagatgtcatatcaccgcggtattggtggcgggagtgctgggaataagtatggtgacgggactgaccgcctgcggcagcagtgacggcacaaaagtggtatttaccacaggatttgggaaaaatgaggtatttcggatcggggacgagtcctgctctaaggcggagatcatgatctacctgaccacgacccagaatcaatatgagaatgtctacgggacggagatctggaatacttccctgaacggagtgactctggaggataatgtcaaggagacagtgctggcaaggattgctcagatcaagaccatgtacctgctggcaaaagagaaagaggtcacgttggatgaagccgaggaggcaaaggtcgttcaggcggcacaggagtattattcttccttaaatgatacggagatcgaggctatgggtgccacggaggagattgtggagaatctgtatcgggaatatgccatggcagacaaggtctatcagttgattatacaggacatcaatccggagatcagtgatgacgaggctcgcaaaattacggtgcagcagatcttttttgcaacagcatccacggatatggacggaaacctgaagccttattcggaaagctccattcagagtgcctatgagaaagcctgcgaggtaagagacctggcggtggacggagaacacgatttcacggaactggcatccaaatacagcgacgattccgagatcacctattcctttggcaaaggagaagcggagagcgcttatgaggaagcggctttcaatttggcaacagacgaggtgagccaggttgtgaaatgtgaacgaggctattacattatcaaatgcatcaatacgctggatcgggaagagacggacgctaataaattaaagattgtagaagagcggaaacgggaagtcttcgggcaggagtatgacagctttgtgaatacactggtgcgtcagctcaatgacaagctgtgggatgagatcacgctgatcatggacgaacaggtgactacggacaacttttttgatgtgtatgcaaagtactttccggaggagtaatttctggttttttacacgctttattaaaattttagaattacggaaatattgataaatactggatttttgactgattgttagcactcatttataatgagtgctaaatttgccttgactttttaattttacagtcctacacttagaatcagttaggaa

SEQ ID NO: 5520 - DNA, 480 bp, Unknown
  gut microbiota DNA sequence
ttcaagtggctcatcaatggcaagtgcgttcaatgcacagtctgatccgggtgtggtttttaaatccttttcagcttcccaacagtcaatgcggagcatataaccagcagaagtataaatatcaatgctgtttctatgtggattgtattctgcaaatattgttctcatcgtatagaatctccttatcattcaatcagtcatttgttacaaaaatcagaagcatttcaatcagttcaccatgtcacttttattttgtgttatactgttttatagatttttcttgcccttgtatttgcccttatcagagttcgtaaacactgacgggacgatataacacaagggaaacaataagggaaagctcacctgcgataaatccagtgttttcaagggtttgcggagaacttaataacaagatataacagttattaaatctcttaaaacaggtgaaatctcaatcggaatttataaaggagaatattg

SEQ ID NO: 5521 - DNA, 2506 bp, Unknown
  gut microbiota DNA sequence
gagcgtttggcgaagtatcggaggatgaactgtcaatgctgacagagttatgtagtgatgccccgtatttggatatcataaaaatcacagcaaatgaaatggatgcttttttgcaggaaaaaatgggaataagtctggcggagacaaaaaagacaggcttggacagtttctattatttggagcaatatgacagttactatctgattatgggagactcgaattttgattggtgtatggttacttccggaacttgggagtcaaataacaaactcatactgaaatacgaaaaagagtatgagggggggcaatgggtggtcattttacaaaagacggatgatggttatttgtttatttctaaccagaaggcagattaaacaagttcagacgagaaagagaggtattttatgaagagaaaagaggaagcaatgaaaaagtatattgcgagttttttagctatttgtatgatctttgttatggttccgattttgcccgcagaggcgctggcctggaagatacagaaagggtggagatacttgagttggtagaaagctacatggatagtcgggaaacagcagtcatgaccggggacacggaaagcttgagaacagtggctgtcaacggcatcgtgaacgatgaaaatgctcacagaattacattgtccgaaaataacgtcagcgtttctgatatgtcttttcaaatttctgggattgacatagaggatacaataacttttgtgacattatatgagagcatggaatatgtagatgacggtgttgtgaagactgcagacattgaacacaacctgactatcatgtacgatgaggcatatgatgtagccaaagtagtgtctgacagttatagggagactgtgtcaggattccaatcctgttcttatgtttctgaagaaattcaagctgttagtgaagcgttatacagcttgaattccataaatactgattattgtgctgaaattgtcagagttgcagaatcccaggttgggtataaagaaaaggcttccaattcagacttggatagtttcacagcgaacgccggttctgcaaactacaccaaatatggtcaatggtatgggcttaaccccgcagcatggtgtgcaatatttgttagttggtgcgcaagtgaagcgggcgtatcaacatccgttattcctaagtattcttcctgctcgacaggaatgaagaatttcaaagacatggattgtttttattacagttctgcttataacggaagctatacacctgaggtcggcgatattttctttacgggcacgagtacaacatctagtagccacactggcattgtagttgaggtgtcaagcacacagattactgttgtggatggaaactggagtgataaggtttcgagacatacgtacaatttaacagatagcagtcttataggatttgcaagcccgatttattaaacataaatatttgacattaaagtagcacaaggagaaagaacttggttatattgagcagattataaaaggtaatgtaaaccgaattatgaaaaaatcgtattcctttccattggggtgaacgattatattttgcttacgaaagccccgtcaaggttgaatttaacggctttcagtccggtcttgactgatcttccgatgcaaaattttggtcacccaaaccaaagaaaggggaggtaaaggcacagccttggaacacttgattttactggagttggggtgattttgagcgtataaagttgacactacctataaaaaatgggagggtgaaatatgaagaaaagaataatatctttggcaattgctgttatgttcggatgctctatttatacttctgctattactacatatgcagaagaagcatgtggagaaacggatactgtgagcaagggaactttactttatgagacagaggtaataacacaaaaagattatgacgaaggattccaaaattatgccctttctgcagcaacagtagacttggcagtaagtatgcacactttttccaacaataatttggcaaatgttgtcggtgttgtaagagattatgatacagaagcctttattccaaatgctacaatttctgtagatggggaagttgcggtcattacgggtgaagatggacgttttcaaataaaaaatctcccttcaggaacatacgattgggaaataaatgcagcagggtattttgcggcaaattatagtaattatgatgttgacagtgcggatggaactacaatttttacattctatataaatgatgacttttctgtttcgcaggatagagaagaaataatgcatgatataggaggacaaactgtactgccttctattatagatagaggaaattttgcaacatcatctgttgccagagcaatgagttctgttccggatgtaagcaattctattgcggtttactataataatcaaacaaaaactgttgatagagagacatatatctatactgtattatcttcggaactttacggaaaaagttattacactggt

SEQ ID NO: 5522 - DNA, 23983 bp, Unknown
  gut microbiota DNA sequence
tttttctttctcctacgccccagcttcttgacttcctcggggcttattcttacttttcttcctctcatgccccggcttcttgacttctccggggcttattcttacttttctttctcctatgccccggcttctcgatttccccggggcttattcttacttttcttcctctcacgccccggcttctcgatttcctcggggcttattcttacttttcttcctctcacgccccaactacctagaaccccaacggcttattttcttctcagatacccttgcaaccggtttccgtgactgtcgacggttactgtcagggctccatagtcggtggtgaggtaccaggggaccttagcatcttccaggcgctgtagcgtcgcggcatggggatggccataggaattgttacgaccacaggagataatggcggcagcggggccggcggcggcaagaaactcagaactggtggaatagcctgagccgtgatgcgctaccttcaggatgtctaccttgaagcccccttgtctccgtgattcccacaactcctgctgttctcgcggttcctgcgattcctgcaatttccgcgcattctgcaaagcctgtgattcctgcgctacccgtaacgtcttcgcttcctgtaacgtcttcaacgtctgcaattcctgtgtcagctgctgctccccttcgccttccacatcccctgtcaggagaatgcttagcttcccggcacccacgccgaagtttttcctttcaccggtatcaccatgaccggttctctcaccaataactccgacagcaaagctgccgttctcaccgtaaacttcgctagcagctcttccgccctctccacttgcttccatcccctctgccgcgccccacttcactgctttcgcaaatacctccacgtagaagcattccgaataggcattggcatccgcaagggtcgtattctcctccgggtgcagacaccgcagccggagtcgactatccctgatctcatcgccacattttatgtaacttaccggtactccggcatattccgcggcaacaagcaatttttcaaaagcctccctgcgctccgcttccgtaatcgcaggcagaaacatctgctccacggtaattccccattctccaccgttctccagcagttccaatatgccattcatatggtcttcatctgggtgcgatacaaacacaccgcgtagagactggattccccggctcttgagataaggcttcaacacatattcaccgattttcctccgactggtactgccgcagtcaaaaagatatgccccctgcccggtctccaccacgataccgtctccctgtcccacgtccagaaaagtcacacggcttccccgatcaaaattgccggtcagtaaaccaactattaatactaaaatcattgcggctacaattcggcacataactccgttcctatatgtcatcactccctgccatgtataccaaaaatttgctaaaacatgccgccatctggtggtacatatttcagagtacctatcagagtgctgcatcttttttctgttactctctctttttctacccctaccgctatcatccactccgcgtgtttcccgacgcagcctttctctttcagcgtggtgtccgtctccatgattattttccgccacataagctgcataaagtctttgtcgcttccatttttccgcataattcctgccaatgatcaacacaaatagcccactataataaacgaccatctgccactttgtcgggcggcccacgcaccataccgctcccggcagttctccgaaccgttcgcagatccattcataccaccacaggatcagacaatccaccgtccctgcaattcccagtcccgggatcaatgacaggattccccctgccatcaccacgctcataaagggcaacaccagcaggttcaataataccgagtagacagggatctcataaaagaaccagagctgtatgggcagcgtaaaaagaataactccggcactggcggcaaaaccgcttttaagtgctgacaccatgcgccaaagcctttcatacaccaccttccgccagccttcccggtacttgttcctctcgtaagcggaatcacccagaatatctgtcacggtcagaagccatgccggtactctaaaaccgttccccccgtttcccagtctcctctgttccgtgtcaaagtcagacctctcaccaaatccgctcttcccatcagtcctctttttctctgcaaagcctaatgcctcaccaagtccgcgcttcccgtcggccctctttttctcttcaagccctgccaccacgccactggccgtttccacaccggcattatcttccctaccatccccggcaaacaccggtgtcaacaagcagatccccagcaccgccccaaaagacatcaaaaagctcacatccccaagccgctccggttgctgcaacaccagcaatgccgccaacagccccacacctgtcagcatatcgtaagtccttcccacgaatatccccaacatctgcagcagatacattcctatggcacggctggcggatacactcatgcccaccatcataccgtacagaagcagtgtcatggcacctcccgctgctgccactctgaccggagcccccagtctcttaatcagccggtagcatcccatccccagcaaagtaatatgcagccctgaaatgcttaagatatgggcgatcccattcctctggtacagcgcctttacctccgcatccagttcttccttctcccccagcagtaatgtctgcataacagaagcctctttctccgggaatacctttgccagtctgtcgtgtaatctccttcgaaaggcaaacaacttttctctcaaaaagttatagtcctcctccgctgccagaatctgtgctttccgcactctgccaccgatgccctttcccgcagaataggcccgcacgtcaaattccccgtgattggtcgcagcatcgaagtgcgaaaaaacgccttccagaacaatatgctggcccagtctcaggctctgtacctcctgtgtgtttgtcaactcacattgtaattttccagaataggaatattttagatcgttttgaataatagaaattgatttcagaataatcgtttcagaagttcttgtgtctatccgtcccgtgatcctcaccggacttccgtcaggcggcagtacgccggcatccccggtgtctgcccccgtcagtattcttcctatggcgagcactatcacgagacacagacacgccataaaaagcggtcgtctcattaagctcccttccgcaggcaatcccgcctgcccacagtcaggactgttccgacagtccaacgcaaaaacagtcctgtcccgcataaattcaaaatttactgttccaaagtcgttacataatccagattccgttcaaaagtggaattgctgaaggtagatggcacttcgccgttgaccaggatctgtactttattgatattatccagttccaccagggaattcacgatggagtaaactgctacctccgtggaaacattgttcaccacggtcaggaagctggaatccagattcacatagcagattccatctttggtcaggatattgatgatcttggtctccggattgatcaccgggtacagaccctcaatctgtccgctgggtcccgcgatcagttcctccaccacgaatcgctccaacggagtattggtggaataatgcttttctctgtaggccgcgatcagcttatcaccgtctgcattggcaaaatacagctttaccttcaccagttcataggtgttgatctcgttaccgtcattattgatgaactgctcggcattcatccagcctaccaattcccctgcattgtcatataactgactgccttccacggtaatcgtcacatatttcacattggacagctgcgtcaatgtccttacaacggccgcccgcaccagtacttctgtggtgaccgaaagttcggaatatgccttatccacattgatcacaagttttccgtcttccacttcataatccagaacctgaaatcccatgtcaaaaggcgccttatattccagcttttccggggtggtggagagaaatgtcatggtctcttccaactgttcctccggtgtcttggtgttcagatactggtcatgaacctcaaccttcgtctctgcggtatttacataatacaccgatatctttttgccggtctccggctctctcgtgccacagccggtcaggactgccagcaacatcagaagcataccggtcaaaacatattttttaactctcttcataactacacaatctttcttacaacagctccgtctaagaggcgatatatgtcagcgggatcttcaccaggaaacaggagccctgcccctcggtactcgtcaccgtaagggatcccttgtgcatcaggacggcgctcttggtgatcgccagtcccagtcccgttccgccgatctctctggaatgagacttgtccacacgatagaatctctcgcagatatgtgccagagcctcctccgggataccgattccggaatcactgacttcaaaggtaaaatactgatgatccgcatccagtatcaccttcacccagccatgatccttattgtatttgatggcattctccaccagattcgtcatgatcagggtcatcttgacttcatccacctctgccaccacaggacggacgctttcaaataccacttccacatccttcttccgggcgatgggccgcagtctctttaagatcagttccgtcagatcattgatgttcaacgatacaatattcagatcctgtacctttttatccatttttaccagtgccaacagatccgtaatgatctggttctctctgtcaatctcggaagcaatgtcttccatgaattctcgatacagctccgccggtacattttcctgtgctagcagggaatccgacaataccttgatggatgtcatgggtgttttcaactcgtgggacacatttgccacaaattcctgtcgggaatcgtccaatgccttcatccgcttcaacagctggttgaacgcatctacgatatgtacggtctccacataatctggcacagagatcgtctcatcactgaagccttcctttaccgcattgatggcctgtgtgactctgttgaaaggtctcgtcaaagctctggacagtatgatagccagtgccaggattgccaccatcatgatcacttccagaatgtacgccttacgattcagcacttccttggcatttacgatactgtcattggaaatgctggtcagcataacgccccggatggcatccggattcctttttccgttttcgtccgtagtgtttgccgtggtatccatgatgggagtggtcatttctatgtaaccgtgctccgggtcataatgggaaatgttttccccctgaaaacatttgatgacctcctcggaaatgatggtctttccttcactgatgccgtaggtatctttttccaccttgaaattcttgttgatgatcataacgcggccttcatacagattggacagcatctccagttccgcattgatgacttctctggaattgccggtgtcctctctgacaccatggctgcttaaataattgttgctgatcagatgattggccaggatcatcaactggttctgtaccactgtggtccgctgttccaccgccagatcctcgtaattgctcacgataccgtggcgcatggcaatacaaggcaccaggccgatcaccagcgtcagcaggaagatcctcgcccgcagacttcgaagcgcgatcatgctctccagcttttcccatatagttgcaaaacgttctttattccattttttcacagtataaaaacctcagttccgaacctctccatgccattcacaaaaccgcacgataaatcgtgctctccgctgcttcgcagctacttttgttcatttgcgtggcggtggctctattcgagccaccttcaaagataagagaaattgattcttacatgcaagcatggcgaatcatttcctcttatctttgccggttctcatagtctcacttattattaaagtagtacccgacaccccatttggtatgcacgtatctgggctcgctgggattggactcgatcttctcacgcagtctccggatatgtacatccactgtacgcacatcaccgggataatccgtaccccataccagcttcaacaaattctccctgctgtataccttgtcgggattcagcatcagaagttccagcacttcgaactccttggccgtcagtccgatctccctgccctggatgtaggctcttttgccgtcacgatccagcttcatatcgccgctttccagaataccggtgttctctgtggttccttttttcggctccattctgcggaagatagctttgatccgggctttcacttccagaatgttaaaaggcttggttatgtaatcgtccgcgccgtattccagtcccaggatcttatccatgtcatcacccttggcggtcaacatgatcaccggtacattggaaaattcgcggatctgctggcagacctcaaaaccggtcagcttcggcagcatgacgtccagtaatatgatgtcatattccttgttatgcgccatctgcaatgcttcctcaccgtcataagcacaatccacttccatgttgtcctgttccagactgaaacggattcccttcacgatcagcttctcatcatccactaccagcactttcttgcctgccatctttccttaacctctctatcccttacttttctcttcacggtcccggcataagccctcattgtaccgtgatcttatcacacaatttgtcatacgcgttctgtttgatcccggataccttcataatgtcttccttcgtctgaaaggctccgttttgctcccggtagcgcacaatatctgccgcccgggaagctccgatccccggcagcgcacacaattcctccgcagatgccgtgttgatattcacaagtccctccgccgtcgcttttacctcggcttccagagtctccgcttcctccaacgttggaaaatacagcttctgaccatccgtcaccgtttctgccagattcacataaaaaggatccgcctccgctgtcatacctccgaccagtcgcaaggcttcctccgctctgctgccctccggcacttccacgactccgggatcccgcactgcgccgcagacatagacatatatcatctgcggttcagcctttgccggttcctgcactgtcacgctgctgcctgcaggctccgctgcctgttccaccgcttccagtgagggaaattccgccacatcttctccggatggaatcagcacaatggcctcatccttcctctgacagccggtcatgaacatcaccagactgaaaaacattccgatcaaacctgcatattttgttttaaaaaaccttatcgaaaacatcatagtcccctttccattttcctgatttcttcacaaaatttcaggggattgcctctctatgctgttaactttcattgtactggaatcgcacggaatttacaagccgttttcgcatttgtggtaacgattcagaaccccttcgtaaaattgccgctacgaggatagctctggatcatttccacttgaaaatcacaatacccacaatcgccacggccatgccgatggctttccgccactcccagggctgcttctccacaccgaaccatccgaacagttcgataatatatgctacagcaagctgagcgaccacaataagcattaccgctttggccggtcccagggcatccatactgcggatcacagtgtaggtgataaaggctccgatggcccctcccaaaagcatatatctgggctccacctgcgctatcttcaagaatgaagtccgctccgtacacagccatgcccccagacataccagcaatgctgtaaactgcacaaatgcactggcggtccagatgccggtggatttcgtcacctgggtgttgaacactccctggatgctcatcagcgcaccggaaactaaagcaatcaaaaaaccgatcataggattctaccaccttttctttttagtagtagtctatcctgtgaccggttcgttcattcatattttattgtaacggttttagttctctgtaccacctacctgtccggctatggtctcgtccagctgctgtaccagagtagtcacgtcgtcaccgttccataccttggaaaacagtacttccaactgcatccagaaatttcccgtctctagcatcttcggcaatgacacactgtccgcatactcatcggcaaagatcataagcgcaccgttgtctgcattctctgccgcctgaagacttgccggcattttgccggagcgttcatacaggccgtccgcatatccttctgccagatacgctgcgaagcagtccgccagttccttgtgttccgaatagccgttgatgactgccgctcccgtaacagacaaagatctgctctgcagttcggcgctgacatccggcatacgggcaattccgtaattaaatgcaaggctgccgtccgcttttgcctcttccagccgtttgaccacatccgtggttccgatggtgaacatggtcttgccatcgataaagtcctggatcacagaatcataagtcaccgtatcggattcaataaagaagaactggttcagtgccttgtacacttccagacactgaatggtctccggattattgatatcaatatcatttctgtcatccccgggatcaccgcctacgatcatgtagttgcctacgatccagtagttgtagaaaatattgttcacgtcccatttcatgacaccttccacaccttccggtgcatcaaaggtatctgcaatattcagcagatcatccactgtggagggaagtgcttccgcgaaatactgctctgccagcgcatttaccgctgcctcatccgctgtcacctgttccgtggtctggtcttccggaagagaatcttcctcgatgatctcttctccttcccctatgggttcatcattctcactgcttcccgccagttccttctccgcctgctgggttgcccaggttcgaagataatcttcattatataccaacgcactggtatcaaaataaaccgggtaaccgatcagcttctgatcataggttaccgcagacagagccgcctgggaaaaatggtctgtattgcagattcccacagtgtcaggcactttcgatgccagtcctgccagataagccttttccagagagtcactgctcaacaggtagatatccggtatctgatcggaatgcagggtctcctgattgatagcttccagatattcactgtcagaagtaagtacgggaatcacacggactccactgttctgttctccgaaggatactgctgccgcattgatataaccggacaatgcctcatcggaataccaacaatagattgtctcctttcctcgaaacagctgcagtccgcttccgctctcctgtgtctgactcatctcctgcgtacttccgtaaacagctgcagcagccatggcaatcacagctgctgtagcgataattctttttttcaaaaacataaattcacctaaacctcttattcgatacaggtgtccaaaatagcaatcatttcgtccacattttcccgggtaatcacgagaggcggtacgaagcggataatgtccgcaccggcattgatcagaattaatcccttctccaatgctctgttaataatgtctcctaccggatggtcaaataccagtccctgcatcagtcccacaccacggcgttctttgatacagtcatacttgtctgccagttcgttcagacgctgttccagatagggagccacctctctcacatgttctattatatggtcctcttcgaataaatcaagcactttttccactgctgcgcaggctaaggggttaccgccgtaggtggttccgtgatctcccgctgtcagagaatgctgtgctactttctccgtcatcataaatgcacctaccggtacaccgcagcccagtgccttggcagaagtcatgatgtccggcttcacgccgaaacgctgccatgcatacatgtaaccggtacgtcccatgccgcactggatctcatccagaatcagcaggatatcccgctcatcgcacagatcacgaacctgttttaagaattcttcattagcgggacgcagtccgccctcgccctgtacagtctccataatgatggcacaggtcttgtctgtcacctgatccagcacactctggaaatcattcagttctgcaaatttgatatgtccgatcatgggctggaacgcctcacgatacttgggattgcccgttactgacaaagctcccatggttctgccgtggaaggagtgattcatggcaatgatctcatggtcggtacagccatccttcagatacgcatattttctggcagccttaatggcaccttccactgcttccgcaccggaattggtgaaaaagacacgatccatgccggatacttttttgatcttacgagccgcctcgatggcaggcacgttgtaataataattggaggtgtggatcaccttgtcgatctgtgctttcagcgcatcgttgtatgccttgttctgatagcccagggcaaatacagcgattcccgctacgaaatccagatactttttcccatcggtgtcatacagatgtacgccttcgcccttatccagaacgatctgataacggttataggtatgcagcaggtctttttccgcctctgcaatatattctttcatagtgtcgctcattttatttttcctcctcatcggatacgatcgcagttccgataccctgattggtgaagatctccagcaacaggcagtgtgccagacgtccatccagaatatgcacacggtttacaccgttgcggatcgcagaagtacagttgttcagcttcggcagcataccaccgccgatgtaaccgtcgtggatcagtccctctgcctcggaagctgtcaatctggaaataaatgtggacttgtcattgatgtccttgtacaatccctcgatatccgtcagaaatgccagtttctccgcatgtactgcttttgcgatagcgcaggccgcatcatccgcattgatattgtaggtgtgataatccttgtccagtccaatgggagcgatgatgggcaggtaatccttctccaacatgtcaaagagaatatccggattcacgccggtgatctcacccacatacccgatgtcctgaccgtcggaatattttttctctacctgaagcaggccgccgtctttaccgctgacacctactgctttcacgcccagctcttccaccatggtcacaaggctcttatttactttgttcagtaccatttccgcgatctccatggtctcctcatcggtgacacgcagaccgttgacgaactttgcctcttttccgaccttgccgacccagcggctgatctccttaccgccgccgtgaacgatgatgggcttgaaacctaccagtttcaacagcgttacgtccttgatgacgtttttctgcagttcctcattgctcatggcgctgccgccgtattttaccacgatgatcttacggttgaatttctgtatgtaaggaagcgcctcgatcagcacctctgcttttttcattacctgttccatatctttttccatttttacctcatttccgcagataccgtgatccgcctgtcatttatctttccggtcgttcttttttaggagcgatagtccgcattgatcttcacataatcatagcttaaatcacagccccatgcggtagcttctgcctcacccatatgcatatccaccagtgcggtgacttccggatcggagagtatcttcgtggcctcttcctcgctgtaatcacatgccacaccattaccgaagatatgaatcttgccactcttgctctcaaaatacagatccacattttccgggtcgaatttggctccggaataacccagtgcacagaggatacgtccccagttggcatcatgtccgaagatagctgccttggtcagagaagaacagatcacggattttgccagagttctggcatcttccttgctgactgcgtttattactttggtctcgaacagtgctgtggcgccttcgccatctcctgccattttctttgccaggaatgtggtgatctcatgcagtgccttgcagaagttgtcgtaatcctcgccctctgcgttaatctcctcgttgccagccatgccgttggccagcaccagcagtgtatcattggtggaagtatcgccatccacggagatcatgttgaaggaatccactacatctgcgctgacgcacttctgcagcatctccttggaaattttcacatctgtggttacaaaacctaacatcgtgcacatattcggatggatcataccggaacccttgcacataccgcccagagtcacagtcttgccaccgatctgtgtctcgatggcgatctccttggaaatggtatcggtggtcataatggcatgggctgcatcggagccagcctccagagtatctgccttggctgccaccagtttctcgatgccagcggtgatcttgtctacgggaatctgcataccgatgacaccggtggatgcaaccagtacggcatcggtgggcacgcccaacagttctccggcacattttgcttctgcttcacagcagtccagtccctgtttgccggtgcaggcattggcgattcccgaattgactaccactgcctgtgcaaatgcagaatgttccacgatctgcttatcccacagtacaggagccgcctttaccacattggaggtaaaagtaccggctacggtacaaggtgccttacttacgatcagtgccatatccttacgattctgatatttaatggcagcctccacacctgctgcctcaaagccttttgctgcggtcacaccgccctggatctgtttcatgttggaataatctcctttcgcttccgttttatttatgatgtcggggtcaaaagcccccgactttgatgcctacggattgcttcgtgctacgcacttccacaatcctaccctctatttattaaacgccgtaatgttctcttcattcaaagtaaagtcgtagtagttcaagtcttcccgctttgtccatccaatgcatttccagaaagcgtttccgatgtcattctgggtaaaagcgatcaggctgaccttgttgatatgttccgctttcagagcattcatgcagtggacgaccatggccttgccgatgccaagtcttcggtaatcttctctgacacatacatggtacagacagcctcgtcgtccgtcatggccgcagaggatgccgcccactacggctccatcctccccgatggctaccacactggtgccgggattccggttgataaaacgttccacaccttctctggaatcatcgatgctccggataccgaaaccgtgaatggtcatccagagggcatgcagaccgtcataatcttctatggtcatgggtttgatcgtaaactgtttgttcatgtatgtattttatcctttctaatcctttccgtagctgctttaagggaagcagggaaccagctccaggccttcgctctcaggaagcccgaacagcaggttcatgttctgtaccgcctgtcctgcggcaccctttacgaggttatccagtgcacccatcataatgatacggccggtacgctcatcaatgacaaaattgatgtccacgtagttgctgccttccacccacttggtctcggggcagctgcccttatccagcacacggacgaatttctcgtttgcataatatttatcatagacagcttttacttcctcataggtaggaagtgtaccgtccggttttctcttcagtgttgcatactcggttgccagaattcctctgttcatgggtacgaggtgcggggtaaaattaatggtcacctggcagttgcccgcatagcctaactgctcctcgatctcgggggtatgtctgtggcttgccacgccgtaggctttcatgttctcgttcacttcgcagaacaggttgggcaccttggcgcctcttcctgcaccggaggtaccggacttggcatccacgatcagggtgttcacatcaatcatgccttccttgaccatgggataggccgtcaggatcgaacaggttgtgtagcagccggggttggctaccaatctggtcttctccatgatcttgtcacgattgatctcgcagagtccgtatactgcttcctcaatgaactgaggagatttgtgctcgatgccgtaccatttttcataggtggccacatccttgatccggtaatcagcagacagatccacgatcttcacctgagagagaatctcctctgtcaaaaggcccgccagaaatccctgaggggttgcggtaaagatcacatctacctgcttcgccagttcttccagattgtcatccttgcagatatcctccaccagctggaacatgttctggtatacctgataatacttcttatctatatagcttcgggaaccgtaccatacgattttggcatccttgtggtttaacaggatccttaccagttctcctccggcataaccggttgctccgatgattcctactctgatcatttttctacctctcttgtttatgtcatcgttttttatttctgtcgccgccatacttgtgtcaacgaattgcttctgtcgccgccatacttgtgtcaacgaattgcttcgcagcaagctgctcacgcaattctgtaaacattcggaatccgctgatttgctacgcaaatcgctacttcctcatgtttagcgggtcacaagttcaaaagccttatcatgcaagcatgaacggcttttcgatcttttgaccctgacaccatgataccactttttgcctaaatgtctactactttttttatttttatgcacgtttctcggattgttgtgtatatttatgcatatattcatactatttttatggttttatgcattatggcggaataatattcattctgttttccgcgtacttttctttcctataaaaatctgttacaataactatgctgtactttcgtttgcagcatatctattttgtggctctttatggtctgtttttcccggatccaaagagcagaaatgaggaaattatggcttttgacggcgttaccattgcctgtgtaatatcagaattaaaaaaagaactcatcggcggacgattatataagatcgcccagccggaaaacgacgaactgctgttgaccatcaagcagcccaccggacaaaagagactgcttctgtccgccagcgcttccctgcccctgatctatctgacggagagcaacaaacccagtcccatgacggccccaaacttctgtatgctgctgcgcaagcacttacagaacggccgtatcgtgaacatttcccagccggggctggagcgtatcgtgcatatcgatattgagcatctggatgaaatgggggatctgcgccacaagacgctggtcatggagctgatgggcaaacacagtaacctgatcttctgcaacgatgacaataccatcatcgacagtatcaagcgggtatccgccgcagtcagcagtgtccgggaagtcctgcccggcaagccctatttcattgcccatacccaggataaactggatgccctgacctgcgacgagactactttccgggagacccttgccgccaagcctcagccggtcttcaaggcgatctacggaagcttcaccggtatctctccggtactggcacaggaactgtgtcacgaggcaggcatcgacggggaacgccctacagcggcattgacggcagaggattatcatgccttgtacgaagttttttccaaaatggtcacttctatcaaggaagagaccttctccccctgcattgcttacaccggcacccgccccgtggaatacgcggcggttcccctgaccatgtacagcaccggagcggatcatctggaatcctacacctccatttccgccctgttggagcatttttatgcggagaaaaataccctgaccaggatccgtcagaaatcttctgacctgcgccgtatcgtgcagaccgctctggaacgggatattaaaaaatacgatctgcagctggcccagatgaaggatacggagaagcgggaaaaataccggatctacggagaactgttgaatacttacggttacagtgcaaagcccggtgacaaatctctcacggcggtaaattactataccagcgaaccggtgacgatccccctggatcctactctttccgctacggaaaatgcgaagaaatattttgacaaatacggaaagctaaagcgtacttatgaagcattgtccgaattgactactcaggtaaaagaagagatcgaccacttggagaccatcagcacggccctggatatcgccctgaaagaggaagatctggtggagatcaaggaggaactgacccagagcggctacatccgcagaaagggcggcacgaaaaaagcaaagatcaccagcaagcccttccattatctgagcagcgacggatttcatatttatgtgggaaaaaataatttccagaacgatgaactgaccttcaaattcgccaacggaaatgactggtggttccatgccaaaggtattcccggctcccatgtagtggtaaagaccgaagggaaggaactgccggatcgtacttttgaagaggcgggcagactggctgcctactattccaagggcagggaacaggaaaaagtggagatcgactacgtccagaaaaaacaggttaaaaagcctgccggtgccaagccgggattcgtggtctattatacgaactactctctgatgatcgacagtgatatctccggaattgaaaagatcagcgactgacttttgacgattccggcgcatcttatatggtcgttaccgtactattcatcaggcagcatattttatgcataaatatactgtatatttttcattctatgcatttatgtgcatattttaatttattttattcatttttatgatttgtttatgcaacttttctgcttgcttttgcgattataatgttgtatagtaattgtcagagcgtaacacacaatcgtggcatctgatacttacagattgcttcgtgctttgcacatcgcattttcagggcttttgcccctggcatcatacacactataaaacggaggattttatcatgaaggaaaaagtagttttggcttattccggcggtctggatactaccgctatcattccctggctgaaggagaattttgactatgaagttatctgcgtctgcgtaaactgcggacaggcagaggagctggacggtctggaagagagagcaaaggcttgcggcgcttccaagctgtatattgaagacgttatcgatgaattctgtgatgattatattgttccctgtgtacaggctcatgccgtatacgagaacaagtatctgttaggtacttccatggcaagacccctgatcgccaagaaactggtagagattgccagaaaagaaggcgctgtagccatctgccacggtgcaaccggtaaaggtaacgaccagatccgtttcgagctgggcatcaaggctctggctcccgatatcaagatcatcgctccctggagaagcgacaaatggaacatggactcccgtgaatccgagatcgaatactgcaaggctcatggcattcatcttcctttctccaccgattcttcctacagccgtgaccgtaacatctggcacatcagccacgaaggtctggaactggaagatcctggcaacgagcctaactatgagcatctgctggtacttggtgtgactcccgagaaggctcccgatgagggtgaatatgtgaccatgacctttgaaaagggtgttcccacttccgttaacggtgagaagatgaaggtctccgatatcatccgtaccctgaacaagctgggcggcaagcacggtatcggtatcgtagatatcgtagagaaccgtgtcgttggcatgaagtcccgtggtgtctatgagactcccggcggtaccatcctgatggaggctcaccagcagctggaagagctgatcctggatcgcgatacctatgcattcgaaaaggaaatgggtgcgaaattcgccagtctggtatacgaaggcaaatggttcactcctcttcgtgaggcagagcaggcattcatcgagaaaacccaggaatatgtgaccggtgaagtaaagttcaagctctacaagggcaacatcatcaaggccggaaccacttctccttactctctgtacaatgagaacctggcttccttcaccaccggtgatctgtacgaccatcacgatgcagaaggcttcatcaatctgttcggtctgtctctgaaggttcgtgccatgaagttacaggagaacgagaagaaacttggtaactaagaattaaaataatgaggtgtctatgataactgcacagactataattactgtggtgatcctgtatctggtgatcatcaatgttgtgggatatgtgatcatgggtgtcgataaaaaaagagccatccggggtgcctggcgcatctcggaggcttctctttttttcacggcgcttttgggtggcagtctgggatgtattctgggtatgcagcacttccgtcataagacgaagcactggtatttcaagtacggaatgccggcgatcctggtggtacaggtactgctttttgcccttttattcaaataggaaatatgctatacttcttttatatgagataaagtccgggaggtatcgatatgcatatagcagtgtgtgatgataatgtagccgacagaaagcagctggagcgtctgttaaagcgggaatccgacaaaagagcagcgtctacgggtatcatttataccgattctttcggtaattctacctcactgctgtccaatcccatgcaatacgatgccttctatattgatatgtgtctgacggaaggcatcaccggcacagaagtggcaaatgcgctgattgcccagggggtgaacgcacccatcgtcatgtgctgttccaagatcaattacagagcacagtcctatccggaaaatgttatttttctggacaagcccatcaaagtagcggaactgggacagagtattgaccatgctctggatattatgtctaaggcagttcctctcatagagcttcgagaggatgaagataccgtctatgtcaccgaaccggacatcctctacgccgaagaagaaggccggaatgtcatcgtcaccctgaaagacggccgcaccgtaaaagtagccaccaccgccatcaatctgttctcccagatagagaatcaccccaccttcttcgctcccaccgtcaagacgatccttaacggcagatatatggagaagctgggtttccgcaaagtcatcatgtgcgatggcaaaaaattcgctctgcacagagactgcgttgcttacgcgaaacagctgctggcggaatatcatgcataaaaaagactccactctctcgaatgaagtcttagaaaatttgaactcgaagttctcagaaaatcacccgtatcgtcgttccttttccgggttcactttccagttccagttcagcgtggctcttggcgatgatatgttttacgatagcaaggcccagtcccgtgccgccggtggatttggagcggctcttgtccacacggtagaagcgctcgaagatcctctcctgatgctccttggagatgccgatgccggtgtcttttaccacgagattggtatgtccttctctggagtaggtctgtacatccacacttcctcccggattgttataccggatcgcgttatcacacagattatataaaagttcttccatcatctggcgattggctgtcacatagcattccgtgccgttcagcgctatggtcacattgtgcttctctgcactcattttcagcatttccacacaattctgcgccatttcatgaagattcaaaagctccgtatccgcttcctcttccgttccgtccagctccgacagccggataatatcgttgatcaatgtcagcaggcggttggcactgttgtgaattccgtgggcgaaacgcaccgtatcctgctccgaagccatgccggtctcaatcagctccgcatatcctgagatggatgtcagcggagtcttcagttcgtgagatacatttgcactgaattcctgacgcattctggcgtttttcataatgtcctcgtgctgtttgcggatcatggtcatgaacggtatcagttcctcataggtctgcatctctgtacattccccgatattctgtgccagtttctcaatgggagccaccagcttcgtggtcagcactctggccgccaccatgcacagcaccagcagcaccacaaagatccccaccatcatgggcagcgcctgactgaaaatgctgtaaatgcttctggcatccttggacagtcgcaggatgctgccatctcccaggcggatggcataataaaaggtggactgggacaaggtctcggaattccggactgcttcaccttcgccgtcccgcatggcttcctggatctccggacgggaagcgtgattccccatggccacagaatctgcctcattatcatacaatacctgtccgtcactgccgatcagcgtcaatcgcagatccgattccaccggcactccgttttccttgatctcttctaccgaagaacagctttttaacagggaaccatagcttttcagatcctccagcacctgtctgcggaacagatcataatacacgactgtgatcagtaccatggtaagcaaaatcgttaccgtggcaatgaggatcatcattttgttaatctttttcttcatcttctgttacgctttctcgccgttcataatgtatcccacattacgcacggtcttgatcagactgccctcttccttcagtttctgccgcagcgtcttgatatgcatgtccaacgtccgggattctccctcaaaatcgatcccccagacgcggtccaggatcagttctctggtggtcacaatgcccgcattggtcatcagaagctttaacagctcatattctttgtaggtcaactccacaggctccttgcctaccgcgacagaatgtttctctcggtccagcacaatgttccccagcttcagcaccttatctttttcctgactcttctgacttctcctgagcattgcctttacccgggaaatcagttccatgacaccgaagggcttcgtaatataatcatcagcccccagatccagtcccttgaccttgtcgatctccgtggtcttcgccgtgaccatgatcaccggcaccagcaccgtgtcctgtctggtacgcagctttttcacaatgctcagaccatcctcgtccggcagcataatgtctaataaaatcagatccggtgtggtatcattcagtgcctcatagaaatccatggcggaatcaaaaccttttacctcatagcccacattggccagggcaaaggtctcgatctcctgaatatttttgtcatcctctactacatagatcaaagccatctcacagcactcctctctgactgtgctttctcttcttaactatacctcggtaaatcctcactccgcaagcagttttgcattcttttccgcaagacgttcctgctttgtgggcggtaactggtatttctcacggcatgccagcactttgctctggaagtccttgttatcttcctggcgcagttcatccaggtaagcgtgggtatcgaattcatcctcattcacctgtaccagacagactgcaatattggagcagtgatcgctgacacgctcaaagttcgtaatgacatcggataagatgaagcccagttcaatggtacattttcccttacggagtctgcgtacatggcgctgcttcacatccaggctcagtccatcgatgacttcctccaacggctccacctgtcttgccagattcagatttccgttcttaaaactggtcatggtaagatccagcacatcgtgtaccgctctctcgaataccttcagttcctcctgcgccttctcggagaataccagctgcttgtcatgcatctcctgtgccgcttccttgatgttgcgggcatgatcggaaattctctcaaaatcgccgatgcagtgcagaatcgtatttaaagtctcactatccttattggaaagctgtttggaactcaatttcaccagataggttcccagttcatcctcgaagcggtccacatccgtctccatctgtgccacctgctctgctttcgcctcatcgaaattatgcagcagctccatagccagatccatggcttccctagacttatccgccatcacagaagccaccagtctgctctgctctacggcataggcaggcttctccaggaaacgtacatccagtaagcttaaagtcttgtctgtctcggacatttccttcacgtcctcatgggtcggcagcgtcaggcaggccagcttcaccagaccgttggagaagggaagcaataccagcgtagccgcgatattgaagcagctgtgaactactgcgattccaaaaggtgttgccacttctcccagaaaagcaaagggatgaatggcattgaccgtatagaacactcccaggaacaggatcgttccgataatattaaaatacagatgaatcagagccgcacgttttgcattgcgggaagcaccgataccggagatcatggcggtaacacaggtaccgatattctgtcccatgataatgggaactgctgcgccaaagcttaccgctccggtcatgcacagtgcctgcaaaatacctacggatgcggaagaagactggatcaccgctgtgagaatgagtcctgccagcacaccgaatacgggattttggaactcgatcagcagattggtaaactccggtacctctgccagcggtgaaactgccgcgctcatggaatccatgccaaacatcagaattgcaaagcccaccaggatggttgccgcattttttaatttgtctttatgggaaaacagtaaaatacccacacccacgatcgctaaaatcggggaaaaagaactgggcttgagcatacggatccagaaagcatcgctctcaatgcccgtcagacttaagatccaggaggtcaccgtggtaccgatgttggcacccatgatgatacctactgcctgtttcagactcataataccagaattgacaaatccgactaccataacagtggtagcggaggaggactggatcacaccggtgaccaccgcacccatgagcactgcctttaacgggttgttggtcagtttctccagaatgcgttctaatcgtccgccagatgcccgggacagtccgtcacccaacagattcattccatacaggaataatgcaagtcctcctaccatcttcagtaaatcaaaaaagctcatactctaatcctctcattttacataacatactttacattttcggtttctatctacactttatcttgcttatgtaaaatgcgttaccagtgaatgtaaaatttatgtaaagttgtaacgatgcagagccatgaactattgttctatgctcgtcagatgctggcatctgtaagagcatagaacaatagttctttggcgagcaagccacaatgagcaaaaggaacgctccgcaggagcagttttgcgaattggggctctgcatcgttactgggattatcagatgctagcattcgtaagagcatatggcaatagttctttggcgagcaagcctcaatgagcaaaaggaacgctccgcaggagcagttttgcgaattggggctctgcatcgttactgggattatcagatgctggcatctgtaagagcatagaacaatagttctttggcgagcaagcctcaatgagcaaaaggaacgctccgcaggagcagttttgcgaattggggctctgcatcgttactgggattatcagatgct

SEQ ID NO: 5523 - DNA, 783 bp, Unknown
  gut microbiota DNA sequence
aaaccgtgctgatgatcgcgcaccgcctgtctaccgtcgccaacgccgactgcatctatgtggtgcaggatgggcaaattgcagaatccggcacaaaggacgaactgtgcgcgcaggacggcctgcttgcccggatgtggcaggattatcagacctcggtgcagtggaaagtcgcaaaggaggggtaaaggatgatcgaaaaaattcaacacgccacggccagctccccggagggcgcaaaggggcttgtaacgggcgttctggcctgtgcgttccaaaacatggcgttcatgctgcccaccgggctgctgtatctcctggtaaaagatctgctggcagactccgcgagcgggagaaccgccttttatctgctggggtgtgcggcctgctttgcgctgatcttgctgaccacatggttccagtacaacggcacctattttaccacctataaagagagcggcacccgccgcctgacccttgcggagcggctgcgcaagctgcccctgtcctttttcggcaagcgggaccttgccgacctgaccagcaccatcatggcagactgcgaggtgttggaaaaggactgctcccacttcatccccggtctgttcggttccctcatttctaccgtgctcattgccctgagcctgttcgcctttgacggacggatggcgctggcagccctgtgggtcatcccggtatccgctgccatcgtggcgggcagctaccgggtgcaggacaaggtgcaggccaagaccatggcggcgaaaatggcctgtgcggacg

SEQ ID NO: 5524 - DNA, 13172 bp, Unknown
  gut microbiota DNA sequence
atctgtgccagaaccggatagtataccagttcatggataccgaaatccttgggatcgcaatctacatagtgggtcagatctaccatcagattagacagtacttttacagttctctcttcggtctggatatatacgaagggaactgcgctgttctggatggtatctgccagctctgcggtcaccttgtctcctgcggatgcgatcacttcaccggtggaaggatccactacatctgcagccaggatctgatgacggatacgattcttcagagctaacttcttattgaatttatatctgccgactttggctaaatcatatcttctggggtcgaagaacatagcattgatcaggctctcagcactctcaacgcttaaaggctcaccgggacggatctttttgtataactctaacagaccctcctgataattctcagcagtgtccttggtaaagcttgcctcgatcttgggctcgtcaccgaagagttcacggatctcatcattggtaccgatacccagggctctgatcagtacggtaatgggaaccttacgggttctgtccacacgtacatagaagacatcgttagagtcggtctcatactccagccatgcaccacggttcgggatcacggtacaggagaagagcttcttaccgatcttatcatgtccgattccgtagtagataccgggagaacgaaccaactggctgacgataacacgttctgcgccattgattacgaaagtaccggtctcagtcatcagcggaagatcacccatgaagatctcatgctcactgatttcttccttctccttgttataaaggcgaaccttaaccttaagaggtgctgcaaaggtagcatctctctctttacactcttcgatagaatacttcacgtcgtccctgcagagttcaaaatccacaaattccagactcaaggaaccgctgtagtcagcgatcggagagatgtcgtcaaagacttccttcaagccttcgtctaaaaaccactgataggagtccttctggacctcgatcagattgggcatctctaaaacctcttcttgtcttgaataactcatacgcataaccttggtaccggcaatcggacgtattctgttcttttccattgacatttcaccccgttctttcagatttaaagcctattttgcgtcggcaacaatgcagtatatataaacgccagttttttggcatgacaaataagcatggtaccgcacaatagtgcactatccataatagcacaatgttagaaatacgtcaaggaaatattttgaattatttaaaaagaatagatatttttaaaaattaataactgacagatgcgaataagaaaaaccatgcaccggcaggtgccggcacatggtctgtcatatactggttaaaaattacttcagagtaacctttgcgccaacttcctcaagcttcttcttgatgtcctcagcctcttccttagaagcgccttccttaacaaccttaggagctccgtcaactacgtccttagcttccttcaggcccagaccggttacttcacgaacaaccttgataaccttaaccttctcagcgccaacctcggtcagctctacgtcgaactcagtcttctcttctgctgcttcagcagggccagctgctgctacaacaacgccagctgctgcagatacgccgaactcctcctcgcaagcctttacgagatcatttaactctaatacagataactctttgatagcatcgattaattcctgtgctgttaatttagccattttaatttcctccatttgaaatattttgattgattgtcaattagctgcaattattattcagctgtgggtgctgcttcgcaagctgctgcgccgcctttttcagccagctgattcataacacgtgcaaaattggtgataggactctgtaagctgccaagcagtttggaaatgagtacgtctctggaagggatgttagcgattgcagccatacccttagcatcataaacagtaccttctaccacaccggccttgatctcaagcttatcagcagtcttagcgaactgagccagtactcttgcaggagcggttgcatcctcggtagagtaagccattgcgctgggtccttccagatactcggacagaccttcgaactgtgtacccttgaacgcaaagttcatcatagtgttcttgtaaaccttgtagctaactcctgcctcacgtaagctcttacgtaactgggtatcctgctcaacagtaagtccacggtagtctaccagaactacagactgggcatctttgataccagcagaaatctcttctactacaggctgttttaattcaacttttgccatttctttacctccttatagattttgtgccgataagaagaatataaatagaatcctgctcgcaggattctacgcctgcggtgaatcgctttagcgatatattccacttcgccgcagtgcgatcctcgcggagcgttttgctttataggataaaatcctataaagtaaaaaaaactctctgtgaagacacagagagatgatatcatcatacttatctcctcggcaggacttacgctcggtctcccttgcacctgctgtcttcggcatggttttacaacctcagatagaatagcatgggagaccgtgtttgtcaaggattatttaataattttctgcatgaatttcaaaatagctctggggatgattacatacggggcaaacctccggtgccttggtgcctaccacgatatgcccgcagttgcggcactcccataccttcacttcactcttctcgaacacttttgctgtctccacgttctttaacagttcgcggtatctttcctcatgatgcttttcgatctctccaaccatacggaatttctgcgccagttcagggaatccctcattctctgcagttgccgcaaaatcttcatacatatcagtccactcgaaattctcaccttcggatgctgcagcaagatttgctttggtatcaccgatgccgttcagttccttgaaccacatttttgcatgttctttctcattatctgcagtctttaagaaaatagctgcgatctgctcatacccttccttctttgctacagatgaaaaataagtatatttgttacgtgcctgggactctccggcaaatgccgcctggagatttttctctgtctgggttccctgatatttgttcatggtgttttctccttctcttttcatctactataccttttggaggtaacctttattctaaaacatacggtttctccgttcttcgaacgttcgaattcgtaaccagcatacctgcaggcagccagttattgtttcctaaggataaatgtattctatcacaaaaaccgcctcactgtaaacagtgaagcggctcttttgcattcgttatctaattagattagagatcagattagaactttgctacgctaaccttaacgccaggtcccatagtgctggtcagagtgatgcttctcagatactgaccctttaatgcgctgggcttagcctttacgattgcgtccataagtgcattgaagttctcctgcagagcttcctcagagaaagaagccttaccaacgggaacatgcacgatgttggtcttatcaagtctgtattcaatcttaccggctttgatatcgttaactgccttggttacatccatggttacggtaccagccttagggttaggcattaagcccttaggtccgagaaccttacccagacgacctacaacacccatcatatcaggggttgctactacaacgtcgaagtccagccatccttcgttctggatcttcgggatcagctcctcgccaccaacatagtcagcgcctgcagcctcagcctcattgatcttatcgccctttgcgaataccagaacttttacagtcttaccagttccgttaggcagtacaactgcgccacggatctgctgctcagcgtgacgtccgtcacaaccggttctgatgtgaacttcgatggtctcatcgaatttagcagttgcagttttcttaaccagagcgatagcatcgttgggctcatagaatgtagcacgatctaccagcttggcagcttcggtatatttcttaccatgtttcattattttacctcctaggttccagcggcaatattttattcattgcctcccaaatatttataagttactcctcaacaacaatacccatgctgcgtgcagtaccagcgatcatgctcatagctgcttccaggcttgctgcattcagatccggcatcttcatctcagcgatttcctgaaccttagccttggaaatggtagctaccttggtcttgttaggaacgccggaaccggacttaatgttgcaggctttctttaacagtactgctgcagggggagtctttgtaacgaaactaaagcttctgtctgcatatacagtaataactacggggatgataagatctcccttgtctgctgttcttgcgttgaactgcttggtaaattcaacgatgttaaccccgtgctgtccaagtgcaggaccaacagggggagccggtgttgctttgccggcagggatctgtaacttgatatatccttctactttctttgccattgtggcacctcctataatgtggtaattcggcgcaggctgccttgttgcttgcctcctgctcccactggaacgacttctcgttcctttcatgctgccactctcttcaccttgcggtttctgagagttttatattttatctccggaattgcccgtgagaaaaaatatccttgtaagcttattaaagctttctgacctctgcaaagctgatttccacaggggtctctcttccaaacatttctacattgatcgtagctgtctgtttgccatagtccagtttctgcaccacaccgacggtatccttccatactccggccacaacagcaatgctgtcgccttcaccaaagtcgatggatacattctcggtcttaatgcccaaaggcttcatctcagcttctgtaagaggtacaggtttacttccgggacctacgaaaccggtcacaccacgggtattacgaacgacataccaggtatcatcgttcatctccatgttgagaagcacataaccggggaacattttcttggagaccgtcttgcgggcgccgtctttcagttctacgacatcctgcatgggaactcttacttcaaggatctgttctgccagactcttgttgttctctatggtcttctcaatattggctttgaccttgttctcatatcctgaataggtatggactacataccattttgcctctgccatacaatcaccctcgctctataatgatgttaagaagtttacgccgtactggataaaataatccagaaccgcaataatcacacccactacaactgatattgcaacaaccgctacggattgcttcaatgttgattgtctgtccggccatgaaattttcttaaattcagcttttgcgcctttaaagaaactggggcgcttctgtttttctgcggaatctcccatttcgacctcccatactagaacggctgattatttggtttctttgtgcaatgtatgtgtcttacagaatctacaatacttcttggtttccattctatcaggatgagtcttcttatccttggtagtattgtagttacgctgcttgcactcggtacatgctaaagtaatttttgtacgcatttttctacctccacgtgttttctgatctctaaatttaagcataaaaaaaagacctaaatctcatctcgcttggatactataacataatctgcggtcttcgtcaactgttttcccaaaaatcccactatttttcttgtttcttcttatttattatgctataatgatcgcataaaagtggggtattggatttccccgtcccaattcatccgcagggaagaaaggagatgcctatgagtgctatcatgaacactgtctataataactacctgaccacctatgcatcaagacagattacaaaatatgacacccataaaaagagtgagcttcgcagtgtatacaactctatcgtaaagctgaacaaggacactccctggtatcttcccaccaccaataaagacacacagcattatgccgtggatctgaaggaaaacgcccgcgaactgcacaacaccatcgcacagatcggcggactggagacggatggactgttccggaaaaagagtgcctactccacagacgatgatatcgtggaggcttcctacataggctccgataccaccacaggagcttctccggaatttgatatcgaagtaaaacagctggccacgccgcaggagaatctgggttattttcttccggatctggcaaccacgcttgctcctgccacctattcttttgatattgcgatcaacgatatgaactatgaattccagttcaatattggcgagggtgatacgaaccggcagatcacggaacgtctgtcccgtctgatcaacaacgcggatatcggtatcacagcagatgtgatggaatccgattcccgttacgcacttcgtctgacctcggatgctaccggtgtaccgaacggcaaggcctatcattttcaggtcagcgatgatcataccagcaagacctccggtgttgtggattacctcggactgaattatgtcagtcgtcctgccggcaacgcaagattttatctcaatggtgaagaacgaaccgcttcttccaaccactttacaataggaaaactgttcgatgtacagttaaaagccgtcagtccggaggatcagcccacacatgtcggtctgaaaacagataccgaatccatcacagacaatatcatccagctggtaggcagttataatgaatttattaaaacagcttcctcctacctggagacacagtccagaagcaaacagctgattcacgaattctcctccatagcttcccactacggtacttctctggaaaacatgggaatgcacctgcaggaggatggtattctatctgtcaatgatgaaaagctgcggcagaccgccgcggaatccgggaatgacctgtccggcttcaatgtactaaaagaattcagcagttcgcttttacacaagagtgatcaggttgctctgaatcctatgaattatgtagacaaaaaaattgtggcctacaaaaatcccggtcacaattttgccagtccttacattaccagcgcttacagcggtatgatgtttaacagctactgttgattcccttccggggaattaacagtagctgttatttcattttctgcttctgttttcttattttgcctttttggatttggccttgtacttatcaatctgtacaaaatcatccatcagctccagaatcttgtctctacctgtctggttcagcttcacgtagttctgcataacacggttttccagaagctgtgctcccagagaagcatctctctccagagaagagaaatccaccgggttcaggctcagcttgtcacacatcttgatcactgttccgtacgccattccttcaatcccgcgctccaatgcagtcaccagtgtgctgtagggaatgttcatctccatggcaaactgtctgacactacgatactgtctcaaaatttctttctttaaaatctccgccttagtcatatttattcctccacgtatcctccaaaattggtacagctataatatacgatttcccgttttccatttcaagtaaaaaacagaaaattaagaatttcgacgaatttttaacaatatttttatatttcttccaattgatccagccagatcctggcacaggcatcggacggcatccgcagatcacctctgggtgacaatgccacacttcccactttcggtccgtccggcaggcaggaacgcttaaactgctgtgtgaaaaatctccggtaaaaattcttcagccacctgcggatcgtcggatcgtcatattttccttcaaaggtctctctcgcgatccggtagaccttgtccggtgcataaccgcaccgaagcatataatacaggaaaaagtcatgcagttcgtaaggacctaccagatcttccgtcttctgtgcaatgttcccctccaccggtggaagcagttccgggctcaccggcgtatccagcacgtcctttaggactgcggtaagctctgcattattacaggtatcggcataataggccaccagatgtctcaccagtgttttgggcactccggcattaacgccatacatggacatatgatctccgttataggtagcccaccctaaggccagttccgacatatctcccgtgccaatgaccagagcattttccttgttggcaatatccatgagcacctgggtacgctctctggcctgtccgttctcataggtgacatcatggcactccatatcctgaccgatatccgtaaaatgtctggtgaccgattcccggatatccacctcccgcaatgtagttcccagcgtcttcgccagcagacaggcattctcataagtccggtctgttgttccgaaacagggcatggtcactgcaatgatccccgacctcggaagtcccaacagatcaaaagtgcgcactgccactaaaagtgccagtgtggaatccagtcctcctgaaatacccaggaccgctgtcttacatccgatatgctcatatctctttttcaggccgaaagcctgaatggataaaatatcttcacatctgcggttgcgttctaccatgtcctccggtacaaacgggtgtgcagcgaacttccggtccagttttgtcccagtcagctgcatggaaaaaggaactgtaagatagggcttcatcggtctctttccgaaggtacccattcgcctgcgctcactgcttatttttaatacatccagatctgtgtaaagaattcccgtagtaaagcgggcggactgtaccaacagtgttccgttctctgcgatcagatcatgtcctccgaataccagatcctgcgtggattccccttctccggcagaggtatagatataaccgcacagaagtcttgcactggaagcttttatcagaagggtacgataatcatccttggaaaccgtctcattggaggccgacagattcgcaataactgtagctcccatcagtgcatgcgaggtagagggcggctctgccacccacagatcttcgcagagctcacatcccaatatcagctccggaagttcctcacaccggaacaacaggttggatccgaaaggaatcacctgttttcccagacgatattccgtcaccgtttcctctcccggtgtgaaatgtctgccttcatagaactccgcatacatagggatatttttcttaggaatcattcccagtatcctaccccggtacaataccgcagccacattgtacagacggccatccttgtccacgggaagtcccaccagaaataacgtttccaactgtccggtctcttctgcaatcgtaagcaatgcttcttttgctttttccaacaaaagttcttgcaaaaaaagatcgttacaggtgtatccggtaatacataattccggaaacactacgatctttgctccatgctccgccgcttcttttgcctgttcgcagattacctgcgcattatagaccggatccgccacccggatcctgggtgtggcggatgctaccttgacaaatccctgtttcataagcttcctcgctttactgtatacattactggatcatctgtttcaattcatccacggtaaaattatagtttttattacagaagtggcagttcacttcgatggtctctccatcatcgatcatggactgcaattcttccctgccaatgctgatcagtgcttttctcactctgtccttgctgcaattgcaggaaaattccacaggaagtgtatcgttgatctccagatccattccggaaagcagtacttccagcattccctccggagtcttgccggcatccagcatagtagtaacggaagagagattcttgatattctcttccagtttgctgatcatttcctcttccgcaaagggcatcagctgtacaatgaaaccgcctgcctgtctcacggtattgtctctgttcatcaataccccaagtcctaccacggaaggtacctgttcggataccgcaaaataataggtcagatcctctgcaatctcgccggtctgcagctctatctgtcccacatagggatccttcagtcccatatcgcggatcacgcttaaaacacctgcacctacggcaccgcccacatccagtttcccctgggcattggctggcaggatcacatcaggcacattggcatagccctttacgtgaccgttcatatctgctgtaactgtcagtccgccaatcggaccatctcctttgatctgcagtgtgatcagttcatcgtcaccctttaacatgcttcccatcatggcgcccgcgctgagtaatcttcccagtgccgccgttaccacagggctggtattgtgagacgctcttgcggtctccaccgtctctcttgtcgtgcaggcgaacgctcggatctgcgcatttgccgcggttgcacgtaccatataatccttcatttattccacgtacctttctgtctacagctctttctgctgctcttttgctacgatatatactctttcactggtctccgttaccgcctcaccggtatcggaatccatgatctccagaatcttcagtccggcctgttccaccagtgtcctcatctgttctacggtataacccctctgcaaatgggtctcggtaaatctgtggaaggtatcaccctcttcctggacgaagattgtcagatcatactcgttgatctcttcttccggatcataataattttcccagataaaactgcaatcctcccggttctccgcaatcgtcgtattgccgatgacttcccggtatttataatctgtattaaaatcaaagataaaaatgccaccggggtagagataattgttcaccagccggaatacctgcaaaagttcctcttcttccaaaatataattgacggaatcacagacgctgatcaccgtaccaacagtagaatacagatccagttcccgcatatcctgatgcagatagaggatctccgaaccgctctccacctttttctccatggcaatgcccagcatctcttcagaattgtccacgccgatgcaatcataccctttttggtataacagttctgtcaaagtgccggtgccgcagcccagatccaccaccagattccgctcggaatccagaattccttccgcgtcccgcgtaggtctggatacaccataggacgcaatcagctgatccagacgattgcaccacatttcatagggtgtattatccatcagttcgtcatatactcttgcaaagtctgtatagatttcttccgtattctccataattgcagcatctccagtttttttagaaaacagtccccaatgcgccgaatactcccatgctgagcaatcccatgatcacgcctgccagaaccacaccgcacattactgcaatgacactggacttgaaatccatgtctaacagacttgctgccagcgttccggtccacgcaccggttccgggaaggggaatacccacgaacaacaacagcgccacgaacagacctctgcccgctttttcctgcagcttttgtccgcctttatgtcctttttccaggcagaaggtaaagaacttgccgatgaccggcttgtccgcaccccattccagtacttttcttgcaaaaaagaagataataggtaccggcagcatatttcccagaatacagataatatagctgggaagcaaaggaagattcattccaaccgcaatagggacagcacctctcagctcgatcagaggaaccatagataccaggaaaatcatcaaatatttttttaacatgtgtttactccaattcttttaatttatttatgcccgcttttccagataatttttcaaaaaagcgatcaatcggtccatttcctcatccgtgccgactgtaatacgcagggagttggcaattctcggtttattccagtgtctgacatagatgtcagcctcacggagagcccggaacagttcttccgcgggaacttccttatgagaagcaaatataaagtttgctttcgaatccgggaaagtaaagcccaggctcgtcagttccttcttgatccgctctctggtagctgcgatctttgccgtggtggccttgaaataagcatcatcctttaccgcttccacgcccatgacctgggaaggcaggttcatggtataggagttaaaggagaattttacatcattcagatagtgtatcagcttctcattaccgatacagaagccgatacgcattcccgccatggctctggatttggaaaaagtctgtactaccagaagattctcatattttttaagcaagggcagtgcacttgtgcctccaaagtccacataagcctcatccacgatcactaccacgtccggattggcctgtaagatttcttcgatcattgcctgggactcttccacaccggtaggtgcattgggattcgggaagatcacaccgccgttgggctgtttgtaatcttcagggttcatgtgccagttctcatccagggcgcaggtatgatacggaatgcgatacagatccgcccacacatcatagaaggaataagtcacatctgggaacagaaccggctttccgctgttgaaaaatgtcagaaatgccatggataatacatcatccgatcccacacctacaaatacctgttccggtttcacaccataatatgctgccaactcgtccaccaggggctgcgcatttgaattcggatataagcgcagtgccgcactctccatattttctgctgccttccgcactcccggggcaggaggataaggacactcattcgtattcagcttgatcatgttcgggcggttcggctgctctcctgccacataaggaaccaccttacgtacgttttcttcccacttcatgttaataaccatgcctttctcaaaacctgcaagctttcagagactttcgtcccttgtgcaggcacaaatttgcgtgtgaaaaatttattttcagttatctgtttgttcattctgtcgatgttttaattcttccgcatagctccgggcctgtgcaggaagtcccagctgctcataacaacggatcaatccctgtaaaggttcttcttcc

SEQ ID NO: 5525 - DNA, 16367 bp, Unknown
  gut microbiota DNA sequence
ctaaaatcaactcgtaacctccctccggtctgttaaaataaatttctgtatcatccgaagtaagctctaattggaagctatgctctgctccaatcggactgtttattccaccaaatgtcgaaaaaaatgtaagataatgtggttttactccaccgccattgtctttaaatcctctgatatatcctatagatgttggaattcctacatcaagcgtgatctccgttccatcctctgatacagagtaatcaactaatacgacatccattcttttttgaaaacctgtgccaataaagaatagagctactaatacagctaaaattacaattactgcaattattctttttttcataatcaaacacctctattgatttggtgaaacttcaaacaaattcgtttttaaattaaccttaatgtagatttatacatgtttttcattcagacacacaattccgaaaagggagtatttatttcattaactttctatttatacaatcacaatcggcgtccgatattcattcaccatttccgtctggttctttaaggccagattccccagatagatctgattgcggaggatatccagatccagcatccgcagagattcgggagaaagcgtctgtctggcgtcagccaggctggtgacgagaggaatggaactgttctttttgatctcggcaagcagtggcgtcgcattcttgcggaaacccaacactctggcgtaagagatatagtcttccgacttgcaggtctcgaattcttccttggtcatattcagcaaaatatgaagcagacatctgctgatgcgggtgtaggtcatatccttactcttgagcagatcacagaaagaagtgtaacctgcgaaggaaggcagggtattgcggatccggtcggacagatccgaagaaatatcctgatacttgtcgtagcccacagagtattccgtcagcagcttgtattgcagtgctgcggaaaaatcatcggcaaacagaggctttttgtgagacagagaatccgtcatcaatgcataggcactttccggcatctgggcagccagataggatagatcatgcccggcggccaccgactggcggatagcaatggcggaacactgattggtgccgagacgtttgtcgtgataatccgcaccgactctggtggtagtgaacggtgagatcttgctgtttctggacatcagagctttgagatattcaattcccaatatattattaggagaggaaagaacgtccttatcatcgcttaaggaaggcgcgtattgcaataacgcccaggtcctggcgatggggaaggacattcccttacgcatattgcagcgcaaggattccacgtaaggttccggttccgtatagaaaatctcagcgatccgtgacaagacttcaatgttgccgcactcactgccaaagcacagatttgtggtcactcccagtttgtcgaacaaggcaaccgagcccttggcaaaaaattccgcactggaggcagcatagcgggtgggcagttccagcaccagatctgcaccgttctccagagccatttttgtacgggtgaacttatctaagagggcaggagcaccccgctgcatgaaattaccgctcatgacaatgatcgtataatcggcatcattggcctctttggcatgctgtaactggtaagcatggccattatggaagggattatactctgcgacaataccattgaccttcataatgtggctcctttcgtgaaaagaaatatacgttatagcgaacacaaaccctgacagggaatgtgaaaaaaataacatacactgaaagcgtttacatatgcatggttatcagcttattttattctgaaaaaatagtggttgtatctgaaaatatacaattttgcgaacattatgcccttgtgtactccagatgtatttagtataatataaatacatcggtttgttaagataaaaccaaaactttacagaagttatttgggaggaagcgggtatcccccgccggaaaggagaatggatatgtcatacattgacatgattaaagagagagcaagactcgacaaaaagactattgtattaccggaatctaatgataagagaacattactggctgctgcccgtatcgtggaagagggcatcgcagacatcattatgatcggtgatgaagagaagatcatggatggtgcaggctggctggaagttgacctgtccaaagttaaggtagttaaccctaaaacaactcccaagttggatgactatgtgaatttattatatgaaaccagaaaagcaaagggaatgacccccgagaaggcaagagagatcctgctgaatgattacctgaccttcggtatcgtaatggttaaggctaatgatgcagacggtatggtagcaggtgcatgccactctaccgcagatactttaagacctgcactgcagatcctgaagactgcacccggcgttaaactggtatccgcattcttcgttatggataccgtattcaaggatcagggtgagaacggaaccttcctgttcgctgactgtggtctgaaccaggatcctactcccgaagaactggctgctatcgcagatacttcttccagaagcttcaagtctctgatcggacctaagcccgtgatcgccatgctgagccactccaccaagggaagtgcaaagcacgcactggttgacaaagtagtagaagctacccgtatcgcacataaggagtatcctcatctgactctggacggcgaactgcagctggatgcagctctggttcccagcgttgccaagtctaaggctcccggaagccctgtaaacggacatgccaatgtcctgatcttcccgaacctggatgctggtaacatcggttacaagctggtacagagactgggtggagcagaagcttacggccctatgttacagggtatcgcaaagcctgttaacgatctgtccagaggatgttcctggcaggatatcgtcggtgtcgtagcactgaccgctgtacaggcacagttagtataatcactggtaacgaacataaacgtgtgcgggatatctgtcccgcaccgtattcatgtattgcccgcacgggtaacatgaccccatagagtaacagatttgaaagaaaggaattcatcatgaatattttagttattaactgcggaagctcttccctgaagttccagctcattgattccgagaccgagaaatgcatcgcaaagggtctttgtgagagaatcggtatcgaaggaagccagatcacctatacccccgatggtggtgagaaagagcagactgtaactcccatgccggatcataccgaagctatccgtctggtactggaagctctgaccaatgaaaagacaggtgtggtaaagagtctggatgagatcggtgccgtaggacatcgtattgtacacggcggcgagaagttcgcagcatccaccattatcaccgatgaagttatgaaagccatcgaggaatgcaacgacctggctcctttacataaccctgctaacctgatcggtatcaatgcatgcaagaagctgatgcccaccactcccatggtagctgtatttgacaccgctttccatcagaccatgcctgaggaagcttatatgtacggtctgccttacgagtattatgagaaatacaagatcagacgttacggcttccacggaaccagccactcttatgtatccaagaaggctgctgaggttctgggcaaaaagtacgaagatctgaagatcatcgtttgccacctgggcaatggtgccagcgtatccgctgttaagaacggcaagtgtgtagacacctccatgggtctgacacctctggaaggtctgatcatgggaacccgttccggtgatatcgatcctgccatcatggagttcatcgctcacaaagagggcaagaacatcgacgagatcatgaccgttctgaacaagaagtccggtgtatatggtctgtccaacaatctgtcttccgatttccgtgatctggaagcaggttacaacaacggcgatgcacactgcatccgtaccatgaacacttactgctaccgtgtggcaaaatatatcggctcttatgtagcagccatgaacggtgtagatgtgatctgctttaccgcaggtatcggcgagaacgcacctttagttcgttccctggtatgcgagcatttgggcttcttgggagtatccatcgatgaggaggcgaaccacaagcgtggcgaggagatcgctatttccactcctgacagcaagaccactgttatggtaattcctacgaatgaggaacttgctattgccagagagactgtaagtttggtaaaataggttcgacggaaccttaagaatgagaacacccatcaaccggaggatccgattggtgggtgttttacgtatgcaaatcgagcaggagaaatccccgtcgatgtatggtaacgaatcaacagagggagaaaaattatgaaaaaaaatgtgatcgtaggacagtccggaggccccacagcggtgatcaatgccagtctggcaggtgtctacaagacagcaaaggatatgggagcggataccatatacggtatgcgctatggcattcagggtttgttggagaaaaagatcgtggatctgggggaaaagatccgcaacgacatggatgtggaacttttgaagagaacaccggcttcctttctgggatcctgccgctataagctgccggagatcagtgaagataaagctatttacgagaaaatatttgcaattctggaagaactggagatcatggcatttttctatatcggcggcaatgactccatggataccatcaaaaagctttccgattatgcagagacagtgggcaacccgattcgttttatcggcgtacccaagaccattgataacgacttagagggtacggatcatacgcctggttacggaagtgcggcaaaatatattgctaccgttaccaaggaactggtacgtgacggcctgatctatgagatgcagagtgtgactgtcatcgagatcatgggaagaaatgccggatggctcaccggagcagcagtactggccaagagtgaagactgtgaaggcccggatctgatctacctgccggaagtagcctttgatgtggatgattttctgaaaaaggtcaagaaactggtcagcgagaaacagtccattgtcattgccgtgtccgaaggaatcaagacggcagacggaagatatgtctgcgaattgtctgcaccttccgacaagacggattctttcggccatgtacagttatccggtacgggcaaatatttgtctgacctgattattgaaaagctgggctgcaaatccagagctattgaactgtctactctgcagcgctgtgccggacatctgacctcccgcgtggatatcaccgaggcttatcaggtaggtggaactgcggtaaaggcagcttttgaaggcaagaccggtcagatggtgatcttaaagagagtatctcaggatccctatatttgcactacggatctctatgatgtgcataaggtggcaaatctggagaaaaaggttccccgttcctggatcacggaagagggagattatgtgaccgcagagatgaagaactatatcgagcctctgatccaggcggaactgactccgatcatgatcacaggccagcccagacacattattattgacgatctgtaaaagaaaatggaataaaacaacaaatcaaataacgatacaaaggaggtggaaagatgccgaaacacaggaagagaagaatcatgctcagcatagtgagtattgtgctttttgtagttttatctgcgcagctttccaccttttctttttctgtgactgcggccggggaacgcggagaactggtggcggaggagtacgaacgataccgggaacgctttgacaggatagaaaagattggagatttggagaaccagggattccgcctgctggaggatcagatctttgcgatgccgttgcaaaaacttccggaggaagccgtagatacgacagaggaacccgggaatgaagtctggttctatgcggcactggatacaaggtaccacagactggcggtatttatcgcggatgcttccgggcagattctgtacaagacggaccagctggaagcaaattactgctatccgggagaaatgcggcagccggtgaaaaaactggcttcggtttcttttcaggatgtagacaatgacagagatacggatatcatcctgatcgtccagtgccataatgacaggggggattatcaggaagaatcctacaaagtaggagatgttctgttccaggacgatggaaacttttaccgtgattatcggatctcagacaagatcaaccgctttgatatgaacaagaaccctgcctgtattttaaattttgtaagagacgggcgttctacggaattcctctatacggcggagacactggcagatcttctgaaccacaatttcaatgtcatcgaggaacagtcttatacccgtaattttgaaaagctgggaaaattaaaggtggttccgggcacctaccggatggcggaatatgacgtgttcatgatctatctgatcgatgaacagggaaatattgtgtggagttttcaacccatggaggattacgacaatctctatgcgctgaagggaatccagggaaaggacctggacggtgacggcctgaaggatctggtggtgtttgcaaaatacagctatgaaggagaaaacggggaattgttggtggacaccgtgtgcaccatttattaccaacggacggccggatttgagaaggatactgattttacagaaaattatgaatgtacggaggaggatactctggaggcactggtgacgaagatccgtgcctattgggggtggcagacataatgataaaaatattaatcgtggatgatgaaaagccaatctgtgacctgatcgacctgaatctgtcggcagcaggatatttttgcaaaagtgtacaggatggcatgaaagccattgaactgatcgagaaggaaacctttgatctgatcttactggatattatgcttccgggagtggacggttttgatattatggaatatatcagacctttaaagatcccggtgatcttcattaccgccaagggagatgtaaaggaccgggtaaaaggcttgcgtctgggggcggaggattatctggtgaagccctttgatgtggtggaactgctggcaagggtagaagtggtactgcgcagattccacaaacggggagcgcagctgtccgcaggagatgtagtggtggatatggaagccagaatggtgatgaaagcgggcgtacctgtggtacttaccaacaaggaatacggacttctggtgttatttattcagaataaaaatattgccttattcaaggaaagcctgtacgaaaaggtatggggagaagaatatgacggggacagcaggactctggagctgcatgtgcagcgcctgcgcaaaaaaatgggatgggagaatcagctggtagcggtatataaggtaggataccggctggagattgcctgagaacgaggaattcttgtaggaaagtggacaagaggagaaaagaatgaaattttcctggaaaattctgctgtgcaccatgctgatcatggcagcggcatgcggagcaagcggttatttttttgtaaattatgtgtttcagacctccatggagcgtgagaccagacaggcactggatgaaagtagtattttgaggttcgcttttgagacggcagctttaaatattccgtccaaatatgatgtacttccggacggaacggtggaacagatcggagtatacctggagaacagtggacagcacggcaacagattgctgcggatcagcgatgagaacggtaaggtgctgtatgtcagtgaagggtttaccggggatacttctctgtgggaagaacgcggagaaaatacgagagtgtaccgggtagtgcagtcgggggattcctattatatccagacacagacaaggatcaatgtgtccgaccgtctgctgacgttagagaccatgaaaaatgtaactgcggtatatacggagaggacggaaggatttcggatgtatcgtcaggttacggtgatcgtattgttatgcagtggcgctgtgatgacgctgatcgcctgctggctgacccgaccgatccggcttctgacgcaggctaccggcaaaatggcggagggagaatacagctatcgcgcggagcagatcagtaatgatgaaatgggacagctgactgcggatttcaaccatatggcagaagcactggagcagaatattcagaatttggaaaatgaagtcagagccagagaagattttattgccgcattttcccatgaactgaagacaccgctgacagctataatcggttacgcggatatgctgcgttcccgcaaactggacgaggagaagcattttctctgtgccaattatatttatacagagggaaaacgcctggagactatggcactcagactgctggatatcattgtgaccagacgtaaggagatcgatcgtaagaccacaaatgtctccggtattttctcgtatctgcaggaaatctatgatgagaccaagaacccagaagacagcagggtgaaggttgacatctgctgggaaaagggagaactctatgccgaggagaacctgttgaagactgttttgatcaatctgaccgataatgccatcaaagcctccgaggaggggcagaccgtggagatcacaggaaggcacatggagaacggttattattttcaggtacgggatgaaggaattggcatccccgaggaagaacttcataagatcacggaagctttttatatggtggataaatccagatccagggctcataacggagcgggactggggcttgcactgtgcaccgctattctggaactgcatcacagcagcctgaagatcgagagtacacagggctttggaagctgcatgagctttctgattccggatgagggggtgaagtcggatgaatagatggaagagctgttctttgggctttgcggtatcagttgtggtcattcttgcggctctgtggggaccggaatggatcgcggccaaaagtgatgagagactcttaaacagtattaccacagaggcggtggaaggtgcggaaggataccgttaccgcatgagcagcaatcagaaactatatcttttggggagatgtctgagcagtcagaccctgccggagagtgaactgcgttttttgaccagagtggacagtgaggcaggaaactacggagaaatgacgggtacctatgcgtttgtagagaatcgccagcaaccgggagagggacagattcaggaggaagcggtatatgaggcatgtaacagagagattcagatcctgaaggagcagggaattcttcccgacgaagtaaaggaagtttcggaagactcttacgaagcggtgatctgctctgctatcgatgttttggagccgagaaataatctctctgtatggaaaatcagcctgtctacggacgtaaggaatgcggataagagtaaccgttttctggatatttatctggatgcggataccggcaaaatttatgaattctatgtccggaccggactgcaatgggaagacatcaatacggatgccatgattggccggtatgcggaatatctggaactgaccggtcttgaaaaatatgaggatcaaaatccgctgttggagacgacgccgtattttgccaagtatactttcccgggggaggaggaagacagtaccacggtgaccattggttactatgaaggaattcgtgagcttttcctcaaagtaggaagatagaaaaataaaatacgcaaagatttttttgaaaaaagattaaaatcactacttgacgttaccacactaaagcagtaatataaataaaaattaaatacagcggtaagaaaccattgatgtggagataaaaacagttcgtgcacttacagagagaccggatgctgagaaaggttggaacgcaggttgttaaatggaccacggagggcgcagtcaaagaggacacacagaattttaagatctcaagtattctgcgacgtgagggcatacgtcagttgccggggatatgttggtatcctgtaagagcataagcaattgtgaagcaaggtggcaccgcgggaaatgtatatgacccgtccttgacagaagcagattctgtcatgggcggtttttttgtaccttttcagagcctatggcgagatagcctcaatgagtaaaaggaagcctcaaagaggcgattttacgaatggaggcgctgaaaaggtgtgagcagaaataattttaaggaggagtaccggaatgaagatcacccccacattggaagaatgtaaaatcatcgcagcggaaggcagctacggcgtaattcccatcagcacagagctgtatgcagatatgaccacacccatcgaagtgctacgcatcttaaaaaaagtcagcgggcatgtctatctgctggaaagcgcggaggcggataagcgatggggacgatattcctttttaggctatgatccattgcttgagatcacctgttataacggtatgactacaataaaatcggaactgaccagtcggacggattccggagatgtcagagggatcatccgcaacgtcatggaagagaataaaagtcccaagcttccgggactgccttcctttaccggaggtctggtaggatatttttcctatgactatatcaaatacagcgaaccgaccctgcagctggatgcgaaggacgaggaaggcttccaggatgtgaacctgatgctgttccacaaggtcattgcttttgacaactacagacagaagctgatcctgatcctgaatatcaagaccgatgatctggagatcaattatcatagagcggagcgggaactgaacaacatgaaggagctcttgctgaatggagaaaaggcagagcatattccctgtaagctccggacagattttcaaccactgttcaacgaagcagcctattgcaacatggtggagaaagccaagcattacatcagagagggagatatcttccaggtggtattatccaatcgcctggaggcggagatggaaggaagcctcttagatgcttaccgggtactccgcacaacaaatccttctccgtacatgttctatttctctggaagtgatggtgagatcgtgggagcgagcccggagacattggtaaagttagaggacggcgtattacataccttccctttagccggaacgagacccagaggagctaccgaggaagcggacaaggcgctggaggcagagcttttagcagatgagaaggaacgctccgaacacaatatgttagtggatctgggacgaaacgatatcggcaagatcagccggatcggcaccgtggaagtggaaaagtatatgtccatcgagcgttactctcacgtgatgcacatcggttctacagtgaggggcgtgatcagggaagatgcggacgcactggatgcggtggatgccatccttcccgcaggaaccctgtcgggagcaccgaagcttcgggcctgtgagatcatcaacgaactggaagacaataagagaggcatctatggaggagccattggctatatctcctttaccggaaacctggatacctgtatcgctataagacttgctttttccaagaacggaaaagtattcgtaagatccggtgccggtattgtggcggacagtgtaccggagaaggaatacagggaatgcattcagaaggcagcagctgtaagacaggcactacagaaagcacaggagggaatggaagcatgatattactgatcgacaattatgacagtttttcctataacgtatatcagctggtaggaagcgtaaatccggatattcgggtgatccgcaatgatgaatgcagtgtggaagagatccgggccatgaatccttcccacattatcttatcgccggggcccggcagaccggacaaagcgggtgtctgtgaaaatgtgatcagggaacttgggggcaggatacctattttgggaatctgtctcgggcatcaggcaatctgtgaggtggcgggagccactgtgacttatgcatcccatctgatgcacggtaaacagtccctggcgactttggatacagacagtgtattgttccggggtatgaaaaaagtgatcactgtggcaagatatcattctctggtggcagattcacagacgattcccgcagaattgaaagttaccgcggtcaccgaagacggagaggtcatggcggtagaacagacagaaaagcagatctacggagtacagttccatccggaatcggtactgacaccggatggacgacagatcattgttaattttttacagacacagaaaggagcaggcagaaacatgattaaagaagcggttgctaagttggtaaagaatgaggacatcggatacgatatggcaaaaaccattatggatgagatcatgagcggtgaggccagcgatattttaaagagtgcttatctgacagcattaagccagaagggtgagaccatcgaagagatcacaggctccgctgaagaaatgcgaaagttcggcagaaaacttggagcggacgtggaaactttagagattgtgggaaccggcggtgacggatctaattctttcaatatctccactacggcatctatcgtgatctctgcggcaggcgtaccggtagccaagcacggcaaccgcgcagccagctccaaatccggtgcagcagactgtctggaagctctgggcataaatattaccatagagccggaacagagcaggaagctgttggaagagatcggcatctgcttccttttcgcacagaaatatcacaccgccatgaaatatgtgggacccatccgcaaggagttgggcatccgtactattttcaatattttaggacctctggcaaaccctgcaggaccggtatatcagatcatgggtgcgtacgatgaaagcctgctgccatctatggcaaaggtattgtccaatctgggtgtaaaacgtggcatggtagtctatggacaggacagactggacgagatctccgccagtgcacccactacagtctgcgagattgataacggtacctttaaaaattatgtgatcacaccggaagaatttggcatggaaagatgcacgaaggaagatctggtgggcggaactccccaggagaacgcagagatcaccagagctatcttaaatggcgaaaagggtcccaagcgcaatgcagtactgctgaatgcagcagcagccctatatgtggcaggcaaggcagacagtatggcagacggtgtgaagctggcagagaaggtcatcgacacaggccttgcaaaggcacagctggagcgttttatccagcagagcaatgcatgataaagtgctatgagttattttgacctgcggcgcaaggatactagatttagattatgaaacggaaaggcaggatgaagggatgatactggatactatagcagcctctgcaaaggagcgggtggctgcagcaaaagaagcactgccccttgcagaacagatcgccagagcaagagatttggacagcaacacgggatttccctttgaacaggcactggcgaagccgggaatgagctttatctgtgaggtgaaaaaagcatcgccctccaagggactgatcgcagcggaatttccctatgtgcagattgcgagggaatacgaagcagcaggagcggatgcaatttccgtactgacggaaccggcgtactttcaagggaagaatgaatatctgaccgagatccgtcaggcagtgaagattccactgcttcggaaagattttacggtagatgaatacatgatctatgaggcaaaaaatatcggagcaaatgcagtgcttttaatctgtgccatcctgtcatcgatgcagttgtcagagtatgcgggaatcgcaggagaacttggactgtcggcactggtggaagcccatgatgagaaggaagtagagatggcattgaaagccggtgccaggatcgtcggtgtcaataaccggaatctgaaagactttacggtggatatcaataactccgtgcggttgagggaaatggtgccggagaatattctcttcgtatccgaaagtggtatgaagacgagacaggatatcgagcggctggagcagaacggtaccaatgccgtactcatcggagagacattgatgcgtagtgcagataagaaagcggctttgcaggagctccgcggatagtgtgaaaaataaatttttcacacgcaactttgtgcctacggcccaaagtttgcagtctatagaaaggtcgtaaatttttatgaaagtaaaaatgtgtggtctctatcgtccggaggatattgcttatgccaatgaggtgcagccggactatgtgggatttgtattttacgaaaagagccaccgtgcggtcacaaaggagcaggtagccgaatatcgcaaaaaactcctgccggggatccggacggtgggggtatttgtaaatgaggatccaaagaacattatagaactgctggaggaaggtattctggatgtggtacagctccatggggatgagacagaagaggatatccagtatcttcaggcggtctgccacaaaccggtgatcaaggcggtcaaagtaagagaccggtacgatgtggaagcctggctggacagcagtgcggactatctgttatttgacaacggaatgggaacgggtcaggcttttgactggagtgtccttggcggaatcgacagagaatttttcctggcgggcggattgcagtcggagaatctgacggaagccatggaagtggtgagaccctatgcgttggatatcagctccggcatcgagagtaaccggaaaaaagatccggagaaaatgcgccggatcatggaactggtagaacggtatcggaacactagagattgaaaatgcagaagaattgtaaatcagaaattaaaatgagaaatgaaaatcagaaattagaaatcaaaatgaaaatcaggaataaaaatcaggaataaaaatcaggaataaaaatcaggaataaaaatccggaagaaagaaaagaggatgaacacatgagcaaaggacgttacggaatccacggaggacaatatatctccgagacattgatgaatgaactgatccatctggaggagtgctatgagcattataaaaaggatccggaattcaatgcggaactaaataagttgttgaatgaatatgccggtcgcccctctttgctgtattatgcggagaagatgaccaaggatctgggcggcgcgaagatctatttaaagagagaggacttaaatcacaccggttcccacaagatcaacaatgccctgggacaggcgttgcttgccaagaagatgggtaagacccgtctgatcgcagagaccggtgctggacagcatggtgtggctaccgcaacggcagcagccttcctggggatggaatgcgaaatcttcatgggaaaagaagataccaacagacaggcattgaatgtctaccgtatggaacttctgggagccaaggtacatcccgtaacttccggcaccatgaccttaaaggatgctgtcaatgagactatgagagaatggtccaatcgtgtggcggatacccattatgtgctgggatccgttatgggacctcatcccttccccatgatcgtcagagattttcagagtgtgatcagccaggaagcaaaggaacagattctgaagaaggaaggaaagcttccggcagccgtggtagcctgcgtaggcggcggcagcaatgccatgggtgcgttctataactttattgaggacaaggacgtggatctgatcggctgtgaggcagcaggcaagggcgtggatacggcactgaccgcagctacgattgcgacgggttccttaggaatctttcacggcatgaaatcctatttctgccaggacgagtacggacagatcgctcccgtatattccatttctgcaggactggattatcccggcatcggaccggagcatgcttatctgcatgacatcggcagagcgcagtatgtgcccatcacggatgatgaagcagtggatgcttttgaatatctggcaagaaccgaggggatcatctgcgccattgagagtgcccatgcggtagcacaggtgcgtaagatcgccaagaattacagcccggatcagagcattatcgtatgtctgtccggcagaggtgacaaggatgtggcggccatcgcaagataccgtggcgtggatattcatgactgatcgttttgacggtaaagccatcataggagtaacagacagaagatgaaatgctgttt

SEQ ID NO: 5526 - DNA, 5112 bp, Unknown
  gut microbiota DNA sequence
gaacagagaacagcctcgtaagaatttcgatgaggatgcattacaggaactggcggattctatcaaacagtttggtctgttgcagccgattctggtacaggatcgtaaggattattatgagattattgccggtgagagaagatggcgtgcagccaagttggcaggtctgaaggaagttcctgttatcattcgtaattatacggaacaggaaattgtagagatttccctgattgagaatattcagcgtgaagatctgaatcctattgaagaagcacaggcatacaagagacttttaacagagtttcacctgaaacaggatgaagtggcagagagagtatccaagagccgtgctgcagtaaccaactccattcgtctgttgaaactgaatgaagatgtacagcgtatggtggtagatgaaatgatcagcaccggacatgcaagagctttgctggctgtagagaatccggaagagcagtacaatctggcccagcgtatttttgatgaaaagctgagtgtccgtgatgtggaaaaattggtaaagaatctacataaaccggcaaagcccaagaagacagatgacaagaccatgcaggtaatctatcaggatattgaagaaaaattgaagcagaaacttggcagaaaagttactgtgacatccaggggagaaggatccggtaagattgaaattgaattttacaatcatgaagatctggacagactgttggatgtactgaataaataagagaaaagaagatgcacgaaagaaaggcacggttaataatatgagtagtacttttttgaatcagatcggtctgggggaatttgacatgggctaccttctgatcggaatgggtgcagtgattttactgttgatcatctttttgatcctgttgatcgttcagatcagaaaaacaagcaaattaaaaaagagactggacaaattcctcagtggtaaagatggagcaagtctggaaaaggatatcgccggtctgtatgaagacaataaattcctaaaagcaaatacagagaaaaataagaaagatatccgcactttatataagaatatggaatccgcttatcagaaaatgggattggtgaagtacgatgcattcaaccagatgggtgggcagctgagtttttcactggctctgctggatgagaataataatggttttattatcaattctgtacacagttccgaaggctgttattcttatacaaaagaaatcaagcttggccagtgtgctattgatctgggggcagaagaagcagaagcacttgccatggcaatgggagaataagtaaagaggtttatatatgaagagaatgaaactgagcgagctgaccggaaacgaaattcttgcacagtcattgatgacttgggattatcagatcattctaccggaaggcgcagtattaaaaaaagagtatatcgataaaatcgaggaaatgggtattctggaggtctacgtaaaagaagacgaggccaacgaaatcgtaatacttaaaaacgatatagaaaaaacgataagaagtaaagtaaaaagtattctggagagacatacttaccagaataacaaagaattgcaggggctgacccaggcagcggatgagatcattaccaatattctggatgaaaaagaagttgtagaaaaagtatttgatattaaggaacgaagtgctgatatttacgaacattccatcagtctgagttctctagctatcctgacggcacttcggatgaatgtggataagcaggtaattcatgatatcggtgtaggatgcctgctgcatgatatcggacttcgatatacgactttggattatgaagggaaatccatggaagatatgaatccggaagcattggcagagtataagaaacatccggtatatggatatacttctgtaaaagatgaggaatggatttcagatgaagtaaaaaaaatcatcctgtatcaccatgagagactggacggatccggatttccgcttcgactcaaagaagcggagattccactttcctgtcagattgtagccgtatgtgatgcctttgatgaaatgatctgtggtattgcccagagacgtagcagagtctatgaagcagtagaatatttaaaaagctttaaaaatgtgaaatataatggtaaaatagtagacgcgtttttaagttttacagcagtctatcccgccggaagtcatgtactgactaacgacggagaagaagcaatcgtagtatcgcagaacaaagatttccaggatcgtcctgtgatccggattatccgggataaaaacggacagaaattaaaagaagagaagatactggatcttgtgaaagttctgaatgtgtatattgaaaaaggattagaataatgctgttcagatcagaatggcagaatggaggaagtcatgatagacattaaatttttaagagaaaatcccgaggtggtcaaggagaacatccgtaaaaaattccaggatgaaaagctctccctggtagatgaggtgatcgcactggatgccgagagcagaaaggcaaagcaggaagcagatgatctgcgtgcttccagaaaccgtatttccaaagaaatcggtgcactgatgggtcagggcaaaaaggaagaggcagaagccaagaaagcagaagtagctgccggtgcaaagcgtctggctgaactggaagcttccgagaccgaactgcaggagaagatcaccaagatcatgatggtcatccccaatatcattgatgaatctgtgcctatcggtaaggacgacagccagaacgtagagatcgagaaattcggcgagcccgtagttcctgattttgaggttccttatcatgcagatatcctggatcgtctgaacggtctggacaaggagagcgcaggacgtaccagcggtaatggtttctattatctgatgggtgatgcagcaagaatccattctgcaatgatcagctatgcaagagacttcatgatcgataagggatttacctattgcattcctcctttcatgatccgcagcagcgtagtaaacggcgttatgagcttcgcagaaatggaagctatgatgtataagattgaaggagaggatctgtacctgatcggtacttccgagcattccatgatcggtaagttcaagggtcagattgtagaagagaagagcctgcccattaccatgacttcttattctccttgcttccgtaaggaagtaggttctcacggaatcgaggagagaggtgtgtaccgcgtacaccagttcgaaaagcaggaaatggtagtactgtgtaagcccgaggattccatggactggtacaacaagatgtggtcttacaccgtagaattcttccgcagcctggatgtacccgttcgtactctggagtgttgtagtggtgatctggcagatctgaaggtaaaatcctgcgacgtagaagcatggagccccagacagaagaagtactttgaggttggttcctgttctaccctgggtgatgcacaggcaagacgtctgggtatccgtaccaagggtgaaaacggaacttatctggtacacacactgaacaataccgtactggcttctcccagaggactgatcgcattcctggagaacaacgtaaatgaggatggcagcgtgaacattcctgttgctctgcgtccttacatgggtggcaaggagaaagtcctgcctaagaaatgatagaataactctcaaccatgcaaagtatatatgactgcttgcaggaaagatatactttgtatgaagggagtgaatgaaaccgcagacagaaagagggtgatgttttgcataaatatatgagagctatcgggttcagtgaatatacggaccgtaagaaattaaaagaattactgacagacgtgatcatgaattccgatcatcgcgcatataccatgaatcaggagggtatccttctgggtgaattcagcaaaaatcacaccgcaaccagaggagccatagaatccggtacctttggtgtggctgtctgtggagaatttgatgataacgataagtttatctatgaatattattatccgtatctgacgggaagcggcattacttcttatgaagatgtctctgtggaacgtcatgcggagaaggattcctatgctggtatctgcgatgatatcaaggtgggaatctctttaattttctatctgcggaaccggattccctacatcaaggctcagagtaccggaaaattacccatccgcggtaccacactgaccttatccggcctgtccctgaccggaagtatcctgttacccatcaaaaaagatgaagaacaggtcctccgggtaaaaaaagactccgccaatcgtaacaaacttctggcagctgccagacagggagacgaagatgctattgagaccctgacgctggaagatatggatatgtacaccaccatttcccgcaggatccagaaggatgatattttcagtctggtggatacttattttatgccctacggcgtggagtgcgaccagtactctgtactaggtgagattacggaacttcgtctggcaaccaacgatgtcacgggagaaaaggtatatattcttacgattctgtgcaatgaattatcttttgatgtatgtatcaatgaaaaagatatctacggagaacctcaggtgggacgccgtttcaagggtgtcatctggttacaggggtatattaattttcccgaggaataaggttgcaaaataacgatattttcggtatactaacaattgtgcatatgttcctatagttaaatggatataataagcgcctcctaaggggcaactaagtgcagaccatttagtgagaagcaacaggattttagagtttgcaaaaaggctaaaatcaatatataataacaggagcaattcatcacgcaagtgattggattcataaacatggcagccggagtccaaaaggctgaaaagcccgaaaatacggcatttgttcccttagttaaatggatataacggggtcctcctaagactctattgtaggttcgattcctatagggaacgctctattttaagcggtaatgagagaaaatcattgccgtttttttgttgtttttctgctaacagcaaatcaaaaaatgagcat

SEQ ID NO: 5527 - DNA, 158 bp, Unknown
  gut microbiota DNA sequence
tgagagtttgatcctggctcaggatgaacgctggcggcgtgcctaacacatgcaagtcgaacggacttttcatgaagcctagcgattgaaaagttagtggcggacgggtgagtaacgcgtgggtaacctgccttgtactgggggacaacagttggaaa

SEQ ID NO: 5528 - DNA, 539 bp, Unknown
  gut microbiota DNA sequence
aagttagtggcggacgggtgagtaacgcgtgggtaacctgccttgtactgggggacaacagttggaaacgactgctaataccgcataagcgcacagcttcgcatgaagcagtgtgaaaaactccggtggtacaagatggacccgcgtctgattagctggttggtgaggtaacggcccaccaaggcgacgatcagtagccggcctgagagggtgaacggccacattgggactgagacacggcccaaactcctacgggaggcagcagtggggaatattgcacaatgggggaaaccctgatgcagcaacgccgcgtgagtgaagaagtatttcggtatgtaaagctctatcagcaggaaagaaaatgacggtacctgactaagaagccccggctaactacgtgccagcagccgcggtaatacgtagggggcaagcgttatccggatttactgggtgtaaagggagcgtagacggttttgcaagtctgaagtgaaagcccggggcttaaccccgggactgctttggaaactgtaggactagag

SEQ ID NO: 5529 - DNA, 28689 bp, Unknown
  gut microbiota DNA sequence
atggtcgatcaacacactggatgaaaatttcaagaacgatatggactctgcttcaagcattgagcgtcgtatcgctgctatgaagcaggtatatgaagcagggatccgtacagtctgtttcgtatccccggtatttcccggtatcacggactttgaagcgatctttgagcgggtaaaggatcagtgcgatctgttctggctcgaaaatctcaatcttcgaggcggtttcaaaaagacaattatggattatatcgccggacaatatcctgatcttgtaccactttacgacgagatctataacaagcataaccgcagctactttgaagcacttgaagtaaaagctgagaaaatggctaagaagtatgattgtgcctttgtggataatgaaatgccttatggcagagtcccgcaggggcatccggtgattgtagattatttctatcatgaggaaatccgtgggacagagaataccggaaaaagaaatcgctaatttccagtttggagaattgagaaaatcggaatttgacgaggtaagtaattatggatgtatgcagttttattaaggctgtgttggctcaagatgagaacacaatcagaagtttttttcacaaagatgcgtatgtgaattggcattgttccaacgaacactttacggtcgatgagttcattattgcaaactgtgaatatccaggtgattgggatggaacagttgaacgagttgaagtgataggcgatttattcatcacggtaacaaaagtttatccccaagatagaagtgtatatttccatgtggtgtcattcataagaacagcaaatgataaaattacgtcaatggatgaatactgggctgatgatggaaatcctccacaatggagaatagataagcacataggcacaccaattatataaattcaagtttgtcaattacaggtgacattgaaagagacagcccattcaaggtgctggctctttcaaaaattccattctaataaattgcacgacaacttatcaaaaaataagctccccatccggtctttactatcctatctttcttactgtctgtccgcaagttttatggttttcatcagtgtattctccagcacacctgccggacagtcatcgctatccggcttaactttttacagcaatgtattcagatccaccagggttccgccctcgatctccacgcacttgtcactgtttaactgcagccatacgctgcaggcattggggttatataccttttcgtaatccgcagagaactgtaaacgtttcgctgcatccatataatcaatgatctcgatgttggtggcgtaccagatgtcgtctctgccgcccatgtatttacagaagttctcgatcacatcccagttgtcattattatcgaactcgtagctgtgcccccagacatacatcagcttcaggtactggctcttcttgaaatcggcgaaaaattccgcgtactccatcagcttcggatcattatgatggcaggtagcatgccactccaacggatcctttggcagtgcaaaatccggaaccgtctctaccactctggcataagccacgcccaactgacggtacagctgtttgatctcttcactgtaagaaccgttgggatatgcatgtcctctgatgatccggccggtccatttctccagacctttccggtcttccaacagttcctctgcgacttccaccagtgggcatctctcaatggtgggatgggtcatggtatgagttgcgatctcatgaccgtcgtataatccttccatttcctcgaaggtcatacggggccgctctccgacctgtccgtaattcaggttgaaggttgccttgatcccgtatttattaaaaataccgatcagccgcttatcctgtaacttaccatcatcataactcatggtcagagctttggcttttccgccgggaaaacaagtatatactttcatcttttccatccttttctactgtaatttctgttgtggttttaaaatatgataattttcatcccacatgttttcatcatattacgactggaacaattttgcaactgataagaatccggcattaaccctctttatcgtgcagaattttccattgccttcctttcattcatcctttaatatagtaaaatatacaaccaataaacgaattacaatgagaagggagcatatttatgaaaaaattcaactccttccgtaatcgccagaacggctttgaagatttaggttccggcaccgcggaagcagcaaaaacgaaaaaaagctggtggaaagtccccggcatcattcttgtgattctggtaatcgctatttttacttttaattccacttaccagatccgtgaacaggagcaggcggttctgatcactttaggccaggccaaagcggtaacggatcccggacttcattttaagataccgttcatccagcaggtccgcaaggtgaataccaccattcagggattttccctgggatatgatgtagattccaattcttcggaaaccgacgattctctcatgatcacctccgactataattttgtcaacgtcgatttcttcgtagagtatcgtttcagtgacccggtaaaagctgtctatgcatccaaggatcccgtactgatcctgcgtaacatcagccagagctgtatccgtaccgtgatcggcagttatccggtggacgatgtcctgactaccggaaaaaatgagattcaggccgctattaaagaaatgattctggagcgtctgagcgaacaggatatcggtatccaactggtaaatatcacaatccaggattccgagccgcctacctccgaagtcatggaagctttcaaggccgtggaaaccgccaagcagggaaaagaaactgccctgaacaatgccaataagtaccgcaatgaacagcttcctctggcgcaggcacaggccgacggtatcatcaaagacgctgaggcgcaaaaggccgagcgcatcaatgaggctactgcacaggttgcgcgttttaacgctatgtacgaggaatatatcaagaacccgaccgtcaccaaacagcgtatgttctacgagaccatggaagaagtactgcctgaccttaaggttgtcatcgaaagccccaacggcaatacacagactttctatcctttggaatccttcacaggtaccgcttccgcttcttcggagagcagcacctctgaagctgcacaataaccattgtctacagaaaggcagttttataaatatgaaaaaagtgaaaaatatatctctgattctattagtactggcattgttgatcatcggatcctccagcattgtcgttaccaacgaaaacgaatacagtctgatccgacagttcggtaaagtagaccatgtagtgagttctgcaggtgttacctttaagattccttttgtacagagcgtcgataagcttccgaaggagatcctgctctatgatctgtcttcctccgatgtcatcaccagtgacaagaagaccatgatctgtgacagttacattttatggcagatcaatgatcctctgaaatttgcccagaccctgaactcctccatctccaacgcagagagccgtctggacaccatcgtatataactctacgaaaaatatcataagcagtacgacccagaacgacgtcatctccgggcgtgacggagagctggctgcagccattatgaaaaacattgggaacaccactgagcaatacggtattgaattgctctccttcgaaaccaaacagctggatctgcccagtgacaacaaagccgctgtgtacgagcgtatgatctccgaacgtgaaaacatctccgcaacctataccgcagagggaagctctgaggcacagaaaatccgcaataccacagataaggaagtcaatgttctcctgtcggaggccaataaaaatgcggagattctcattgccgagggcgaagcggaatacatgagaattctgtcagaagcttattccgatgaatccaaacaggatttctattccttcgtcagaagcctggatgcactgaaggcttccatgaccggcgataataagacggtgatcctgtctccggattccccgatcgcacagattttctacggaagataacgtaaaagccggtgtctgcaatattcttgcaggcaccggcttttttatgccagaatctcctcaattctgcgtctctcttcttcactgaatgcggttgcatgtacaataccaatattatccaggatctgtgagggcttagatgctccgatcagaacactggtaatatccccatcccttaagatccacgaaagtgccatctgtgccagggtctgtcctctctgggctgccagatcgttcagtgcacgtaccttcttcaatgtctcttccacgatcgccgcttctttcaggaatctgccgtcggtacggacacggctgtcctcaggaataccgtggagataacggtcggtcagaagtccctgtgccagcgggctgaacgtaatgatgccgatgccatgggccgccgcataatccttcaatccgtccttctcaatatctcttacaaacatggaatattttctctggttgataataaacggtgtccccagctccttgaacagttctgctgccgcaatggtctgctccttattgtagttggaaattcccacatacaatgccttaccggatctgacaatgccatccagtgcacgaacggtctcctccaacggtgtatttggatccggtctgtgatggtagaagatatccacataatccagtcccatgcgcttcaggctctgatccaggctggccacgagatactttttgctgccccagttgccgtaaggtccgggccacatatcataaccggctttcgtggaaatgatcagttcatctcgataccttcccagtccttttgcaaggatccgtccaaaattttcctccgcactgcccggtacaggtccataattgtttgccagatcaaaatgtgtaatgccatggtcaaatgctgtgtggcacatgtcctgcatattatcaaaattcccattggagccgaaattgtgccataatcccagagagactgccggaagctgcaatccactggcaccacagcggttgtatttcatttcttcatatcttttctcatctgcctgatacatttaaatacctcctttttccgaaagaacattatagacattattgtaactattcagaccccattcgcaaaaccgcctctgcgaggcttcctttttgctcatgaggttacttcgccatataaaactgcttatctgcctgaatgcaagcattcgcagaacacagttttgcatggctctgaatagttacacattattataaatttattttcatcccgtttctatgcaaattttatagaataaagtgcaatatcttacaaatcatctcttacgttccacgatcttcagccggctgaaaaacaggtaatacacaataaaagcaatactggtcaccgtccaggtcagcggatagctgaatacaatggtgagaatgtcatttttcagaggtacggctgtcaggatccataccacgcgcagtgcgcagatccccaggcagcatatgatcatgggaagccagctgtcgccgataccgcgcagagtaccggacaaaatctcaatggcaatataggtaaaatatgtaggtaccaaaaaatgcagaatctgttctccgatcactaccacctgtgcatccgtggtaaacagttgataacagatcgatgcataattatagaggatcacggacaacagtacggttgccccggctgtaatccccatacaggtacggactcccttgtgtacacgatccattttccccgcaccataattctgccccacaaaggtagtgatcgatatgccaaaggcattgacgatcatccaaaacaggctgtcaatcttgctgtaggctgtccatgccgctaccgtatccgttcccagttcgttaacgctggactggatcagaatattggacgatgtatacatcaccgactgcaatcccgccggaagtccgatccggatgatcctgcggaacattcttccatcaaaacggatctttctcagttccagacgatgcatatccttcgtccgcatcagcacccacaataccagtaccgcactgagtgcctgcgacagaatggtcgccagtgcggctccagccacacccatatgcagtccgatgacaaatgcaatatccagcacaatattcgtcaggcagctggcgatcaggaaatataacggtctcttggaatcccccacagcccgcaggatgccggctcccatattgtagatcaggtttccgatgactcccaggaaatagattcggatataggttgtcgccggtcccaaaatatcctcaggtgtagacatcgcacgcagtgcccatggtgccgccgtaatacccacgatcatcatgccgactcccgccaccagactgaacgcaatggaggtatgtacggcatagcctaccatctcggcacgttttgccccataatactgggaaataatgaccgtggcaccgctggacaatcctacgaaaaatcccaccaacagctggatcagcgtaccggtgccgccacctaccgccgacagagcttcttttccgacaaaacgccctacgatcactgcatctgccgcattatataattgctggaaaaaggttccgaacaaaatagggaaaaagaacaggagcagctgctgccagatgactcccgttacgatcttgttttctttccctatagcattttctgtctgcttttgtgttttctttgtattttcttccatataaatcatgccctttgaaaatctgtacttctacgatgatagtatcatttccacagaaccttttcaagagggcaatcttatccacagctcagggcaggaaaatccccgggtggtggaagcacccggggatccttgtctgcacctggatgagtcgcagcatccgggcacagccctgtatataccaaattgagggattagataaaagctaagttaagggcaagccactcccgtgcaggcacgtcgtgtcttagggattataaccctggcattattactccacgtcttgcagagctgcgaagtcttcttcgccggtacgaacctttactactttgtcaacgttgtatacgaagatcttgccatcgccgatatgtccggtgtacagagccttcttggcagcatcgatgactgcgcttacgggaatcttgctgacaataacttctaccttcaccttaggcagcagggtcgcatccatttcaacaccacgatacatctcgccggcacccttctgtacgccacagcccatgacctgtgtcatggtcataccggttacacccagatcgttcagagccttcttcagtacctcgaaccgggcaagctttgcaataaccactactttgtagattccggttgcaggaattgctgccggagctgtctctacctttactgccgcttccttcatggctgcggaagctgtgtcataatcacttacgccaaggctggtattttcatttacctccatggtcatagtgttggaaatatccataatgctgaagcctgcatatgcggaaggaagaccatgctcacaggagtccagaccaacaatctcttcttcctcagatacacgtaagcctacggtagccttgatgatcaggaaagcaatggtaatcgttactgcagtccatgccgccacacttacaaaacctaacagttgcaaaccaagctgcctgaagccaccgccatagaacaggcctaccacactgtcattgccgggtgcggaagtggttgcaaataaaccagttgcgatagtaccccagataccattcatgcaatgtactgcaacagcacctacagggtcgtcaatatgaagcttataatccagaagccatacaccaaatactaccagaagtcctgctactgcaccgatcacgatagcaccgaagcaatccgtcacatcacaaggagcggtaatcgctaccagacctgccagagatgcattcagacacatggatacatcaggtttgccatatttgatccaggtaaataccatacatactacagttgcgattgcgggagctacggtagtggtaaggaacacggagcctaactgctctacggaagtacaagcagcaccattgaatccataccagccaagccacaggataaatacaccaaggcatccaatcggaaggttatgtccggggaatgcatttacttttacaatcttaccactcttgtccttttcaaacttaccaatacggggacctaaaagctttgctccgatcaaagcagagataccgcctaccatgtgaattgcgcaggaacctgcgaaatcatggaagccaagctgtgaaagccagccgccgccccagatccagtgagcttcaatgggatatatcaaagcggagatcacaccggaataaatacaataggataagaacttggttctctctgccatagcgccggatacgatggtagctgtggtagcacagaacaccagattaaatacaaaatttgaataatcaaaattctcataggcagtaaagatgtccagtcccggcttgccgatcagacctactacatcttcaccaagtaacaatccaaagccaatcaaaataaatactacagtaccgatacagaaatccatcagattcttcatcagaatattaccggcatttttggctctggtaaatccggtctccaccattgcgaatcctgcctgcatccagaacaccagggccgcaccgatcagaaaccagactgcaaataactgaccatctactgcgcttaagatttcttctgtcataacattttcctcctcactcttcgtgaaatatcttccacaatatttcaccggtgtaaaaaaatatgcgatactatggtctcatccttcgaagccccattgcatcgcatccttagggtatagcagtcaaactgttttccaccatacccttacgctatttttgtccggccacgcgcgttgtgatacttccggacaatacctgggatatacatcccggtatgattagcggtcgtcaagtgaccattcgtgccagcacgatgttcactttcctcgtcgccataacaaaaagggcgctacagttttattctgtagcgcctttgctatgttgagagtatagcaccgtggttttagagtgtcaacatgttttttatattttctttatatttttacagttccataagaagtcgctcatagcaagttccttcccaggtgacctgatccagttgggaaaatcccagtctttctgcaagatgcagggatatttcgttctccggcatcaccagcatctgcacctgttcaaatcccaattcctctttcccgtattccagcaatgccttacacacctccgtagcatatccctgccgctgccacgggacaccgatgacgaagcccagctccggatcctcgcaaccctcgcggttggagaatccggctctgccgatcacctgtccggtcatccggtcacagatcgtccagacgccgtaattataaaaataatacatattttccgtataatccttcagataggcctcttctttcgcccgctccggatagagtccttctgtgtacttcgtcacagaaggatccgcataaatctcataaagggcatccagatcctccgcaccggtctcccggatgagacacctctccgtggtcagaatctcccagggaatgcccacgtatctgcgatagaccttctccagataatcaaaatccagttcactgatattttcgcaggcataacggacaccgctaaaatcctgatccctgttgtcctcatggagccagacaagcaccgggcagccctgttccaagagttcctgtgcacgttttccgttatctacgatccagagttttccctgcccgctttcatacccggacatcatgctatcccggacgcttttctcttcgaagcactcttttcccgacccgtttctttgttgggaaaattctctttcctgtctctgtctgcgaatcgcatccagcagggcgtgcatctgcgcaccatattttttactgtagctttttcgttcctcgtccgatgcaccttccggatatatttctattgacacctgcttcaaaaaatccatctgcagcaattctcctctttacgtttccccgggaatccattacaataatatttatattttatgatgccagggtcaaaaggtctaagcccacatgagcttgctcataggtgggtgaaagaccttaggaccctctccgatatgagcataaaagtaggatgataatcccacgatatgcgaatattgggtataattgtgagagtgcgtagcacgaagcaattcgtaggcatcaaagtcgggggcttttgaccctgatatcattttattctatttctgtcaagaaagaaaggaaattattatggcaaagaatcctattgttactattactatgaaggatggcggtgtgatcaaatgcgagctttatcctgaaattgcccccgaatccgtcaacaattttatcagtctgatcaacaagcatttttacgatggtctgatcttccaccgtgtcatccgcggtttcatgatccagggcggatgtcccgatggcaccggcatgggtggtcccggctacagcatcaagggtgaattcgctgctaacggcgtgaccaatgatctgaaacataccgaaggcgttctgtctatggcaagagctatgcatcccgattccgcaggcagccagttcttcatcatgcacaaaaccagtcctcacctggatggctcttatgccgctttcggtaaggtcattgagggcatggatgtggtaaataagattgcagatacccctactgattacagtgatcgtcctctggaggatcaggtaatggaaagcgttaccgtagatactttcggcgaggcctatcccgagcccaacaagctggacagataagatttcaaaaaataacctccgaaaatcagatgcactctgaccttcggaggccttttttatttacacacaggcagatcaatattccacattttcgcaattctcgatgaatacaggatcttcaacttcgcctttcatatcctctgcgatctcataagagaaatcccggaacagaacattttccgcattgcgggcatacagcactctgagagaatcctccaggatcacatttccctcgttgggacgcagatcatggcaattcttcggccagtccgtcttcttctccagttggacatgaataccgtcaaatgtgatatcccggatatttttcgaatcgtcaccatagatcaggatgccattctctccgacacagttgatattctggaaacggacattccggatatatcccacattcgtctccgtatttctcttcaccgcagtgatggtaatgggttctgcctcgccccaccaatgtaccttggagaacaggcgggtatcgatattcagattggagaatgtcacattttctatacagcctttatcacgtaactgcagggaaattgcacggttggtgcgctggatactacagttggtcacggaaatgttccggaaaggtgcttcactctccgtgccgaacttgatagcagcactggtggagatcatggtacagttatccactacaatattttcgcagggaccatattccatggcagccgccgtattcttaaatacaatacagtcatctgcgcattcaatatgacagttggagattctcacattgctgcagtgatccggatcaatgccatcgcagttagccagacgcagattattgataatacggattccctcaatcaatacttccttacatcccaccagatgagtggtccagaatgcactgccggtcagggttacctgctggatggtcagatgccttacattttccaggaacagcaacggtactctgggataaaaatatccgtcaatatgccatttggtcacctttccatagaatatctcctcgttgccgtcaatcttgccaaatccggtgatagccacattctcggcatccttgctgtatacaaaattcagcgtcggttttccattgtaatcacaggcattgtaggtcggagtgtctaccttgctgatctgtggggttcccactttcaacatatcgaaatcttccagatggtcgctggctttcaggacagcccccatctccagatgaaattccacatttgatttcagaaaaatggttccgctccggaagacatgtcctccctgtaacaggaccttaccgccgccagcctggctgcaggcatcaatcgccttctggatggctgcagcgtcattcgtcacgccatcaccttttgcaccgtattccaatacatcgtatatcatctctctgctcctctcttagcccttcaggccggaagtggaaattccttctaccagatatctctgcaggcagaagaagatcaatactgcaggcagaatagacaaggtcgccatagcgaacatagcaccgtagtcggaagaagaactggggtcacagaacattttcagtgccagactgacaggatatttctctgtcttgttgacatacaataatgctccaaggaaatcatcccatctccacataaaggagaagatacatccggtgatcatggtaggaaccatcagcgggaagatgatcttggtgaaaatggtataataggagcagccgtcaatctttgctgcctcatccagctctctgggaatgccttcaataaagtttgtcatcatataaacgaagaaaccctgaatagcaaagcaataaggcacgatcagcggcagattggttccaacccagttcagcttctgataccagagatactgagggatcatcagtacctgtgccggcagcatcatagatgccagcattgctgcgaagagaagctttctgccggggaatttgcatctggcaaatccataggctaccacagaggaagaaagtacggttccaatggtggcggtaatggagataaacagagagtttttgaagaaggttccaaaacctacctttgcaaaacccttccagccgtttacatagttctgtaatgtgaatttttccgggatcaggctggtggctgtggtaaagatggtgttcgtatccttaaaggaactcattaccatccataccagcggatagatcattaccagtccgaaggcacatactaaaatgtgatatataatattgctgattgtcttttttcttttcataataacacccacttacgcgttgcggcgtacctttccgattctataaaccgccatcgtatacccacagttttttggttgcaaacaggatccatgtaataaatgcgatcaatgccagcatgatccatgccagtgctgcgccgtaaccggtacttccgaagaggaaggactgctggtacatatataccgtgtagaacagagtagagttcatgggtttaccctgtgtgatgatcaggcactgtgtaaatgccagaaaaccgttgatcatctgcattaccaggttaaaatggatcgtgggagtcagaagcttcagtgtgatcttccagaactgctgccatccgttggcaccatccactcttgccgcttcatagaggctgacaggaatctgcttcaatgcagacaggaagatcagcatggaagaaccgaactgccataccgccagaatgatcagagtccagattgctgttctggtatcacccagccatgctaccggctctttcattccgaacaccatcaaaagtttatttacaagtccgtctaccgcaaacagtctcttccagaggattgctactgctacagatccgccgatgatggaaggcagataatacagtgcacggtaaacgcctgtcattttcgtactcttaaataaaagcagtgcaacgatcaatgcgaagatcagtcgtaacggaaccgaaatgatggcaaatttgaaagttaccaccagagactgataaaacgttgcatcagaaaacattctcttaaaattcgcccatccggtaaatgtagggggctgtaaaatattgtaatcgcagaaggaatagtaaagcgatatacacatgggaataatcataaacgccagaaatccaacgataaatggcatagtacatacgatacctgcagccttttccgtattcagcttctgacggatagtcatgtgctttgttgtcttcataacgttacctccgttgctgcagcattcatagaagcagccttttttcagaatgggtactgcggatgcttccacagtacccattttgtcattctaaaaaatgttgtaagattgttattacttatgtaagttcagacagcttatctggacatgatctggttgcccatcttgaacagatcttctgctgcctcctgtgcggtcatctgaccatagaggatcttatcaaccagctggttgtagtaatcatatacttcatttgctccatcagggatcgcagggctgatagcggagcagttgggagttactacgtcatttacatacttggtaaccacctgtgcagtctcatcctgcagaggagcgatggcggatgctactacggaagaagcaggcacacctctctcaccaagaaggatcttgttagcatcttcagagttcaacagatagtttacaaccttaacagcttctgcctcattctcgccggcatctctggatactgcaaagaactggctgggctttaagaagttagacttctgagggttctcggaaggccatgtggtgatgccgatctccatgccttcgggagcggccgctaccatagcagacagctggttggaccagaagaatccgcaccaggactgggttgcttcggaggagaagtataccagaggactctgctctacagagttggaagtcagttcagcgtgaacatctgcgccgatgatccatccgtccttgacaccatcttcataaatctggaagcccggtaccagacttgctgcatctgttacattgagggaatcctcattgaacagcttcaccacatcatgagaacgcattgcatagggcagatagttgtcacctgcactgtaaggaagatcagtcttaacaccggacttctcataaacctcacgtgccactgcctcgaactcatcaattgtcatgttatcttttacagtgattccaaggctgtcaagcaaggtcttgttgtagaacagggaaggtgcattcattcctgcacagactgcatataacttaccgtcaatggaacccgcatccagaataccctgagatacattagatacatccagcgtaccatcttctacataaggtgtcaggtctaccagcagatctgctgctacatactgtgccagataggaatagtccatctgcaggcactcgggaagggaattacctgctgccagggtggacagcttggtccagtaatcattccactctgcaggctgtgtatcaaaggttacaccgggattctgctcagaatacagatccagggctgcctgtgtacgttcatttctggtctggttgccccaccaggtgaatgtcatggatacatctccggctgctgcgcttccgctgttgtcagcagtcgtggttgcggtattaccgctgtcggtggaagcggtagctgcgggttcattggaagaaccacatgcagtcagtccgacgatcatggcggatgccattaacagggataaaactctctttttcattaatataaccctccttttggtatcgaaaggtaaatccgctatggatttacttctttttgatgttctaattataacaattcttattttttccaggaatatacttttccgtctatttgcaccaaaaaaccgatatcattgttgaaaacatgtgcatgttgtgtatataatcaataaagaactgatggaggcttgtatatgatgtcattttttaataagaatatctcgagaaaaatagcaaatcagaagttagaaaccaagttactgctctctaccatagggattgaccttctctttctgttctttttcctggtagctgccttttccattattacatcgcgttatcataagctgctgtatcagtccatgcagtcttcctcgtcgttagtctcctatgaatttactaaccggctggaggatctggtgaccatgaccaatatcgtccgttcagattctaccgtccaatcaacactggatgaaatctaccagccccaggaagactatgctgtacattattactctgatatttattctgctttacagaaacactacctggaataccgccagccctacctgaaaatggcggcaatttcctgccccagattcatcacttataccaatgaaaatattgcctgtcggccggatgcagatctgactaaagaactgatagctctggcagaggccggggaaggctccccggtatgggtaacttcccatgcggaagaccacggtatatttcttgtccgggagatcaaaaagatcaagaacttacgactggataatctcggaacattgatcatcaatgtaaatctgggagatctggtaacggaaatgtccaagatcagcaatgaatataaaggttcctactggatcatctatgagaaagaccagctgctgttctcttctccggaattggatacagaggaagtacagaaaatcaatgataaaatcaaaagctatgctgttgtcaccctgaatggcagaaaatattttgccatccgcggcaccatgggcatcaacgaatggaattatctgcatctgatctcttatgacgaagtggcaaaatcccagcagatgactgcatttctatatgtattgatcctgttctgcggtttcctgtgctccattttgatcgtccacctgatcgtacgtaagatcaccagacattttgatctgctgctctaccgtatgcagcggttcggtgaagactccaccgtactggcagagattccttatgattataatgatcgtaccgatgagattggtattctgcacaggcaatttacacatatggcagagcggatccagacactggttgttgaaaattaccgtcaacagctgctggctaaagatgcgcagttaaaaagtctggaatcccagatgaatccgcattttctgtataacacgctggatgccatcaactggcgggccaaggccatcggagagccggaaatatcacagattgcagactccctgggtcatttcctgcggatgacgctgaacaaaaaagaacgctttacgttgaagcaggaacttgatattatacattattatatgactatacagcagcttcgttttgacaaccgtctgaattttacggaaagcattccggatgcttgtctggatgcacaggttcccaagctttccattcagccgttgttggaaaatgccgtacactatgcactggagcagatcacggatgaatgtatcatcaatctcacctgtgtgtattcccaggggctgatacagatttatgtgaaaaacagcggatctgaattccccgatgatttattggagaatctccggacacataagattcaggaacagggtctgggcattgcgttgttaaatattgaagaacgcatccagctgatgttcggccagcaatacgggctgcacttctataacgaaaatgattttgctgtagtaaaaatggagataccttatgttaaagatgattatcgtggatgatgagaagatcatacgtgaaacgatccattccctgatcgactggaattctctgggaattgatgtggctgctgtctgcaaagacggtattgaagcctttgactgtattctggatgaatacccggatattgtcatgacagatatcaagatgcccggtttatccgggctggatctgattgaaaaggtccgtgctgcccagttgaacacagagtttatcatcctctcaggatatggtgaatttgaatttgcacggaccgccatgcgctatggtgtgaaacactatctgttaaagccttccaatgaaacagagatcacgcaggtcatcgtatcctgtgtggaaacctgtaaaagcaagactgcttcccgggtagattccctgctgacacagctgttcctcacggaaatgccaccggaaaaacttttgcagagaagatttttcacagaattatccggggaacaggatgtggatctggccaagacccagatgatccgtctggtaatggaggcctccaagaaggaatattacccgctcagcaaactgcagaccacagacagtctcatggcagtcaacgtctgtgtcaccatgaatgacctgattccatctgcggagcagatcatgacctcgatcttctctgtggaaccgcagcacaaatacacagactgtgtggaaaaggtcataaagtacattggagagcatctgagtgacagcaacctttcactgaaatggatctcggaaaattatctttttatgaatccggattatgtcagcaaaatgttcgtcaaacagactggcagcaaattttccgcctatgtaacagagctccgcattcaggaggcgaaaaaacttttactggagcactcagaagaatctccctatgcggtagcggaaatggtcggtttcggcaataatccccagtatttcagccagatctttaagaaatatacgaggctgtcaccgaaggattatgtgaagtcaatgctggaaccgtaagaccgcagctattgcagctattcagaaccccattcgcaaaataggccgttgttcatattttgtttacaaatccttcaaggaatcttcaattccataacacgttttggacatttctgtttcatatactataaccatagaaacaaacaaaacaaaaacttaagcacacaacagtttcttgtttaaaaaactttttcataataaatgccaaggatcctgatccttggcatcctccctttctaggggttttttcaactatcacagatgctattttgcaaatgaagctctgaatagttatttttttgtcttaatggtcggaatcggaataaacaagaatctcgcttgcgagattctccgcctgcggcgggtcgcttttgcgacatacttcataaccgccgcagtgcgatccccgcggagcttttttaattcataggaagaaatttcctatgaattaaaaaagtctcccacatcgctgcgagagacttttgcatttttattccagaattattcagccttgccaacagatccgaacagttccatcttctccttaacagtagccttgatagcttctgcaccgggagccagaagcttacgagggtcaaatcccttgccttccagatccttaccagcctcgatgtacttacgggtagcatcagcaaatgccagctggcactcggtgttaacgttgatcttggatacgcccaggtcgatcgctttcttgatctgatctgcagggattccggtaccaccgtgcagaaccagaggaagctcaccggtcagctcctgtacagctgccagagtctcgaagcttaagcccttccagttagcggggtatttaccatgaatgttaccgatacctgctgccaggaagtcaacacccagatcagcgatagacttacactccttaggatcagcgcactcgcccataccgataacgccgtcttcctcaccaccgatggaaccaacttctgcctcgatagaaagtcccttgctgtgagcagccttaaccaactcagtggtcttctctacgttctcagcgataggataatgagaaccatcaaacatgatggaagagaaaccagcttcgatgcacttgtagcagccttcaaaagagccatgatccagatgcagcgcaacgggaacatcaatgtccagatcctttaacagtccgttgaccatgccaacgactacatcataaccgcccatgtacttgccggcaccctcggatacacccagaataacaggggaacgaagttctttagcggtgagaaggatggactttgtccactccaggttgttgatgttgaactgacctactgcatagtggcctgcttttgcttttttgagcatttctgttgcggatactaacattttaatacctccattttatatactcattcttgttacgatatacgaaatgttatacattcgtaaaagcacgaaaaacacatttcgaataatcactttgtgactatccaaactatagcacattcttttcaaaaatggaacagcttattgttaaatttttaccaaattttaagattccttctgttccacccggatgtctacgccccggcagatgttctcaatcactacttttgtatgggttccgccatattctccatcaagagtccagggaagaggctctgcggaagtgatctccacctttgacgtccggaagcagtacatggcatcggtatcgatatcccggttcagcagggataccataatgttattcagttcaatcgggttcttcggacgtttgatcagcgttacttcgaaaacgccgtcatccagcctgacgtttttgccggtgatccgcttaaatcctcctaccgatgcggaattggtcaccattccgaagataaaatcatccacgatcgtagtatcgccataagtaatccgcatgggataggaacggatcgcggacagccgcttcattccttccagcagatatgccatatgccccagcacatttttcatatcctgtccggtctcataagagacatccgtgaatagtccgaaagctgcgatataaacgaacacatcctcattaaaggatcccacatcacaggcgaaatcattcccatttacaatattttccgcagctctcaccatattcttcggcagcccgaggcttcctccgaaatcattggtgctcccggccgggatatagccaataggcgtacggaagccactgcggatcatgccggtgaccacctcatccagcgttccgtctccgccgctgcagaccacgatatcatattctttgctgcgcttctcggtcttctccatggcatcctcacttctctgcgtgggatatacggtgatctcataaccgcccttggtgaatacatccagaatatccgccagtttgttgcggatttgtgcctttccagctttgggattatagataaataacatcttcttcataatactgccctcaagatacaacaaacgggactaacagaattctccatcagccccgcttcttctcatgttatgttcttaagccacctgaccgctcaaaaacttttcaatgttgtccacagcggtctgctcatctgcaccctctgcagttactgtaagctcttcgcctgcacaaagtcccaggctcatcatacccataatactcttggcattgatccgcttatcgtctacttcaaaataaatgttgctttcgtacttgctggcttcctgtactaacagtgccaccggtcttgcgtccaggccatcttccagtctgaccgtaatactcctctttgtcataattttcctcctcttttacgtccggattctatctgccagttcgctgagtttacgtaatctatggttcacaccggattttcccaccggcggatccagatactctcccagttccttcagcggagcgtccggattctccagcctgacctctgccatctggcttaagggctcgggcagattctccagtccgtagtgatcccggatataaataatatcctctatctgtctggtcgccgcagttaccgttttggtaatattggcggtctcacagttcactctccgattcacagaattgcgcatttctttcacaatcctcaggttttccagcttcatcagggcaatgggtgcttcgcacacattgagaagatccacaataccggatccttccttcagatagaccacgtaatacttcttccgaagcacaatcttggcttctatgtcaaatccctgtatcacactctgtagttgtctcgctttatcctcatcggtgcatacaaattccaggtgataacttttctgcggatcgctcatagaaccaatgcagagaaaagctcctcttaaaaatgctctttgacagcaggaatttttaatcagcagggggctcacaggctcagacagatccccgatcttatcgatcacactccgcatctgttcctcgctgattttaatatcagtatctatattatatgtttttttcaataatgtaaagccttttctgacaaccgcctcgttttccgtctggaaaccgatcatgaaatctccttctgcggagcgtccgtattgtccactgaagttcatgagtgcggccagctcagcgatctggcaatgtcttgccgggctgatgtgttttgccagttcttcctttacttcactcgaaaatgacatgtcagattccttctctgggtacatcacggtggtacagcttgataccataatgaccttccgccttcatacgttcgtacaatttatttgccaaagtaacgcttcggtgcttaccgccggtgcagccgattgcaataaccagacggtatttgccttctttaatataattcgggatcagaaactgaatcatgtcggtcagcttgtccaggaatattccggtctccggaaaactcatcacataatcctgcactcctttatcattaccggtctggggcttcagttcctcgatataataagggtttggcaggaatcttacatcaaagaccagatcggcgtctgcggggattccatgcttgaacccgaaggacatgaccgttaccataagactattgtattcttcgttctgtacaaaaatacgatccaactcttccttcagttctctgactaacagattggaggtatcgatgacgtaatctgaatttttgcggattgtctccagaatcttccgctccttgtgaatgccgtcctccactctgccgtctgctgcaagagggtgcacacgtctggtctccttataccgttttatcagagcagcatcgtcggagtccataaacaaaatctcgaatttgtagcctttttcctttaattgctccaaaatccgggtcgcatccatgaaattctggtctgcccggacatccagtcccagggccaccttgctgatctcactgcccggcatggcaatcagttccacaaacttctccaccagagataccggcagattatccacgcagtaaaatccagcatcttccaaaagctttaatgcggttctctttcctccgccactcatgcctgttactactacaaatctcatatgcacctcgttattctatcgtaactattcagaatcccattcgcaaaatcacctcttcgaggcttccttggagaacaggtcttcctgttctctgctcatgtggttacttcgccatataaatttgcgattctgcgaagatgcaagcatccgcagaaaacaaatttacatggctctgaatagttacaggaatttgatctcgggttccagctccacgtgaaaacgttctttcactcttctctgtacttcccagatcacatcttttacatcttctgcagtggcattgccggtgttgataataaatccgcaatgcttttccgatacctttgcgcctcctacggagtatccccgcagaccggcttccatgatcagctgcccggcgaaatgtccctcgggacgtttgaaagtactgccggcactgggatattccaaaggttgtttttctctgcggcgaattgccagttcctccattttggctgcgatctgctccggatctccgggctgtagccggaaagtcactttcgtcacgacaaacgactggttctggatcacgctggtacgatagccgtactccatggtactgttgtccagttccatgatctctccattacggttgactaccgtaacagtggtcaccacctggctcatctctccgtcgtaggctccggcattcattacagctccgccaccgatggtaccggggattcccgcggcgaactccaggcctgtcaggccatgctctttcgctgcttttgccacctggctcatcagggcccctgcctctgcttccagatagcagtctctcacttcgatccggctcatatgcttaccaaccaccagaacaattcctgcatatccctggtcgctgaccagcagattgcttccgttgccgatcacggtatagggaacatccaccagccgaaggtatttctggatcttacagagctgctcttcgttttccagatagaccaggcaatctgccgggccaccgatccggaaggtggtatgcaatttcatcggttcctgtaacagaactttatctgccggtacaatttcttttaatgcttctatcactgctgcacttatcatgttgtcaggctgctctttctttttgttataattatgccgcgaaagcctactttaataccagtgctgccgcaccgtagattccggcatcatttcccagcttggccagggcgaatttcgtctgcttgcagggaccgaaagcacatctcttataagaaggctctatgtatttgaataaaatgtctccggccttggacacgccaccgccaatgacaaaaatctggggatcaactacgctggctactgcggcaagtcccttgccaagatactcgccgaactgttctgcgatctcgattgctactttatctccggctttcaccgcatcaaatacggtcttcgcagagatttcaccacctctgagcatgctgggagcatcatctttggccagacgtctgttggccagacgggtaattccagtagcggatgcatactgctccagacagcccttgttcttacagccgcaagtctctgtctcagcatcttcaatatggatatgtccgatttcaccgccggcaccgttggtaccggtcaggattctgccgtcgatgatgatacctccaccgacaccggttcccagagtaacggctaccagattggaatagcctttaccaccgccctgccacatttcacccagggctgctacattggcatcatttccagctttcacagttacaggcagatccagttcttttttcagggtctctgccagatcaaaggcaccccagccaatgttcactgcaccgttgaccatatagccgtcagcgtccactgcaccgggagctccaattcctacgcctaccagttcttctacagagatattcttctcctgcattttgtttttgatagatgctgcaatatccggcaataccttttccccgccgttatcttttactgtgggaatctcccacttatccagcacctgtcccttatcattgaaaagtcctaacttgaccgtggttcctcccacgtctaccccaaatgcatatttactcatcgtcctcgtcctcctcacgtctttttgccagagagttctgtacacgggtgtatagctcttttgctgcgttgtagcccatcttcttctgacggtggttgatagctgccgtctcgcagataactgccaggttacgtccgggacgaatcggaatgttgtggcataccaccttattgcccagatattcggtataattctcttccagtcccagtctgtcgtactctttgtccttatcccaatcttccagacggatgaccaggtcaatggtctgggtatcttttacggacaatgcaccaaacagtgccttgacatccacgatgccgataccacgcaattcaataaagtgttttgtgatatctggtgcagaacctaccagcgtatcatcactgaccttacggagttctaccacatcatcggttaccagacgatgacctcttcggatcagctccagtgctgcctcggacttaccgatgccgctctcaccagtgatcaggacaccttcaccgtagacatccaccagtacaccgtgcacggaaatgcagggagccagcttgacatttaaccaccggatgatctcagacataaagtcagaggtggattttttcgtagataataacggaatctgatgtcggatcgccgtctccaggaatataggatccggtttcaggtcacggctgaacacaatgcagggaatgtcataggccatcagcttctcatacgcctccctgcgggtctcgtctgtcagtccctccatataagtatattccacaaatccaacgatctgcagacgcgtggcatcaaaatgctcaaaatatcctgccagctgcagtgccggacggttgatatccggctgtgtgatcttcacatgtttcacatcaatctccggtgtgagattttccagtttcattttttcgataacacgggttaaacttacacttgccatactaatctccatacctttccgcgaaaaaaccgccccggttccccgcccttttcattatcttttagtgtaccacaggttgtcctgtctgtgaagcaaaaaaggtcacgatttcctctgccgtacgctcattcatttcgggaatttccatcaattcttccaccgatgcctgccggatctcctccagtgacttaaagtgcctcatcagggcctttctccgggccggtcccacccccgggatatcatccagtacggacttcacctgagtcttgctgcgcagggatctgtgatactcgatagcaaaacggtgggcctcatcctgaattctggtgatcagcttaaaaccttcggaatgggtatcaatgggaagctcaatattatgataatataagcctctggtacgatggttgtcatccttgaccatgccgcagaccggaatgtcgattcccagttcttccagtacggacagcgcaatattcacctgtccgcggccgccgtccatcagaatcagatccgggaacttcgtgaagcttccgtactcctgatccatttcctgttcttccagctctttgctctcttccatgccgtggcggaaccgcctcgtcaacacttcccgcatgcaggcataatcatccgggccagagacactcttgattttgaatttacggtaatcgctgcgctttggcttccccttttcgtagactaccatggagcctacattttcaaaaccgttgatattggaaatatcgtaggcctccatccgggccgtgccggtcagcggaagctgcaacagatctgagatttccttcaccgcaccgatagtacggccttcctcacgcttcagtttctccctgtcctgagacaataccagttttgcattctgggctgccagttccaccagtttttccttactgccgatctttggcaccttcaggtagaccctgctgcctttccgttcagacagccatttttcaataagttctgcgtcctcaatctcatattgcagcatcagctctctgggaataaatggggtccccgcatagaactgctttacaaaatcctgtaaaatcgctggtttgttattttccggcacatgtgtcatatagtaatgttccctgccgatcagcttgccatcccggacgaaaaacacctgtaccaccgcttccgtctcatcctgatacagtgccaggatatctttatcttcaccgacgccctcggtgatcttctgtttctgggacacctggcggacactggagagcaggtcacgataccttgcggcatcctcaaattccatagcctccgcggctttcttcatcttctcttccagatccttcagaatcgggctgtaattgccgtttagaaattccagtgctcccgccacctgctgtctatactcctccttgctcacatagccctgacagggagccaggcactgtttaatatgataattcaggcaggggcgctccagtccggtgtctctcggcagcacccggttgcaggtacgcagctggtacagcttgttcagcagctcaatggtatctttgaccgccgcagcactggtataaggaccgaaatagcgggacttatccttcttcatggtacgggaaaacaggattctgggataatcctcccccaccgtcaccttgatataagggtacgtcttgtcatccttcagcagagtgttgtatttcggagaattctctttgatcagattgttctccagtaccagtgcctccagttcggagtccgtcacgatatattcaaaacgcgcgatcaatgataccatctggtcaatggcaggacctctgccgatattttcacgaaaataagaccttacacgattgtgcaggttgatggcttttcccacatacaaaatgacatccttgtcatcccgcatgatatacactcccggcttgcgggggagcttttttaattcttcttcaaaattaaacataaatatttcctcgcatgcttctatcataccgattctggggaaaaatacaataagggatttaatattgtaacttgagagttagttaaatacattggcaaaatccacgaactcccggagcatgcgatacacatgtctcgatgtaaggtctccggatgtgaattttctacgaaaagtgatgagtagttctcgtcatgacggggccgcctacagtcgacatccatgtcgacaatcggctgacgcggacatcgtgtccgctttccccctgtctttcagcacttttctagaaaatatcaacatcctccgacaaacatcttcgacatggcaccacatacgccgggagttctgcgttttggaaagttttaaaaaaacagtagccccggctgggtataagaataagcagtgccgtaagcagacgtcggtaccatagcgtcccaagggacgcattgcggtcgtactgtgaccgcttatgtaccgctacgctctgcgacaggagcgcatcgtactaaagtacgagtgtgccgcgtttcttataccctgccaagggctacggggatatttcgctaaatctcaatttttaacaaaaggctctggtg

SEQ ID NO: 5530 - DNA, 158 bp, Unknown
  gut microbiota DNA sequence
tttccaactgttgtcccccagtacaaggcaggttacccacgcgttactcacccgtccgccactaacttacatatcgctaggcttcaatgtaagtccgttcgacttgcatgtgttaggcacgccgccagcgttcatcctgagccaggatcaaactctca

SEQ ID NO: 5531 - DNA, 154 bp, Unknown
  gut microbiota DNA sequence
tttgacaaataaacagtaatgcaaccctgaaaattccaagattttcagagaaattcaagaacaagcaagttgatcgaaagattgacaagctacccgaattaacagtaaacaatgccagataaaactggcaggacacaaacaccattttaacatg

SEQ ID NO: 5532 - DNA, 2697 bp, Unknown
  gut microbiota DNA sequence
cataagattgtcagcaaagaacgctgtcaatcttatttcatagacggctgtcgccgtataaaaatagaacgaaataacctcttgtgtgagcaagctcccaccgaggtattccgttctatttttgcatggctcgtagctaggctaactttccatttatttcagcttccagatatctctgttgtactctgcaatagttctgtcggaggagaagaatccggccttggcgatgttcactaacatcatcttcttccacttctgctgatcctcgtaatcagcaaatgcctgatcctttaccttgatgtagtcctctaagtcaagcagggtcatgaaccagtctttgttcagcagctcgttgtacagacgctccaggttctcctttttgccgaccttgagcacttctttgctgacgatgaagtctacagcctctttgatcacagggctcttcttgtagtagtccttagaaacataatctgccttctcgtaatgcttgatcacagtgtcgctgtccttaccgaagatgtagatattgtcatcgcctaccagctcatggatctctacgtttgcaccgtcactggtacccagtgttacggcaccgtttaacatgaacttcatgttaccggttccggatgcctccttggatgccagggatatctgctcggagatatcgcaggcagggatcagcttctcggcatagcttacgttatagttctctaccataacaagcttcatgtaagggctgacttcaggatcgttattgataatgtcggacattaccagcaggagatggatgatatcctgagcaatcacatacgcaggcgcagcctttgcaccgaagataaaggtcagtggagtagaaggcttcctgccgcccttgatctccagatatttgtgaatgatatacagtgcattcatctgctgacgcttatactcatgcagacgctttacctgaatatcgaagatggaatcgggattcagctccacgccctccttctccttgatataggataccagttctgccttcttggtcttcttgatgtcgtagatggcatccagtacagcctgatcgtccttatgctctaacagcttctgtaattcatccgcatccttcttgtagccgtcgccaatggtctgggtcaggaaggcagccagctcatggttgcaggacagcaaccatctgcggaaggtaataccgttggtcttgttgttgaacttctcgggatagatcttgtaaaaatgattgagttcgctctgcttcaggatctcggtatggatcgctgccacgccgttgacactatagccatagtggatgtcgatatgtgccatgtgcactctcttgtccttgtcaatgatctgaactttttcgtccttatatttctttgccacacggtcactcagctccttgatgatgggaaccagctgaggcactactttctcgatataagccagaggccatttctccagagcttctgccagaatggtgtggttcgtataagcacaggtgcggcttactacgtcgatagcttcatccatagtgaaaccttcctctgtggtgagaatgcggatcagctcggggataaccatggtaggatgggtatcgttgatctggatcgctacatgctcgggcagagtatgcagatcataacccttttcctttacttccctcaggatcagctgggcaccgttgcataccatgaagtattcctgatagatacgcagcagattacctgcctcatcggaatcatcgggatacaggaacagggtcaggttcttctcaatggcttccttatcaaaagtgatgcccttctttaccagactctcgtctacggtctcgacatcaaataaatgcagcttgttcagtccattctcataacctacgacatcaatatcataaagtacggaagtcaccttgcggtcaccgaaagatacttcgaattttgtgccggtattgttcagccaggaatccttctggatccagtcattcttctcggcattctgcaggtgatccttgaatacctgcttgaacaatccgaagtggtaattcagaccgataccgtccccgggaagtcccagggtagcaatggaatccaggaagcaggctgccagtctgcctaaacccccgttacccagagaaggttcgggttctgcctcttcgatgtctgcgatggttttgccgttcttcttcaggatatcgctcaactcctcatagatgcctaaattgatcagattgttggataacagcttaccgatcaggaactccatggaaatataatataccttcttgtctcctgtaatggcgggagtctctgccatcttctctttggtcagctgcaatactccggtgtacagctgtgcatcggtgcaggcaccgatattcttgccatataatttgccggtgatctcatttaaagtctgctctaaattcatttcaaactccattctgcacgatagttttatttttgccaaaatgaatgtaccgtgccacactcattttttcatattctttttctttgtctgggtactatacttatttttggtatcccatccccttgtctcagctgtgccttgggtatttcctatccttttcggcctccatacccttcctgccgctgcgcccgggtattttctgcaattttcggcctctataccctttttcccgctgcgccctgggtatttcctatccttttcggcctctatacc

SEQ ID NO: 5533 - DNA, 9849 bp, Unknown
  gut microbiota DNA sequence
aagcgcccatcgaggtgttccactctatttttgcatggctcgtagctatgctaactttccatttacttcgtatccttcataacatctttgttcttcacgagataatcgatcagagatactacggtgaggatcagtgcgatccacataataatatcggtgaggatctgtaactgcgggaagttggcgatcatcagacagatcataaccatctggaaggtggtcttgaacttgccccagtagcttgcggcgatgactacaccgttgtcggaagcgatcaggcggaaaccgctgatgatgaactctctggcaataatgatgatgaccacccaagaagggatacggttcatctcgatcagtgcgatcatggcggaacatactaacagcttatccgccaggggatccatgaacttaccaaagtcggtgatcagattatattttcttgcaatcttaccgtcgatcagatccgtcagactggcgatgatgaagatagccaacgcgatcatatccgtcacgaaggtattatcgccgaaccatccggcctggcctcccagcaacaggataataaacggcacgatcaggatcacacggaaaatagtcagcttgttaggcagattcatcttactcatggtatatctctcctattagatcatattcattggaatcggtgaccagaaccttgacaaaatctccggtcatcagattcgctgaagtatttacaaacagatagccatccacattaggggcatctctgtaggttcttgcgacataggtctcttcgtccgctaccttgccctcgatcattacagtcaggatacgacctaccatatcctccgctttgtcaaaagcgatggcctgctgcagttccatcagttcatccctgcgaaattccttgacctcctgcggcacctgatcttccatggtggctgcgggagtatcttcctcctgggaataagggaatacgcccagacgatcgaattccatctcgttaacaaagcgatacagttcctcgaaatcctcctgagtctctccggggaatccgctgatcagagtcgttctcaaacagatatcgggaatcttctcccgaagcttaccgatgatagcacgaagttctgcctggtcggtacgtcttcccatgcgctttaacacattgtcggaagcatgctgaatgggaatatccagataattgcagaccttgggttctgctgcaatagcatcgatcaactcgtccgtgatctcctcaggatagcaatataaaatacggatccaataaatgccgggaatctgcgccagttcatgcaaaagtctgggcagctcctttttaccgtacagatccacaccgtacagcgtggtctcctgtgctaccaggatcagctcccgtacgctcttgtccgccaactctttggcttccttaatgagactctccatgggaacgctgcggtaattgcccctgaccttcggaataatacagtaggtgcagtgtttgtcacagccttctgcaattttcagatactcaaaatgtccgcctgtagtgacaacacggttggtctctgtcacaggggcggcattgatatcttcataatgattctgtttctggcctgccagaatctcttccagagcggccacgatctcatcgatggcagtggttccgataatggcatccacctgcgggatctccttctggatttcctcacggtaacgctgtgccagacaacctgctgcgatcagtgctttgacctgtccgctgtccttcagttctcccatctgcagtaatgtattgatgctttcttccttggcatcaccgataaagcagcaggtgtttactactactacatctgcctctgcttcatcgtccgtgaaggtataacctttttcctggagcatgccaagcatcttctcggaatcgacaagattcttgtcacagcccagggatacaaacaatatcttcatgcgtcttatgcttcctcatcatcaccaaggattttaatcttaccctgattcagctcttctactgcgatagacaggggcttatccaccttggctgttaccagaggctcgtcacctgcgatgatctgtcttgctctcttagcagttgccataacaatagaataacggctgttgactacaggtgcttcaccgggttctacctcgctgtttactactttcattaaatcggtataagagggatgtaacattttattttgctcctttcgcgaaacctttcagttcctctctgatctctttgataaattctctacgacgggacggttcatttttcgccgcttccacaaacttctgtacttctgcggcacacacatccagatcatcgttcactactatataatcataggcatccatgccttctgattcctcataagcccgggacagtctctgtgcaatgacatctgctgtctcggttcctctgcccaccagcctcttctgcagttcttctgcactgggaggggtaacaaacagtaacaggctctccgggaactgctctttgatcttcatggctccctggatctcgatctctaagatcacatccctgcctgcctgcatctgctcttccacatatgctttcggtgttccgtaataattgccgcaatactgagcatactcgataaatccgttttttgcaatattttcttcaaattgttctctggtacggaagaaatattctcttccgtcctcctcgccttctctgggctgtctggtagtcatggaaatggacaacgcataattgtcatattccgataacagctttttcaccagtgttcctttgccggctccggagaatccggagatcaccatcaatattcccttattctgcatcttctctgtcctctttttcctcttccggccacagcgcctgtgctcttcccgcgattgtctcgggaagcagtgccgacagaacgacctgactgttctccatgaccagtaccgctttcgtcttccgtccctgtgtggcgtcgattgcctgtccggtctccttggccttctgcaccagtcgtttgatgggtgcggcctccgggctgacgatggcgatgatcttatctgtatttacaatattgccaaatcctatatggatcaatcggttcatggtatcacctttcgtagccatgcagttcccattcgcataaccgcacgatatcgtgcttcccgctgcttcgcagcttgttattcaatattctgtatctgctctctgactttttcgatctcggtcttgagctcaatcgcacagttggagatctccagatcgttggacttggacaggatggtgttggcttcgcggttcatctcctgtgccagaaaatccagctttcttccgatactgccaccggccatcagcgtactcttcgtggtctcgatatggctgcgcagtctcaccagttcctcatctacgcataccttatctgcgaagatcgtcacctcggtcagaagtcttccttcatctacagtagtatcgcccagcagttccttcacacggtcttccagcttctgacggtattcagcaatgatctggggagaacgttccgtaatgaaatccaccagcttcagcatgccatccagcttgctaattaagtcatctcttaaatgctcgccctcggtgatcctggtctgtacaaacatctcgcaggcacccttcagggctctctgcagttctttccacagttcttcctcatcgatgtcctgttcttccatcacaaatacatccggatacttggacaaagtggacactcggatatcgcagtctaagtcaaaatcactggccatctgcttcaggtatcccagatactccgccgccagttccttgttgtaacggacattggatgtgttctcggaaaaatcctcgtaggtaatgaacagatctactttacctctggaaatataattcttcagttcactgcggatcgcagattcaaagaaattcaacttcttcggcattttgatgttcacatcaaggtagcgatgattcacagacttcatctctacggtaaactttctgttattctcggcagtttcacatctgccaaatcccgtcatactcttgatcatagcttctcctgttgtaagggcgtgtaatgccttccgcaatttacggttttcattctattatagaataaatatgccctttccgtcaagtgcaggtgccctatttacactatttccactcgtcgtaatgctccagaaaatgatgcttcacaccatcctctttgtaggcgatgatcgtacgtaagtttacattctccacactcttgaaaatattcccctcgataaaagggttcgtctgtttcagcgaagcgatcaggttcttaatctccatacgcttggagggactgctgccatcggtacggcaagtggtacaagtgtcagtgaaccggcaggcacactgaataaaatgcagatcattgtaatctctccagtgcttgatgtcatcctccctgatcaggtacatagggcggatcagctccatgccctcgaaattcgtactgtgaagcttcggcatcatggtctgtacctgtccaccgtacagcattcccatcaggatcgtctcgatgacgtcatcgtaatgatgtcccagagcgatcttgttgcagcccagctctttcgcatgactgtacagatagcctctgcgcattctcgcacacagatagcagggggaatcctctatgtcatacaccgcatcaaatatctgggattcaaaaatggtgatgggaatatccatcagcttcgcattgttctcaatgatcttacggtttgcctcgctgtagccgggatccatcactaaaaataccagttcaaaggggaacttgttatggcgtttcagctcctggaacagttttgccatcagcatggaatctttaccgccggaaatgcatacagcgatcttgtcgttttcctgaatcatatcgtattcgttgatagctttggcaaaccgggaaaacaggactttgtggaactttttgcggatgctcttctcaatttcccttgcccgttcattttccttttctccgggctgttccttctgcatcaggttcagcagccatccggtatagccgccctgtaagctgtaggcctccattccctgttctctgaaatactctgcagacaccttactgttctgtccacggctgcaatacaaaattacttttttatcccctgctgccgccgccagtctgtctataagttcacattcggggattgcaatggctccgggaatcattccatagtttactgcttcatcccctctggtatccaccaggatgtatcggtcaaggtcccgggactgtagttcttcccatgtgatctcaatgggccgtattgtctctttttcttccatttttatattcctttactctgcccgaacaggcagtctattgtttttcctctctcagtctgctacactgttattaaaaatatggtaactgaatcgttacattacatccatagaaaggcacacaaatgattccttatactactttagattccattatagctcaaatgcccgaacgcaccgggcacactctgttagatgaagaccaggggtgtgtaaaagggtgtcgtatgggcgtatccttctatcgcagcgcagaatatcacatgccgcaaaagcatgacgatcaggaaggcttcttcgtattggacggaaaaggatatgctctcatcgatggcgaagaaatccctctgctgcccggtaccgcctttatggtaccggctcacacggatcatgtgatcagacgggatccctcctgtgactgctgtaaggttctatggttccatgccgcagtagaatgatcctcagtccccacataccgccagaagctccgtcagctgcgcctgaagctctgtcaggctgtcacactttttgtctaccagcgcaagaatctcttctgtgggcggcagctggtccggcaccatcacagtatataagcctgccgcataggcggaccggataccgttaaaggaatcttccaccgccagtgcctgtccggatgcaaccccaagctcctcgcatgccttcagataaatatcgggtgcaggcttgccatgctccaccatgtcgccgcagataattttctgaaaataagatgtgatacccgctctgtccagatgctccataactgcggtcctgcgtgtagaggatgccaatgctgttggaatgcggttctccttcagatattccaggatctcatgcacgcccggcttctcgggaaggccttcccgttcttccttttccttaaatctccggctgcaatcctcatgcaattcttcaaaagacacatcgatgccctgctctgctttcgctgcctcgaacacttccttcgtgccctgcagtgtccttccgatacaggctttggaaatctcgtccacatttttaaggcccctgggctccgccgcttctctccagcactccatatacatcctctcggtatcaaagaggacaccgtccatatcaaatatcactgcggttattgttgtcttcataattctcctcacatccagagcaccatcggattgttgcccataccgatgatccccatcattttgcgcgtaaatagtaatcgatgatatctgtctcttccatggaaatataagttccgtacatggctatgttgcagcacaataccctgcttcccgcagggaagatcatctcatatcctttggacgaagccagccccggatatctgtcatccgctcttccgtaggaaaaataagcagcggaattacctatcttcaaaggtttcggtgccccaatccctccggcgatcagagcctcgtcctttttccattcaaaaaagctccagttctttttctctccgagttgccttggttctctgcttcgttccgtcagcagaatcttaccctgtgtatttaaaaatgtcaatgctcccgtctttttatccacacggatctgggcatatcccgctgtaatttccaccagggaaggattctcccgcaccgtgcatctgaggtctcctgctgccgtcaccgccgctttcgggaattcacgacactgccctttggcaaaacaaatccggaacagatccaccgcaaggggtgtgatccgcaaggttccgtaactactcaaaagatccacatagcccttgcccttcatgaccatgcgcacagcgcagtcgatcctggaatgtccggcgggcatcagtgttttggcatccggcatatcgccgtactcgccgttattttctaccatccgcggctcctgtctgccggttgctctgccagcattgccgtttcctgccccgtatactttcgcaggtgacggctgtcccgtccgcctcgattcaggttcccctgactttcctgctttcttcggtgtagcgccgtctgttgtcccctgactgtttcttgtcacgatgatcttctttgggccgtaacgctctctggccacacgttccttttccgcttcctgtgccctctgtctgtagatctcttcttttgtcttctccgtctctgcctgttttaccaccgttttcaccggctttttctgggcatctgcggcaaggcgccttctcttcttctgctccggggataccggatctgcgatcagtccggtgagtttcccccggtacagcaccatcagttcatgcagggctcgggtggctgccacgtacagctgcttcacatacccgtcttccaccgggtaatcttcctccgaagcgttgaagatcagtactgcatcgaattccagacctttggtgtattttaacggaagcaccatgacgccctcgccgatctcccattttcccgcatctccggtattcaggtccacgctgccctgtaaggctgctgttactttttccgcctccgcttcgtcaatgcagactacggcaatggtatccagccccttgctctgccatgctttgatgatctgctccgcctgtgtcacctgctctgtaaaatccacacattttttcaccgtgaccggttccccatgacgtatgatgggctccaccggatagaccggaaagcttccgtgatacagaatgtccgtggcaaactccgagatttccaccgtgttacggtagcttttctgcaaaatgccgaaataatcaaactctccaggcagcatcaatttccgcagttccgtccagtcgttgagaccgtagcggtcggaaatattctgggccacatctcccatgatcgtataggtacatttgctcagacaatattttaaagacgcataggccatcatgccgaaatcctgggcttcatcaatgaccacatgccccgcctcccggatcaccgtgtcctccttgatgcgcttgtagaggtaggccatggccgccagatcatagacatcgtagccaccttccggcacctcgaccgtgaaatctttctcctgctcttccttcaggaactgttcgtagagttccgccacagagcccttccattccctttttccgaaataggtctcataataatgcttgagcttctgcttttccggctgggtataggaataatattttccgctcagctcattttccagccgtgccatcagataatccgtcagtctgctgattttgtccgcccgggacagatcctttgtctctttcaataagcgtgcaatggtggcccggtccagcagcactttgccagtcttttcgatcaccacgtcctctctgggtatcgagcggtattcgtaacgcaggcagaaattctccagctccttaaaccagacaagagttcccttcaccgccggggtcacaccttttaccaccggcttgatctgccaggacttgtcccagtcctcgtacaaaagccttacgaacaactgctccatggtcatctgggagacaccgtaaacattcagttccggcagcactcccgttatatagtttaagagcacctgattgcttcccacaatataaaaatcttccggtgcaaactcctgatcgtagttgtacaggatgtaggaaatacggtgcatggccactgtggtcttgccggagcccgccgctccctgtacgatcatgttgtgctggggctttttgcggatgacttcgttctgctcctgctggattgtggcaatgatctcgcccagcaccgcctttttgttccgcgccagatattttgtcagcagttcatcgttggccaccacatccgaatcgtagaagtccttcagctcatcattttcgatctcataggtgcgcttccgcgacagggtgatgtcgtattttccctccccctttacggaataagagacatcccccagagcggcatcgtaatatacgctggcaatgggtgctctccagtcgatgacctccggttctgccgggttatccgcaatgacacttctgccgatatagtagacctcgtcttttttcagttttttgtcccggaaatcgattctgccaaagtagggctttttcctcgcctgttccgcccggcgcagatcctgattcacgaacttgaagcgggcatccgcattgtgccacagggtctgggcttccttgtcgttctcgtcgaattcctcctgcatggcatgcagttcttccgccagagcctgtacactctgcctgttggcatccaccttgcgctgtgcgatctctaacgtatgctgtaatcttttttcttcatcctgcctcgtaatgccgggtaaactgctcatattctctcctgttcaaaaccataaaaaagaaaaagcaaaggaagcctgtcgaagacttcctttgtatgtattctaaatcacattttaccagtcagagccccagtcatcgtatcctgagtcccaactgtcattggaatcccatccggaatcccagctgtcatcatcccagctatcgttattatcatcgctgtactcataaggagtgtaataggacgaatcct

SEQ ID NO: 5534 - DNA, 3333 bp, Unknown
  gut microbiota DNA sequence
ccttccttgtgctggtgaacagccagaaaccttattccgaggagaccagacaggtagcggaggaaatcgggaagaaatacgatgtggccgtgatgccggtgaactgcgagcaactgaaaaaggaagatattaatcgccttctggaaaaaatcctgtatgaatttcctctgacagcagtggaattttatttcccgaaatggatggatatgcttccggtggatcatgcggtaaaacaggacctgttaagacagatccgggaattgatgaacagctatgaccggattcgggatgtggcgggacaccctgtggaattgcagggagattatattcaaagctgcaagatggagccggtgcagttgtggaacggtattgttccggtacaggtaggaatcgacgacaggtattattacgaaatgctttccggaatgttaggagagaacgtagaggatgaataccaactgttgaataaactaaaagagttggcagaaatgaaaaaggaatatacgaaggtgcaggatgcattgtccatggtgaaaatcaaaggctacggcgttgtgactccggacagagaagacattgcactggagaaaccggaattgatccgccatggcaacaagtttggtgtcaaaatcaaggccagcagcccctccatacatatgatccgcgcaaatatcgagacagagatcgctcccatcgtgggcacagaacagcaggctcaggatctgatccattttatcgatcaggcggaggcggagcacggtatctgggagactaatatcttcggcaagactgtggaacagctggtggatgacggcatcaccacgaaagttgcttccatcggagaagagagccagctgaaactccaggataccatgcagaagatcgtcaacgacagcaacggtggcatggtttgtattattatatgattccataacccacccatggaaagtctgcaagactgcctgcaggcaaaacagactttctatgaggggagtaaacacacatgagcaggggaggacgatagtccgaaatgcgaatgtgggttacaatttcgagagtgcgaagcacggagaaattgtatgggatgttagctttccattgcttttttcccgtgcattttgtataatacctttgttgactttgctttatttttctgaaaaacaggaagaatatttgctaaattgcatgaaaatacggctaaacggaggatatagatgaatcaggtatatgcaaaattacagaactgttatgagtgtgtgagaaaaaagacggattttgtacctaaggtggcgatcgttttgggatcgggcctgggcgattatgcggaacagatccgtgtggtgacagagatcccttatgcggagatcgagggatttcctgtttccaccgtaccggggcatgccggtaaatttatcttcggttatctcgatgagattcctgtggtgtgtatgaagggaagagtacattactacgaaggttatgatgtgacggatgtggtactgcccaccagactgatgaaactgttaggcgctgagattctgtttctgaccaatgcggcaggcggtgtgaatacttctttccatgccggtgacctgatgctgatcagagatcatatttccgtgtttgcccccaatcctctgatcggtgccaacatggatgaactgggactgcgtttcccggatatgagccatgtgtatgacaaggacttacagcagatcatccgtgagaccgcgaaggagaacggtatctatttacaggagggtatttatacccagctgaccggcccgtccttcgaatctccggcagagatccgtatgctccggacacttggctgtgacgcggtaggcatgagcacagtggtggaagcaattgctgccaaccacatgggaatgcggatctgtggcatctcctgtatcagtaatctggcggcgggaatgacagatcagcctctgaatcatgaggaagtacaggaagctgcggatatggcagctcccagattcaagaagctggtaacggaatctgtgaagaaatttgtatagacacagagaaaaaggagatgcggatgatccaggagacagaagaaaaggcattggtcagccaggcattggaagccagaaaactggcatatgctccttattccggttatacggtgggagcggcactactgactgcggatggacacagataccttggcggtaatattgaaaacgcttcttacggagctacgaactgtgcggagcgtaccgcctttttcaaggcggtcagcgagggagaacgggaatttacagccattgccattgccggaggaatatccggagaggcaccggtggaatatgcgtatccatgcggtatctgcagacaggtgatgcaggaattttgcagggatgattttgtgatctacgtggtaaatagtgaacaggattatcaacgctataccttaaaagaattacttccctttggatttggaggagatgcaatcagatgaatatcagattatataatgcacgaattctcaccatggaacccggcagagaagtcttctatggtgaagtatgggtaaaaaacgacaagatcgcctatgtggcggaacagaaagaacttgcggaggaatgggacaaatcccagttccccagaattgcgtgggatatcgaactggattgcaagggaaaccttctgatgcccggatttaaaaatgcacatacccattccggtatgactttcctgcgttccatggcagatgacctgcctctggatcagtggctgaacaagcaggtatttcctctggaagcaaaactgaccggtgaggacatctatgaactgaccagactggcagtgctggaatacttgacctcaggagtgacttccattttcgatatgtacctgacaccggatactattgctgaggcctgtctggacaccggaatgcgttgtgtactggtatccggactgaacaatttcagctcttctccaaaacaggtagaagaggagtttttaaaatggaataagaagaattccctgatcagttaccagctgggatttcatgcggaatatacctgttccaaggaactgctttggaaagtgtcggaaatggcacatcattaccggacaccggtatatgcccatatctccgagacggagaaggaagtggaagagtgtaaggctcgctacggaatgacaccgcccatgttcttagactctctgggaatgtttgattttggcggaggcggtttccactgcgttcatgtgacggaacaggatatggatgttttccgcagacatcgtatgtatgtgatcacgaatcccggctccaacacgaaactggccagtggcatt

SEQ ID NO: 5535 - DNA, 24362 bp, Unknown
  gut microbiota DNA sequence
tatttccgatcattaaaaagtggttgtattccgatcacgacattttctacagagagctgatctctaacggctgcgatgccgtgaccaagctgaaaaagctggacatgatgggagaatattctcttcccgaaggttataagggacgtgtggatgtcatcgtggatcctgagaagaagacactgaccttcaaggataacggtctgggcatgaccgccgacgaagtggaagagtatatcaaccagatcgcattttccggtgctacggatttcattgagaaatataaggacaagagcaattccgaccagatcatcggtcatttcggactgggcttctattccgcattcatggtagcggatgaagtacatattgatacgttatcttacaaggatggcgccaaggcagtacactgggagtgtgacggcggcaccgagttctccatggaagacggagacaagaccgatgtcggtacgactatcactctgttcttaaatgaggattgcctggagttctgtaacgaatataaggctcgtgaggtagtgaagaagtattgttccttcatgcctacggagatctatctgtccaaggcgaacacaaaggagacgcagatcatcaaggaagaggaaaagcttcccgatgatgaagtcctggaagagatcgagccggagaagaaggaagcggcagaaggtgaaaacgctgaagctgctgagggaacagaagagcctaagaagctgaagatcagaaagcgtcctgaattgatcaacgagacacagcctctgtggaccaagcatcccaatgagtgcacgaaggaagagtatctggacttctaccgcaaggtatttcaggattacaaggagcctctgttctggatccacctgaatatggattatccttttaatctgaaaggtatcctgtacttcccgaagatcaacatggagtatgagtccatcgaaggtaccatcaagctgtacaacaatcaggtatttatcgcagataacatcaaggaagtcattcctgagttcctgctgctgttaaagggtgtcatcgactgcccggatctgcctctgaacgtatccagaagtgcattgcagaatgatggatttgtcaagaagatcgcagagtacattaccaagaaggtagcggacaagctggcaggcatgtgcaagacagacaaggaagagtacgacaaatactgggatgacatcagtcctttcatcaagtttggctgcctgaaggatgacaagttctgtgagaagatgaacgattacatcctcttcaagaatctggacggcaaatatctgacgctgccggagtgcctggagatcaagcctcaggatgaggaagagaacaaggaaaatgctgtagatgagaacggcaacaaggtagaagctgaggtcgtaggggataaatctgaagatgaggcttccggggagaataccgaggaagagaagaaggagaagatcatctactatgtaacggatgaacagcagcagagccagtatattaatatgttcaaggctgccaagatggatgctgtgatcctgacccacaatatcgatcagcccttcatctcccagttggagcagaagaatgagggaatcaagttccagcgtatcgatgcggatgtgaccgatgccctgaaatccaagacttccaagaaggctgaaaaagagatggaagagcaggcagagagcatcagcaagctgatgaagaaagctctgaagaacgacaagatcactgtcaaggtagagaagctgaagaacaagaagatctcttccatgatcacgctgtccgaagagagcagacgtatgcaggatatgatgaagatgtactccatgcccggcatggatatgagtgctttcggcggggagggcgagaccctgattctgaatgccaaccatcctctggtacagtacatcaccgagcaccaggacggcgagaacgcagaaatgatctgcgagcagctgtacgatctggcaaagctccagcatgcacccttgtccgccgatgccatgaccaagttcgtggcaagaagcaatgacattatgatgctgttgaccaaataaaaatgacggattaaaaacaaagggaatcacaatctgggaacggtttgtggttccttttttgggctacacggcggcttggggacagatgcagaccggtaccggaattagtatttagtgaatgcatatcacccgtctgttaatcaagtagatgtatgatgaagacaaaacggatagaagttagtctgcttagtatatgggaacatgcacatatttttctgactttgcatattctgtaaggaacatttgttgcctgaccggatcaagacagacaaaacggcataggcagaaaggacctctgtccatggacactacttatacaggaacacttcagatcagcgttgtctccgctctggggatgacaccgatacccagcgcgatcgtcactgtctcctataccggggatccggattccccgctggagacgatgactactgacgaatccgggcaaacccctacgataacactggatgcgccgccaagagagctttctttatctccggatattacggcacagccctattcggagtacaacattcaggtgactgcagaaggctttgaaccggtactggtatctggttccgaaattctggcaggcgaattttccctacaaccgatccgcatgaatccgctgaatgtaacagaggaggaagaaaaagtagtagtaatacctgcacatacgcttttcggagagtatcctccgaagattccggaagaagaaatcaaacctatgaacgagaccggggagatcgtactgagccgtgtggtgattccggaatatgtgatcgtacatgacggtgtcccggaggatcccactgcccggaattactgggtgcgctataaggattacattaaaaatgtggcctccagcgagatttattccacctggccggagagtgcaatttatgctaatattctggtcattcaatcatttacgttaaaccgtatatatacggagtggtacaggggacgtggatacgattttacgataacttcttctacggcgtatgatcaaaaatggatctatggcagaaatgtgttcgaagagatcgactatctggtagattccatttttaccaactatttgtcaaggcccggtgtacgacagcccattttcacatcgtattgtgacggtaatcggactacctgccgggggctgagccagtggggctccaagtcattggcggatcagggatattccgctattgatatcattcattattattacggcaatgatatgtatatcaattccgcagatattatttcgggagtgccttcttcctggccggggtatgatctgactatcggttcttccggggaaaaagtccgtcagctgcaacagcagttgaaccggatcgccagaaattatccggcgattcctacgttgacacccgacggaatctatggctccggtactgcggaggctgtccggacgttccagaagatatttaatcttcctcagaccggaatcgtggattatcctacatggtttgaaatctcggatatttatgtgggggtgacacgtatttcggagccggatgcgtagtaaatgggaagttacgcgagcaatgagccgcgtaacttcccatttaccatgttgtaacaagtgtaattccaacaattttcccggacaagcataaaatccgcttgacagataaaaataaatcacgtattattgtattaaataaataatacagtaaaacaacaagacaatgagggacccggggaggcatcgatagaaacgatgcgtgacaggtaataagaaacagaaaataagaaacaagaaaggatgataggaatggcgtgggaattggatgctgacagacccatatatgcgcagctggtggagcggatccagaaagagatcgtgtccggcaaatatcagccgggagagaagctgccgagtgtcagagatcttgcggccgtggcggcggtgaacccgaatacgatgcagaaagcttttgcggaactggagcggagcggcctgatcgtgacacagcgcaccagcggcagaaccgtgacggaggacactgagctgatcgggaataccagagaacagctggcagccgggcatgtccggaattttatcaacaacatgcaggaactgggatatcagagagaggagatccggaatctcttcgataaggtacaggcctgacaggggtgcaaatttatgatgaaaataaagaaaggcggaaatagaaatgaataatctggtagaaattgtaaatctgaccaagaaatatggtgccaatgtggctgtgaacaatctgaccgtaagtctccccaaggggaagatcattggcctgttgggacccaacggcagcggtaagacgacactgatcaaaatgctgaacggtctgctgacaccgacggaaggcaccatcatgatcgacggaaattatgtaggaccggcgaccaagagcaaggtagcttatctgccggaccgaacgtatctgaccatgaatcagacgatccgggagatcctggatttctttcaggacttttatacagacttttccagggaacgtgcggaagagatgttaaagagtctggggatcgatcctgcagtgaaaatgcggacattgtccaaaggtacgaaggagaaggtacagttgatcttagtgatgagtaggaatgccagcctgtatattttggatgagccgattgccggtgtggatccggcagcgagagattacatcctgcgcaccattatcaacaactacaatccggaagccaccgtgctgatctccactcatctgatcgaagatgtggagcaggtgctggatgaagtgatcttcatgcgctatggtcagctggtgttatatacatccgttgacaatatcagagaagagaaaggtaagtctgtagatgcttacttcagggaggtgttcgcatgttaggaaagttaatgaaatatgaatggaaaaatatctggaaagccggtacactgatgcttctgggaatgcttgtggtcaccgtgattggctgcgtggtattacgcatgccgggaggagtggtaacaggacttctggacaacaatgatataaatgcgacacagagctggtttgtactctcatcctttgtggcaacactgatcctgtatgtgatcatgctgttagcgtccacctggggcatgttgatctttctgggcatccgcttttaccgcagtatgtatacggatgaaggctatctgtcccacaccctgccggtaacagctaaccagctgtttttaagcaaggtactggtctccggtgtctggtatctgttcattacgataggcatcggtatctctgtggtggcactgatcgtgtctctgatgacaggacttttaaatatcggtgaactgagtagtgtactgacacaatataatgggaatatctgggaatttatggcagatgctttttatgaacttggcagaacatacgaagaagagatggggatcaatctgtcgcattatgtgatcacgttgctcttaacctatgtggcaggacctttcattaccatggtcactctgttcggagccttgacgatcggtcagctgtcttccaaacacaaagggttcatgggaatcctggcatatgccggcctgacgatcctgtcttccatcatcggcagcaccgtacagagtgccttcatgtttggcacaaatgtcatgagcagctccggcggattttcggtaacgaccaatatggcctatgacattaacgtgatcaccagcctgctcattgccgccatcatgtacggcgtatcttattacatcatgaaccgaaaattaaacctggactaaccgggtctacaccttgccctcaactggtaaatttggtataataaatccaaatgacaacagggaacgggtgaaggtgcatgcaggagattattgatagaattttaggaggaaacttcgattatgagaacggttctttggaattctcctgcgctaaaatagagatttccctgtcacaggggacaatatatgagggctcttttcacattctttctgcgtcggaaggctatgtaaagggatccgtgatctcggaccatcttcggatggaatgtatgacggatcagtttaccggctccgatgcagaaattttttactgcttccacggagaagatctggaggaaggggatgtgatcaagggctctttttccgtaatcagcaacagaggagaatacaatcttccttttgtggtgacggtggagcatgggatgttgaattcttccatcggggctatccggaatctgttccattttgccaacctggcgaagaacaactggaaggaagctgtgcggctgttctatgatccggaatttctgcggctgttccaggggaacgatgcccatttctatgacagttaccggatcctgtccacttatgagggcaacgaacaaaatgtagaggaattcctgatctgtatcaacaaaaagcaacagctggaattcctgacggaagagaaagaactggtgaaaaaactgcctcgcagcgcagataattacggcgtcacggagaacaatctgaccatcgtgaggaacggctggggatatacgaatctccagatcgagtgtgagggtgaatttgtctttacggaaaaggaaaacattacagacgatgattttctgggaaaccgttgccgcctgccggtctacatcgacagcagcctgtgcagacctggcaaaaatttcggtaaagtctacatatataatgcttatacttcactggagatcccggtcatggtacagctgggagacggtgtagtggcccggcatgcggatcacagtcatatgcagtgcatcacccagatcatgaaatattatgaagaatcgagactgaaaaagatcggtacgggaacctggctcgcggagaccggcaaactggtggagcgcatggtgaccatggatgagaaggatgtgccggcgagactgttccaggcacagcttctgatcacagaggaacgctacaatgaagccggatggatcctggatcacgcggcggacatgttggaagcccggggagctaccggcggagaacagtgggcttactatctgtatctgaccacactgatccacagggatccccagtatacactgcaaatggcggagcaggtggaacagatctaccgctatgacaggacccgctggcgtgtggcatggctgctgttgtatctgtcggaggaatacaatcgttcaacctccgggaaatggatgttcttagaaaaacagtaccagtacggctgcaccagtccggtgatctacctggaagcactggcccttttgaacggcaatccggcgctgctacgtaaattgaacagttttgaactgcaggtgttgaacttcggtgtccgtcaggatgcggtaaacgacagcctgatcgaacagctgttgtatctgtcgggaagagtcagagagtattctccactactgggcagaattttacgaagactgtatgagaaaaagaaggatgtgcggatcctgcaggaggtgtgcagccttctgatcaagggaagtaagacgggaccggatgccttcacgtggtatcagatgggtgtggaaagccatctgaggatcacgaatctctatgaatattatatggcgtcggtagatctggatgctgtgctggagcttccgaaagtgattctgatgtatttttctttccagagcaatctggattatgaacatagtgcgttcctgtatgcgtatctgttaaaacaccggaaagattatgaggaactgtacgaacattacgagccgagaatggagcggttcgtcattgaccagatccagaagcagcatattaacagacatctggcaatactgtatcaggaattcctgtctccggccattgtaacggaagctatggcgaagcctttgtcccgtctgttgtttgcccatatggtaagagtggatgacagcagaatgcgtaaggtgatcgtcagccagccggggaatctgatactgtccgagacgcctctgcaaaacggcacggcctgggtggcagtctacgggaatgattataccattgcttttgaggatgcatatggtaacaggttccttaaaaatgtggaatataccctggaaaaactgctggtaccggggaaatatctcagacttctggaacattatgtgccggatacggcagaactggatctgtatttcatggagaacggcagaacagaagagaccatatcttccacaaagctgatgcggatggcaagactggtggaaagcgatgccgtggagccgaagctgcgcagtgagattgcggtacagctggtacaggcctatttcgacgcggataatttgcaggcactggatgaatacctgcaggagctgcggggggacggctttacggaggaacagcgggaactgatcctgcgttttctggtgctgcggggaaattatgagaaggcatatgcctggatcgaagcatataccccttattttgtggaggccaagatcctgttgcggcttacggacggtgtgatcacgcagtcggtccatgagggagaggcagtcctgtatgcggcggcattgacggcgttccgtaagggaaaatacaacggtggaattttagagtatctggtgcgttatgccaccggtaccacgaaggaattgcgtgacatctggaaagcggcaagatcctttgagatagactgctacagcttaagtgaaaagatattgctgcagatgctgttctccggggcatttgtgggagagcggatggatattttccgttattatgtatcccagggagccagacaggagatcgaggaagctgtgcttgtacagagctcttatgattatttctgccgggagaagatcacggaggaatatgtattccgggagatccgtaactgctatctgcggggagaagagacccagcggatctgcaagctggcttatctgaaattctatgcggagaataaggacaagctggagcgggaagatgaaactctggtccggaatttcctggaggaaatgatgaaggaccacattcatctgaactttttcagggaatatcaggactgcctgccacagctgcaggagatgaaggacaagactatcgtggagtatcacacaagaggcggcgtccgtgcaaggattcattatgtgatgatgcatgagaacgggcaggcggaggattacctgtcggaatatatgcaggaagtatacagcggtgtatttttcaaggaattcgtactgtttttcggggagaatcttcaatattacattatggaagaatcagagaacgaagaacagctgacggagagcggaagcctgcagaagagcgatattatgaatgaaagtccggacagcaaatacgagatcatcaatgatatgatgatcagcatgacactgcaggacgatacgacactggatcatctgatcgaggaatattaccgcagggaatatctggatcacagattgttcacattgcagtaaagataaaaaagacagcaggagaggaggcggaagaacatgcgactgccgggaagtgataaagttatagtgggttatgacctggggaaggattatgcgcagatcagctgctatgtcacaggcagggaagaagagatcaccacattgtcttccgttgcaggctcacaggtctatacgattcccctggtcctgagcaagagacagggagtcaaccagtggttctatggaagtgaagccctccggcatgcggaggaagaagagggaatcctggtggagcatcttctgaagctggcaaaagatggggaaccggtgcagatcgatggaacgactctggatccggtggcactactgactctttttctcaagcgtagtctgggaatgctgtcccagatgacttccacagagcggatcggggccctgatgatcacctgcgaggaactggatgcaggaatgctggaggtgctgacgcaggcagtggaggcattacacctgaagacggatgctgtctgttttcagagccatcgggagagcttttattattacaatctgtatcagccggaaaatctgtggaagcaggggagcgtgctgtgcgagtatagggacagttccatccagacttattatatggaatgcaaccgccatacgatgccggtggtaacgtacatcgaagagcgggaattcccttttccggtggaaaaatcggatgaaaagttcctggagatcgccacacagctatgcgagaaccggatggtgtcctcggtatatctgatcggggaagagttttctcaagaatggatgaaagaatcgctacgctatctgtgccgtggacggagagtctttcaggggaacaacctgttcagcaagggtgcctgctacagcatgatggagcgactgcatcccagtgaaaacggacaaaatcatgtctatctgggacaggataaattgaaatccaatatcggtatgaaagtgcgcagacagggagaggaatcctatcaggcactgttagacgccggaatcaactggtacgaggcgcagaataccatagagttttacctgctggaaggaagagcggtggagatcctgatcacgtccctgacgggaaagggcagccggatcgccagaatcgtgccggaagaattgcaggaaggaatcaccagactgcggattcaggtggagatgaaggatgaaacacatctgcaggtggaactggaggatcttggttttggcagcttccgaacagctacgcatcatatctggaaggaagaaatagagttgtagatctgcccggggcagagaaaatgaggatgaaaaatgaaggcaagtctgtgtgtaggagaatattgcgagaatgcctataatgtggaaggcctggatatccgggtctatagtatggaagagttgtgctattgcctaaaggagaatgcattcctgttagacctgtccatcatgaacgataagctggtggactggatcggagaagaatgtaaagtgtgggaactggcaaaacagctctaccccatggtacataagcagggatccttaagtgtgttcgtggtgacgatcctgcaatatgtggggatgtacgatccggaagaaatcctgcaggtggagcaggtactgaagcagggagccggactcagcaatctggagaaacgcaagagccagatcgactatatggtggaaaaaagaaaatatgcggcagccatccgtggatatgatatgctactggagacctggaaccatctggaacaggaaggaaaggaacttccggcgggaaaagtccgggcggcgatcctgcacaataagggtgtggcgctgacagggctgatgttttatgacaaggcggcatattactttaacgaagcttggaagaccgatccggacagagaacacctggatgcctatctggcggcaaagagaatggaactgacggaggatgcctatgtggcatttgcagcgcagaatccggaaaattatacggagtccctggaactggaaaagcggatcgagcaatttgaacgggaatgggaacagcagccggagtaccgacagctacggctgcgtggtgactggcgggtgaacgacagggtgaaatacgatgcggaaaatgagagactgactcaggcactgaaaaacagttaccggacaagtgtcagcgtatagagaagacagcaggagagaattatggcgtggtggaaccgtttatttaagaaaaaagaaccgatacagcaggaagaggactgggaacagctggtctatacccgcaacggtgtgaattttgatgaggaagaccagagaaaacgttacattgtaaattgcctggagcagatctcagaggcttccaaggagatcgacctcctgacgggagagtatacgctggtgacttcttatctgacggatacggatgagattgaggccctgccagcagagcagagagaagaggtcaaccgggtggccggcaagctggccgggctggaacaggaacgcagcagataccgggaaaagaagaaccgtatgcgtgatgcggacttctatgcgatccgcaaaagagagaacgagattgaagaaggcattcagaagattcgggacggcgagaaatacggcaatctgataaggcaggatctgcacagactggacggagaacgacatgcctacgaataccggagaaatgagctggagaatctgatgaacaaccaacggggcatggctgtcattttccttacggcattgatcgtctgtgtgatcatgctggtgatcctgcagtatgcttttgaaatggatgtctatgtgggactttttctggcagtaggtgcaggagctgtagccatctcctatgtctgcatccggtacatggatgcaggacgggaactgcagcgggtggagaagaccatcaacaagatcatccagctgcagaataaagtcaagatccgctatgtgaacaactgtcagctgatggaatatctgtatctgaagtacaatacggacagtgcagcaaagctggaaaaacagtggaaaatgtatcaggacgaaaaggaagagcggaagcagttcgcagaggcggaagctaagatcgagtactaccagaagcagctggtacagcagctggccggttaccgtgtgcagatgccggagcgctggatcagccagacagctgcgcttttggacaagcgggaaatggtggagatccgtcacgaactgatccagagaagacaggtgctccgtaaacagatggactacaatcaggaagtagcagagagtgcaagaaacgaagtaaaagacatcgcagccacctatccgaaatatgcccaggagatcctggccatggtggagcggtacgaccgataaagaattgacaagacacctctcgttgtgttactatgacaccgtgttagcaatttaccatgctaaagtatacgacgcggccaacagtgagtggcagaacgggaggatgtattatgaaaagagtattagtggcattactggcaatcagcatggcagcaggtgctcttaccggctgtggttctaaaggatctgagaaaacatttaccgtaggtttcgatgcggaatttcccccttacggatatcgtgatgacagtggagaatatgtaggctttgacctggatctggcagcagaagtatgcaagagacagggctgggagctggtaaagcagcctatcgactgggatgccaaggatatggagctttcttccggggccattgactgtatctggaacggtttcaccatgaacggcagagaagatgcctacacctggacagagccctatatcgacaacagtcaggtattcgtcgtagcgtctgcttccggtgtacagaacaaggaagaactggcaggcaaggtggtagcagtacagaaggattcctccgcactggctgctctgaacgatgaagaaaatgcagacaacattgcactgcgtgattccttctcccagctgatcgaatatgcggactacaataccgctttcatggatctggagcagggtgcggtagatgccgtagccattgatatcggtgtggcacagtatcagattgcgcagagagaagaaggaaaattcgttatgctgcagggcgaggacaataagctggctgtagagcagtatgcagtaggtttcctgaagggtaatgatgaactgagagataccgtacagaagacactggacgaaatggcagcggatggtaccttcgcacagatcgctgaaaaatggggactgaccgacagcgtatgtctcggtaaataatcaactaaggatagttaaggagtagaattcatgagtttgctgaccatgagtgcccaactggcagagggctttctgataacggtggaaatatttgtactgacccttttgttttcccttcctctggggctgatcgtagccttcggaagaatgtcaggatgtaaggtgatccgcattatctccaaaatatacatatccatcatgagaggaacccctctgatgttacagatcatcgtggtgtattttgctcccttttatgtattccgcatgcaggtgggaacggggtatcgtttcccggcggtgatactggcattcgtgatcaattatgcggcatattttgcagagatctaccgtgcgggcattgagtccataccggtggggcagtatgaggctgcggaggtgctgggctacagcaaggcacagactttcgtgaagatcattctgccgcaggtggtgaagcgggttctcccgccagtgaccaatgagaccattacgctggtcaaagatacctccatggcatttaccatttccattgcggaaatgttcacggtggcaaagcagatcggagcggcacagaccagtgtgcttcccctgttggcagcaggtgtgttctattatatcttcaatctcgtggtggcttctttcatggagtatctggagaagaagacatcttattacagataggagcagtgcggaaatatggtccttttggaaatgaatcatgtgaaaaaaagttttgacggcaacggggtgctgaaggatatatccctgaaagttaacgaaggagaagttgtctccatcatcggcccctccggttccggcaaatccacattgcttcgctgtgcaacgcttctggagaaaatggacggtggtgagctgatctatttagggcagacggcagcttcggagaaaacggataaaaacggcagaatacagtgcgaatatgcgtccaaggcagaattacataagatccggaaatgtttcggactggtgttccagaattttaacctttttccccattatacggtgatgaaaaatatcatcgatgcgccgatccatgtggataaggtaagccgtacagaagccgtggcgagggcggagaagcttttagcacagttgggactgtcggataaggcagatgcctacccttaccagctgtccggcggacagcagcagagagtatccatagccagggcactggcactgcagcccaggatcctgttcttcgatgagccgacctcggcactggatccggaattgacggcagaagtattaaaggtgatcagacagctggcaagtgaacatatgaccatgatcatcgtaacccatgagatgcagtttgccagagaagtatccgaccgcattattttcatggaacagggtgtgatcgtggaggaaggttctcccgaagcactttttacaacggaaaatgcccgggttcgggaatttatcggaaagttgcagtaaaaatatattgattttttttcgcaaatctgtttatctattaggtgtgggtgtatcttgcccacacctgtttcaataaaagactgaaaaacataagaatgcgaggactgatggtatgagcgtacaggaaatgaaaccgatcaaggaaggcaaagttcgtgagatctatgacaacggagacaccctgatcatggtggcaactgaccgtatcagctgctttgatgtgatcttggacaacacagtaacaaagaaaggaactgtattgacccagatgtcgaaattctggtttgatatgactgaggatgtgattcccaatcatatggtatccgctgacgttaaggatatgcccgaatttttcagacagccgaaattcgacggcaacagcatgatgtgcaagaagctgaacatgctccccatcgagtgcatcgttcgtggatacattaccggaagcggctgggaaagctacaagaagaacggtaccgtatgcggtatcaagcttccggaaggtctgaaggaggcagataagcttcccgagcccatctataccccttccaccaaggcagagatcggagatcatgatgagaatatctcctatgagcagagtgtggaatatctggagaagcgtttccccggcaagggcgcagaatatgcggccaagcttcgtgactataccatcgctatttataaaaaatgtgcggattatgcactgaccaaaggaatcattatcgcagataccaagttcgagttcggactggatgagaacggcaacatggtactgggggatgaagtattgactcccgacagctcccgtttctggccggtagacggctacgagcccggacatggccagccttcctttgacaaacagttcgcccgtgactggctgaaagccaaccctgaaaaaggctggaagctgccggaggacatcgtggagaagaccattgacaaataccttcaggcttacaagatgctgacaggcaaggatctgtagggtacggtttttggttttttttcacggggcaggcaggaaaggtaaggcttacaagtgacggacaacatttatattcagacagaaaataatgacaaattaaaggaagaatgtggcgttttcggcgtgtatgatttcgacggacacgacgtggcatccacgatttattacggccttctggcattgcagcacagaggccaggaaagctgcggtattgccgtcagtgacacgaatgggcccaagggcaaagtcttaagcagcaaagacatgggactggtcaatgaggcatttacaccggaacagctggagaagttaaaaggtgacatcggtgtgggacatgtccgctattctacagcgggaggatccaccagagagaatgcacagcctctggtactgaattatgtaaagggtactctgggactggcccataacggtaacctgatcaatgcgcctgagcttcgaagagaactggagtataccggtgctattttccagaccaccattgattccgaggtcattgcttatcatattgccagagagcgtttgaattccaaatcggtagaggaagctgtgggcagagccatgacgaagatcaagggagcctattccctggtggtgatgtctcccagaaagctgatcggcgccagagatccttatggatttaagccgttatgcatcggcaagagagacaatgcgtattttctgtccagcgagacctgcgctctggatacggtaggtgccgagttcgtccgggatgtgcttcccggtgagattgtgaccatttccccggagaagggaattgagtccgataccacccatgtattaaagcctgcggagaccgccagatgtatttttgagtatatttatttcgccagacccgacagctttatcgacggcgtcagcgtatatgattcccgtattctggccggaaagttcctggctatggattccccggtggatgcggatctggtcatcggcgtaccggaatccggcaactgcgcagccatgggatattccatgcagtcgggaatcccttacggcatgggcttcgtgaaaaatgcctatgtgggcagaaccttcatcaaaccgaagcagaagagcagagaaagcagcgttcaggtcaaactgaaccctatccgggaagccgtggagggcaagcgtgtcatcatgatcgatgattccattgtccgcggcaccacctccgaccgtatcgtaaagatgttacgggaagccggagccaaagaggtacatatgagagtcagttcaccgccgtttctgtggccctgctatttcggcacagacgttccggcgagagaccagctgatcgcatataaccgttccatcaaggagatcagtgatctgatcggcacggacagcctggattatctgaagattgagagactggaagaactggtgggcggtaatcttggcatctgcaagggctgctttaccggaaaatacccgatggaaccgcctgcggaagatatccgcggagaatttgacaaataaacaataactattcagaaaaccgcagaataagaaaaactgatacgtcatgcctgcatgtaagtagcagttttcttatttgtaaggtgactcgagtagagtcaccatcccacacatgaacaaaattagctgcgaagcagcgggaaagtatgagaagcatacggttttgtgaatgtgagggatgggttttgaatagttgcaataaattagaaaataagaggagcagacaaatgagtacaggtacagacagatatcagagcccgttatccgaacgctatgcaagcaaggagatgcagtatattttctccccggatatgaaattccgtacatggagaaagctgtggattgcactggcagagacggaaaaagagctgggactgtcccaggacggtaagcccgttatcacagatgagcagatcgaggaactgaaggcccatgctgaggacattaattacgatgtggcaaaagagcgtgaaaaactggtacgtcatgacgttatgagccatgtgtatgcgtacggacagcagtgccccaaggcagccggaatcatccatctgggcgcaacctcctgctatgtgggtgacaacaccgacattattgtgatgaccgaggcactgaagcttgtcagaaaaaagctgatcaatgttatgaaggaactggcggatttcgctgataagtataaggcacagcctaccctggcatttactcattttcagcctgcacagcctacaaccgtaggcaagagagcaacgttgtggttacaggagttctcactggatctggaggatctggatcacgttctgggtaccatgaagctgttaggctctaagggaaccaccggaacccaggcttctttcctggaactgttcaacggagatcaggagaccatcgacaagatcgatcccatgattgcagccaagatgggattcaaggagtgctatcctgtatccggccagacttattcccgcaaggtggataccagagtagcaaacgtgctggccggtattgcggcatccgctcataagatgagcaatgacatccgcctgttacagcatctgaaggaagtggaagagcccttcgagaagaaccagatcggctcctccgctatggcttacaagcgtaatcccatgagaagtgagcgtattgcttccctgtcccgttatgtgatggtggatgcgctgaatcccgccattacttccgcaacccagtggttcgagagaacgctggacgattctgccaacaagagactgtctattcccgaaggctttcttgccatcgatggtattctggatctgtgcctgaatgtggtagacggactggtagtatatccgaaggtaattgaaaagcacatgatgagcgagcttcctttcatggctaccgagaatattatgatggatgccgtaaagttaggcggcaaccgtcaggaactgcatgagcgtatccgtgagctttccatggaggccggacgcaatgtgaaggtagaaggaaaagagaataacctcctggagctgatcgccgcagatcccgcattccccatgggactggaggaactgaaagcatccatggatccgtccaagtatatcggacgttccaaagagcaggtggaagctttcctgaaaaatgtgatcagcccgatcttagaggccaacaaggacttactgggtgtaaaggccgagatcaacgtataaacgttttctgctgaagtaatttgtggaaacgaaaactattcagaacctcattcatcggtgatcttttgatgtttacatggctctgaatcgttacagaatgataagaaagcaggagacgaaaatgggtggattttttggagtcgcagcaaaagaagactgtgtgtttgatctgttctttggaacggattatcattcccatctgggaaccagacgtgccggcatggcagtctacagcaaagaagaaggttacaacagagccattcacaacatagagaatgcaccgttccgtacgaagttcgacaaggatgtcaatgagatgcacggacatctgggcatcggctgtatttccgattttgagccccagccgctgatggtgcgttcccatcacggaacttatgctattaccactgtgggcaagatcaacaatacggatgccatcattaaggatctgtttgcgaagggacattctcatttcctggagatgagcggcggtgacatcaatgccacggagctggtggcggccattgtcaaccagaaggacaatctggtggagggcattcagtacgcccaggagatcatcgacggttccatgaccttactgatcatgacacccaagggaatctatgcggccagagataagatgggccgtactccggtggcagtaggcaaaaaggagggggcttattgcgtctcctttgagagcttcgcttatctgaatctgggataccagcccgtgagagagctgggaccgggagagatcgccgtggtgacaccggaaggtgtacgaaccctggtgaagcccggcagggatatgaagatctgtacgtttttgtgggtctattacggatatccgtcctcatcctatgaaggcatcagtgtagagaagatgcgttatcaatgcggtgccaagctggcggagcgtgataatgtaaaaccggatatcgtagcaggagtgccggattccggtaccgctcatgcagtgggatatgccaaccgttcgggaattcctttttcccgtccgtttattaagtatacccccacctggcccaggtcctttatgccgacgatccagacccagagaaatctgatcgcaaagatgaaactgatcccggtacatgatctgatccaggatcagagtctgttgttgatcgacgattctattgtccgcggcacacagttaagagagaccacggaattcctgtaccagagcggtgcaaaggaagtacatatccgtccggcctgtccgcctctgttatatggctgcaagtacctgaacttttccagatcttcttccgagatggatctgatcacccgccgtgtgatcaaggagattgagcaggagggcagagaaatcgatctgaagaactatgtgaatcccgatactccggaatacgaggagatggtaggacggatctgcaaacagctgaagttcaccacattgcagtttcagagattggatgatatgattgagtccgtgggcatcggcagagagaagctgtgcacctactgttgggacggcagagaataatgcgaaaagaacttctaatcactcagagcataggctctttcgtgaagaagttctaagtttcgcatggcaaaacgctacgcgttttgaatatagatgtaggttatataaaatataataaatattgattttacttataccacaaagtgttgtatactgtaaaacggtgtgagaaagagaagcaggagtttctttggatcacccggaacaagatattggatgtagatttatcacagaaactgtggtaaagaatggaggaaaacatggtaaaggcagttgtaggagccaactggggcgacgaaggaaaaggaaagatcacagatatgctggcagagaaagcggacattatcgtacgttttcagggcggcgcgaatgcaggacataccatcgtgaacaattatggtaaatttgctctgcacacccttccttccggtgtattttacaatcataccaccagcgtgattggtaacggtgtggcattaaacattccgatcctgatgaaagagatcaagtctatcacagacagaaatgttcccatgcccaagattctggtgtctgatcgtgcacagatggtaatgccttaccatattttatttgatcagtatgaagaggagagactgggcggtaagtccttcggatctaccaagtccggtatcgcacctttctattctgataagtatgcgaagatcggtttccaggtaagtgagctgtttgatgaagaactgctgcaggaaaaagtacagcgtgtcagtgagatgaagaatgtcatcttagagcatctgtatcacaagcccatgatcgatcccgcagagctgttaaataccctgcatgagtatcgcgatatgatcgcaccttttgtatgcgatgtatccgcattcttagataaggcactgaaagagggcaagaccattctgttagagggccagttaggaaccatgaaggatccggatcacggaatttaccccatggtaacttcttcctccacgttggcagcttacggcgccatcggtgcaggtatccctccttatgagatcaagcagatcgttaccgtaagtaaggcatattcctcttccgtaggagcaggtgctttcgtatctgagatcttcggtgacgaagcagatgaattgcgtcaccgcggcggagacggtggtgagttcggtgcaactaccggacgtcccagacgtatgggatggttcgactgtgttgccaccaagtacggctgtcgtctgcagggcgctaccgatgtggcatttaccgtactggatgcactgggatatctggatgagattcctgtatgtgtagggtatgagatcgacggtgaagttaccactgatttccctgttacctacaagctggaaaaggcaaagcccgtactgaaaaagctccctggctggaagtgcgatatccgcggtatccgcaacttcgatgaactgccggagaactgcagaaagtatgtggaattcattgaggagcagatcggattccctatcaccatggtcagcaacggcccgggaagggaagatatcatctatcgtgagagccctttgaagaaataaatgctgtcaaatgcggagagataggataatctttgatggaaaaaacatctgtaaaatgtgaatgagaatggaaagggcatggtgctggtatgagatcagcccgtgtcctttttagtatacgatgaatccggcaggaattttgattacacagtatctggctgaatgcaaacattcgtagaacgcagttttgcatggctctgaatagctacagatttttactgtgaaggaacaaaaaccagtgtctgatagtaattttgagatggagacagcgagatatgatcaataatctggaagcgtataaagtattttattatgtggcaaaatgtgggagtgtgaccaaagcggccggggaactgtcaatttcacagccggcggtcagtcaggccatcaagcagctggaaaataccctggatgccgccctgttccaccgggcggccaagggagtacggctgaccagtgagggagaactgttgtattcctatgtggcaaaagggtacgaacagatcgaaatgggtgtgaagaaggttcaccagatgcagaatatggaactgggagaagtccgcatcggtgccagcgatatgacattgcagttttatctgcttccctatctggaaaagttccatgaacagtaccccgggatcaaggtgatcgtcaccaatgcgccgacaccggagacattgaattatttaagagagggacacattgacttcggaattgtcagtacgccgtttccggagagacctgatattcagatgataccggtgcgggagattgaggatgtcttcgtggcgggaagaagatttttcagctacaagaaccggacgctggattttcagaaactggaaagtctgcctcttattttcctggaaaaaaataccagcagccgcagctacatggatgaatttctggcgggaaacggggtatatgtgcagccggagttcgaactggccaccagcgatatgatcgtacagtttgtgagacgaaatctgggtgttggctgtgtgatgcgggattttgccagagattatgtggaatccggcttgcttttcgaacttagattcaataaaataataccgaagcgtcaattctgtgtcgttaggaacacgaagatgcctatggctccggcggcggagaaactgttggagatcatggagctggacagacaggaagaagcgaagatataaaagtgacggcaaaaagaggatataccggcggaaacggaactgctttgactagtaaaacgaataggagagaagagttatgatacgcaatataatttttgacattggcaatgtgttgacagactatcgctgggagggatttctggcggacaagggatttgatgcggaaatgatcaaaaaaatcgcaaaggcatctattatgcatccgctgtgggcagagtatgaccgcggtacctggacggacgagcaggttctggctgcatttgtaaaggatgcaccggaactggagaaagaactgcatcaggcgttcgagaatatcgctggcatggtaacccccagagcttacgctattccctggttacaggaactgaaagcaaagggataccatgtgtattatctgtccaacttctcacacaaggcagagacagaatgtgcggaagcgttgaatttcctgccggagatggaaggtggcatcctgtcctacaaggatcagctgatcaagcccgaaccggagatttaccagctgcttctgaaacgctatggattaaaggcagatgagagcgttttcctggatgatacgctggtgaatgtgaaggcggccgaagaacagggtatccacggcatccacttcctgaccaaagagcaggcggaagaggaactgcgtaagctcggcgtggactgctaaatggttcgtagcggag

SEQ ID NO: 5536 - DNA, 5213 bp, Unknown
  gut microbiota DNA sequence
cggcagtttctggctcaaagccagtgccagcgtaaaggtatgctgggctaccatggcggtggaataatcgaccacatttgccaccttgattcctctggacctgcaatatgccagatcacagttgtcgtatccggtagcaagctcacagatcagcttcacattggggcaatccttcagggattcctctttcatgggagccttgttgcagacaatgacatccgcatcgcccacacgctctgccacttcctgtgcagtaacggtattcgggtaactggtcacttctcccaattcattaaagcagtccaccggcacatccgtgccggcgctgttcctctccagtaaaacaatcttcatctcttgcaatttctcctgtcttttgttttcttttcgtaatagcataataacatagtagaataaacgatttctccgggctatcgccctacttacttattccatcatacagcaacagcgtaatgaaatcaattcattacgctgtccttttctgcttttgaaacatattactgccggagtgatcccgcctctgtggcttacaatctcttcagcagttcttctctctgtgcctcataaccgggcttgccaagcagagcgaacatattcttcttgtagctctctacaccgggctggttgaaaggatttacacccagcaggtatccgctgacaccacatgcgaactcgaagaagtagaacagctcgccaagatagaactcatttacctcgggaacggttaccatgaagttgggaacctgaccgtcggtatgtgccagaatggttccgttcatagcgctcttattgacgaaatcaacggtcttgcctgccagataattcagaccatccagatctacaggctcctcgccgatcgtaagctcctctctcggagtgtcgatattgatcacggtctcaaacattacacgggaaccgtcctgaatgaactgacccatggaatgcagatcggtggtcaggtccacgcttgcggggaacagacccttgttgtccttaccttcgctctcaccgaacagctgcttccaccactcacttacatagtgaacagcgggctcatagttcgccaggatctcgacactcttgcccttgcgcagtaagatgttacgcagagccgcatactgtaaagcatcgttctcttcgaaatcattctccagggcacgctttcttccgctggctgcaccttccatcagcttgtcaatatcagcaccgctgacagcgatcggtaacagacctacagcggtcagtacggagaaacgtcctcctacatcatcgggtactacgaaggtctcgtaaccttcctcatcggacagatgctttaagcttcccttcgccttatcggtggtagcataaattctctctgccgcacccttcttgccatatttagcttccagcttctccttgaatacacggaaagcaatagcgggctctgtggtggtaccggacttggagatcatgttgatggagaaatctctgtcgcctactacatccatcaggtgctttagataggtggagctgatggagttaccacagaagtagatctccggagtcttacgtacactcttatccagtacattgtagaagctgtggcttaagaactcgatagccgctctggctcccagataagaaccaccgataccgataaccagcagaacgtcggaatcactctggatcttcttcgctgctgccttgatgcgggcgaactcttccttatcgtaatctacgggaagatcgatccatcccaggaaatcattgcctgcgccggtcttggataccagggtctccttcgcatccagggtaagcttcttcatgtaaccgatctcttcttcagaaataaaagagccggccttggaataatcaaatgtaacttgtctgctcataatgctcctccttatatcttgcagatatatcacgcattcttgcgttacttacttaaaaaatccgtttttattttaacaaagttacatctcattttcaagacatatctatagatccggggaatgttttctgaattctttcggacgtctgacattttccgctatactgtaagtaattcctgaagcaatgcctgtaattcttcctccgtgactctggcgggatcctccggtctctgcggcagcactttttctcccggcttttcatgtgcggcattttctacggaaaatacttctctgtccagacgatctcccgtttcttccggctgcgccattctgctgcggatcggcatcagttccaccgtccgcctgccggaagctctctgctgtcgtcctctcgttcttcctgccgcactgatctcctcccccaggcttcccggtccgtaaagtctttcataatcctgttccgtgacagagatccggcccgacagatgattttccagataatctatgagattcgtcttcagaaccctgcgtttccccttgatatccatcatggccgacagagaaaaatacagatacatccctaaaaaacttactatgtaaaaaggcaggatttcccccagcatccttccgcccatgatccccttgcagatcccgacaccggcaaacacaatggaaaacagcatgcactggccggacaaatgataccaggcatcaaaggataggtgtccaaacgccagccggttgaggaacttgtccacaaacaccggaatgtttgatactccaccatttaactggtaacaatttgcaaattttactttacactgtttcaacaggcggttattcgtcgttgccatattatctgtctcttttatcatcgtatggtaaaatcctgccagaagcagacgcaccagaatactaagtcccagaaataccagaattccggttgtgatcactttttcttctttgaaaatcgtaaacataacctgcgctcctttctatcgcttccttagagtataacgtattagaggcttgttttgtacgttttttcatcgtcattcttctacgttgccgaacagaaaaagtatttcttttacatttttcgtgaaaagaaaaccttgtacatattgttgtataaatgccgaaaatctgctataatcactccttagaaattcagtttgaaaaggatggttttacatatgatatacaagacaaaaggtacctgttccacttcgatcgatgtagaattaaaggatggtgttattgattccgtaaaattcaccggtggatgcaacggtaatctgcagggaatcagtgctctggtaaaaggaatgaagccggaagaagcaatcagccgtctcaaggggatccgctgcggtttcaagcctacctcctgtcctgaccagctggctcatgccctggaagaaatgatcgcacagtaatctcaccgacaagaaggattttattatgaaaaaaatcgtattgaccggcggcggaactgccggacatgtaaccccaaatattgctttattaccggcgctgcaggcggccggctatgaaattgcctatgtgggatcttatgaaggcattgagaaaaagctgattgcggatttcaacattccctacacaggcatttctacgggcaaattccgcagatacctggatccgaagaacttctccgatccgttccgtgtcatgaagggatttgtggaagcgagaaattacctgaaaaattaccagccggatgtagtcttctccaaggggggcttcgtaagcgtcccggtcgtccgcgctgcagcttccttacatattccctgtatcatccacgaatcggatatgacaccgggactggccaacaagctgtgcattcccgtagcagaaaaggtatgctgcaatttcccggagactatgaaaaatatccctgccgacaaggctgtcctgaccggttctcccattcgtgcggagctggcacagggcagccggctggccggactgaacatgtgcggctttactgccaataaacctgtcatcatggtcattggcggaagtctgggtgcagctaacgtgaacaaggctgtccgcgatgcattgccgaagcttctggaggatttccaggtagtacatctctgcggtaaggacaaaatcgacaacctgttgttaaatacacccggatataaacagtttgaatatatcaaggcggaactaaaggatattttcgccatggcagacgtggtgatttcccgtgccggagccaatgccatctgtgaacttctggcgctgaaaaagcccaacattctgatccccctgcctgccgccagcagccgcggagaccagctgttgaatgccgcttccttcgaagcgcagggttattccattgtgctgaatgaggatgatattacgacgaatctgctggtggataaggtacatgagctgtacttcaaccgccagaattatgtagaagccatgagccgcagccaccagatggatgcgatcaacacaatcatgttgctgatcaatgaagccgcaaacaagagtcatacgcaataatgtcatgtattgattgaggggattattttgaaaggattattggaaatctgctgcggcagcttcgaagatgtgaaaaccgcctggcaaaatggtgccgacagggtagagcttaacagtgcactgtatctgggtggtctcacaccttctacggccaatctgatctgtgcaaaagagcagtgcagcatccctattgtaacaatggtccgcccaagaggaggcggcttctgctattcccaggatgaatacgagaccatgctcttagatgcccgcatccttttagagcacggagctgacggtattgctttcggcttcctgacagaggaccatgccatccataggaaccggacacaggagatgatcgacctcatccatagtgtcggaaaagaagctgtatttcaccgggcgtttgattgtgttgcacaacaggaacgtgcggtggaagcattgatcttacttggtgcggaccggatcctcaccagtggtggtgcacccgatgtatggtcgggcagaacgcaattgcaaaagctacaaagccagtatggtaaggatatcacatttttagccggaagcggcgtgaatgcacaaaacgtaaaagctctgatggaatatacgagcatagagcaggttcatacatcctgcagaagctggcagccggatgcgaccgcctccctgcaggacgtggacttctcttatgataacagccggaagaatgcatatgaagcagtagctgccggaaaggtgaaggaaatgcggacagctatgcctatattg

SEQ ID NO: 5537 - DNA, 699 bp, Unknown
  gut microbiota DNA sequence
ctgatattccttggcaatctccctgctgcgggcagtcagctctgtttcatccatttgctgctcattcttaaaatgcacataggctcgataatcagcggggtcatagccgctccatcctttcagggcttctttggaaagaaggatggaagatccatttacctctttttccttatagccttccataatgccagtcaccgtgtattctccgtgaaagctctcgctgcttagcataaccttttcgccaatcccggcgtctgcagcatagttggaaaggaaataacggctcaccaccacctcatcctccttttggggcagtcggccttccagcagcttcatctggtcacgggcaatatacatcgtttcctcatcacaatagatataggaggcattgtatccctgctctgcaggttccacagccagcatataatactctcctacccttgagaagtcatccagccccttcagggtggacacatcttcttcggtaatcctggtatagaccgcctcataggtatcctccacatgatttttctctatctgccgggtagacaaagccatcacaatcgaaaaacaaatcagacaggatgccagcgcaacggcgatcaccaccatgagattccgacgcttctcacttttcaaactttttcttgccagtttcctgacaatatttcctgtatcattttcaaatggtactgtcat

SEQ ID NO: 5538 - DNA, 505 bp, Unknown
  gut microbiota DNA sequence
ctcagtaatcctggtatagaccgcctcataagtatcctccacatgatttttctctatctgccgggtagacaaagccatcacaatcgaaaaacagatcagacaggatgccagcgcaacggcgatcaccaccatcaaattccggcgtttttcgcttttcaaactttttcttgccagtttcctgacaatatttcctgtatcattttcaaatggtactgtcattttgatcatctcctttaagtcttatatttctgctgtcagcaaagcggcggcttcacatcggaagccgccgcttctggttagtccatggtcttgatccgctctacaagggaaagccgtttagagtaacggacagcaaccacagagaaaattccggtcacgaccaaaagtgccagaacaaaaacaaccgtttccatcaaagggaattgataggacagttccccaaaaatattaaagctgctgatcacatagtcaaaaatccagcccaggattccgccaatgccaactg

SEQ ID NO: 5539 - DNA, 1464 bp, Unknown
  gut microbiota DNA sequence
tgcgatcagcatacgggaaacctgctttccggtcattcccacagactgcaaaatcccaagctcctgctgccttgccagcagattggtcatcagggtgttgaccagatttaccatggagaacacaaacaggaacgccagcagcagataaacaccgcgggtcatcatctttagctgcgattccagggatgccgcatggtctgctctggaaaagaccgtcagcaccggattttccagcaggctgaaaatagacgccctgagcgcatccgagtcctccgaggtatggacattccaaacggcctccctgttctcaatatccgggtagagttgatcggccagttcttctgtaagggtaaacaggccccatgcgccggtgcctgatgttactgacggtttcgcaatccccatgaccgttacttctatggccttaccgtccatggattcaaaggtcagcacatccccgaccgcaggcgtatagccataaaacatacttaaaagatggtcttccgaatcagtcacgatcacaccgttgtttgcggcaagctcctcataatctacgctgccctgttccagattttcctccggcagccattgttccatctgctctctgtcaaatacagggaactttaatgcaacactttcctgggggaatttcaccgttgcggatgttacttcatggctggtgatagattccacaccatctatggcaagaagctcctgacgaagttcttctgtcaatggattttcacgcgcgatggcaggcaatccttccgcgcctcccgaatccatccagctgacctcatagttgcagtgatctcccatagcttctatcgccatcttttcgggactgatggagttaagtaccgtagcggctgttaccagaaacacacccgtcaatcccaaagataccagagtgatgaccgtctttttcctgctccgcctaaagttcatctgtgccatagagaacggcgtaatgcggtggtttttctgatctttccggtctgttgccgtttcataaccactggagcggaccgcttcgattggggataccctcgccgccatgcggacaggcgcatgaatggacagaaataccgtcagggcgcaggctgctgcggtcgcagccagatagggcagattgcccatccagctccaatgtgccgggaaaatggcaaacccgatggcccctccaaccaaaagccccagcgggataccgcaaagagataacagcaatccctcccgccgcacgatccgccggatctgttttggtgttgtgccgatcactttcaggcgtccatattcccgcattttgccctttacggaaatgaaaaagatactgtaaatgaccacggcacaggcaatcagcaaaaggattgccacgggaatgtaatatttcatcacgccggacttaaagccctgcatatcgaaatagttggaactgtaaaaaatctgatcctctgagacatcgtt

SEQ ID NO: 5540 - DNA, 1323 bp, Unknown
  gut microbiota DNA sequence
ttcctgacgaagttcttctgtcagtggattttcccgtgcgatggcaggcaatccttccgcgcctcccgaatccatccagctgacctcatagttgcagtgatctcccatggcttctatcgccatcttttcgggactgatggagttgagtaccgtagcggctgttaccagaaacacacccgtcaatcccagagataccagagtgatgaccgtctttttcctgctccgcctaaagttcatctgtgccatggagaacggcgtaatgcggtggtttttctgatccttccggtctgttgccgtttcataaccactggagcggaccgcttcgattggggataccctcgccgccatgcggacaggcgcatgaatggacagaaataccgtcagggcgcaggctgctgcggtcgcagccagatagggcagattgcccatccagctccaatgtgccgggaaaatagcaaacccgatagcccctccaaccaaaagccccagtgggataccgcaaagagataacagcaatccctcccgccgcacgatccgccggatctgttttggtgttgtgccgatcactttcaggcgtccatattcccgcattttgccctttacggaaatgaaaaagatactgtaaatgaccacggcacaggcaaccagcaaaaggattgccacgggaatgtaatatttcatcacaccggacttaaagccctgcatatcgaaatagttggaactgtaaaaaatctgatcctctgagacatcgttggcagaaaggaatgctgcaatatccgccttgagctgctccagctccatactatcagcaccagtataacgaagccgaaattcaaacagcggctctccctgcgccatctcctccacaaatgcttcagatacataaagctggaacatacgggagtcattctccacatccatgataccgctgacggtataggtctgctttccgtttccaagattcacttctatggtctgcccgacttctgcggggatttcaaaataatcaagaaatgcccgttctaccagaatttcattggcagcctgcggaagtgtcccagtaaaggaaggcttcttacccaattccatccagttggcatccgcatactccacagtcagaacgctgtcaccatagcgggcagaaccgtaattctgggaaaggccccagcgttccacttccgggcagtctttcagtctttcaatcgtatcacggtcacaattcaccacaaccgcctgatactgtccccgaatgtccgcctccagttttctgtcacttcccgctcctgcacaaaaaatcgctgccatcaaagcggctgccagagc

SEQ ID NO: 5541 - DNA, 637 bp, Unknown
  gut microbiota DNA sequence
ctcctggcgaaggtgctgtatatcctccatccaacgcattcagcagcgaccggatttcctgttcaggactttgcagcaatgctgctttatatcgatgcacattcaaaatagtcctttccacttccagcacagcttgcgccagattgatttcggcttttgtataggtaggttttcctttcattgcagccttcatcatggcagtcgaaggttttcccaaatgctttgcttcatcaccacggccattttctgctttcggacgtgttgcaggtttgcctcctcccaccatcatagccatcattccctgcggaacttggagtgaacggtctatgagacgagccttttccaactgttcagacgtaattccggttacctgacaaaccagagcatcgtccgccacaacctgaccggctaaaatacgggctaccagactgcgggccggcgacagataacgggccgtaaaaagactttttttccgttcggcatcagtcactgcctttccgcgtatcttatccagcgccaacagactgtaggctacggggtccaccgtcatggcatacacactgctcgtaatcctgtctgcttcgtaaggcacccccatcgtatacagctgaccggttattttttcggttgctagttc

SEQ ID NO: 5542 - DNA, 1660 bp, Unknown
  gut microbiota DNA sequence
aagagtgaaaaataaagtagatttttgggcgcacttatataagggttcataaaaccctgtttttacaagtatagaaagcagaaaaaatgttagttatcgttgcgtttcactaacttagagctgtcgtaaccaaggctttcaaggtaagcaaacacattgttctcattcaagacgacactctctacatgattctgagggtccatcaattcctcatagtcagtaggggtaaagggcttcttttctgaaaccatgtggtaaatacagaccatcatcattcttgcaatggcaatgattgcctttttgtgtccacgtcgctttttgattcgaccatatttgattgcaaaataaggctgctttttgctcttaattgcagcaagggcacattgaaccatcattggtttcaggtaatcgcctgctttggcaatgcggacagactttttcttaccagcggattcattgttggcaggagaaagtccgcaccaggaacacagatgttttgcatcatcaaaaatatccatatcaacgcctgtttctgcaagaacaatcgtggaacttaactctgtcatgccgggcatggtactgacaaactccacgaactcgtaataaggcttgatgcggacatagagttccacttcggtctgggtaatcatatcatcgagatattccagatgcccccgggcaagctctagttttttagcctgatctgtttcaatagtgtagcctttgatggcttcgatgatttcatcagacttggatttagcccctttctttatgagtttgcggacagctttttcatccatggaatcggcagtatgctccaatagataagagatgatttcagttgctgtcttgccaaaaggatcagaaagaacactggcaatgccgacattggaaatggtcatacagttctggatgcgattcttctcggaagacttcatgcagaccagcttgaaacggtatctggaaagttccctaagctgacgaaaatcttttggaggaataaaggaacatctgacaagatcaaatttgtagaggtcggcaatccatttagaatcctttttgtccgttttcttgcctttaatggctttgacatacttcggatgtgtaaggcagacatcaatgtcattttcgagataattaaaaataggaatccaatactttccggtggattccatacaaacatgatagcaattattctcgataagccagttgtgaaacctttgaatatctgagttgatggttgaaaaagatttttgcagatattcggatatgccgtccttattggtagttacgatggttgcaacgataacatttttgtggacatcaagtccacagcagatggagtattttaacttcatcattaagtatcaccaccttaataaaaagggaatagcaacattgactgtcatcctgcgactgaataaacatggtttattaccaatgataagagtccgggctcaatgtcccacttgtttgtgcttgtaaggatgacggcacatataactatacggggtcgaaataaattcgccacttctccttccgtgctctgtagtgtattgctattccttgaaagaattataaatcaaagagtggaggggcacaacatttttcataacttgtttgtgccttgagcgaagcgaaaggaatgacaaaaactatg

SEQ ID NO: 5543 - DNA, 1636 bp, Unknown
  gut microbiota DNA sequence
aaacaaatacttacctttataagaataattgaaacgaacagcaaatgacattttctgtgtttgagcaaaatcagactcaacatgctgcgatgcgccggatgctaatcgccaaaatgaccaacgatctaccatttgaccactagctgcagctaagctactatcattttgattcttattccaagaagtaataacagaaccacctatattatgatcttttgcaatagtagtattataagaaagaatattctcccatgtataattccatgcgttcttattagtaatagcagcatgaggtgaacctgcataactaggtctattagcattacattgatctccccaatattgtccttgacgagaatcactgagcgtaccattaatacggcttgtaaaagtaaaatcttttattggactcagttccaaataaccactaacattcaaataagtggaacgagtattattcacatattgatcttcaataaaatcacctaatggagaatattgtcctgtaatatattcatgatttattttcccattttgatcataagcatctcccaaaggaaatgatgaaagaccttttgtaaaggtatttctcactccttgatttctatcttgataagttagattagaagtaaagcccattttagcccaagagaaaatttcttgatcaatattcaatcgcaatgaatatttattaagattgtcattactcaataaaccctcttctctattataagaagttgaagcaaatatcttagtcttctcactaccccctgaaacagaaagactatatttttgggttgtagctgtattacctgaggcttcatcaatccaatcaatccactttccagcattataggcatccgtataatcttgattaccaaataaagcagacatatcagaagggtaatctccattcttatacttataagcttctctttgataattcacccattcatctccaaccataccatgcttataattaggtgaaccactgaaaccataatatgcatcaaagtttacagtagcttttccttccttcccacgttttgttgttataatgactacgccattagctcctgctgaaccataaatagcagtagaagaggcatcttttaatacatccacactctcaatatcagaagggttcacctggctataactcccaggaataccatcaataatgaataacggttcattactaccataaatagaacgagagccacgcaacaaaatagaaacatcttcaccaacctgcccgctagacttcacaatatccatacctgcaatttttccttgtaaagcctccatcacattactagtaggagcaactgtcacatcttcatttttcatggaagccaccgcaccagtcaaatcacgtttcttcacagtaccataacctattaccacaacttcatccaaagcctgtgtatcaggttccatttttatatttatcagactattattcccaatagtaatttctttagtcttataacctatataggaaatctccaatatattctttccactaggcacttcaagtgtataattaccatcaaaatcagtaacggttcctatagtcgtaccctttaccaacacagaaactccaatcatagactctcctgtttcatccaagatt

SEQ ID NO: 5544 - DNA, 1331 bp, Unknown
  gut microbiota DNA sequence
cctccaggcagtcacggataacgcttaaatagtgatccatggcctgtcttctggtcatttttaatttcaggaaaatatgataatcggaacagctgaccagaatgccagtctccttcattccgatctcttttaccagcttaaagtcctccttgctggcacggatccagctggtaacttcggggaacttgtatcccctctccatacatttataaacagcgtctctgtccttcttgctgtacaggaaaaattcactggcacggatcattccgttggggccacccagttcatgcagatagtcatagatctttacgatctgctctgtggtataaggtgctctggactgctgtccgtctctgaaggtagtatctgtgatccagatatcctttggcatgttatgaggcacgatacgatcattaaaaggtattttggggatttcggaataagggaacatgttacggaacacgttcggcttctccacatcatccagtatgtacatatgctcttcaatctccagaaggttgttcttcggattcatggagaccggacgattctgaaatgcatcactttctctcattggtatacctctcttccctgacattcgatatctgcaagattttataatttttactctgcgcagtaaaaatacattttgcagttctcgtatcattgtatacaatcataccatatgtgtcaatatctttggcatttattttgttgacttattttaatcatattttctatttttcccagtgattttatccttttacttgttttctaataatctccgtacattgagcatgccgaagccctgcttgttccacggctctcccagatcggtagctgtaagggacagcagacgaacaaattcttcattggtaattcccggatatttttccatagcaagggctaccgccccggatacaatgggtgttgccatggatgtgccgctttttgctacatagggtctgtagattctgccgttctggttctgccagaaagcattacaggacagaatccttgtccccggagccacaatatccggtttacgggtcacatcatatcttctgcccctgccggagtacgtctcacaccttccgggatcatttttacaatatcttccgtcatgacaacccaccgtcagaacctttctgctactggccatctccgaaatactaccgtcctccggaccggtattacctgcagcgcagaccacgagaatattatgatcccacaaaaattccagagattttcgcagcatctgctccttgtaacgttccttcaggtctccgatccccacagagatattcagaacacggattccatacctgttt

SEQ ID NO: 5545 - DNA, 5526 bp, Unknown
  gut microbiota DNA sequence
tctcgtataactgccccaactgcgtcatcgtacgttccttagccgcatccagccgtttcagttcttccgctgtgttgtcgatatggatcctcttaacgagactgtcctttttcttcagaacactgacaggtccgatcgctgttcccttatatacggattttccaatatatttttccattttctaccttccaaactccgttgcgcaggtcttctcctagaggttctcgcggaaaaacttctgaagctctgctgcggcggtatcttcatccgctccttctatcgtgacttccacattgtctccgtgcttcacacccattcccatgatcgccatcagcttgcttgctgcagctgatttccccttacaggaaagtgtcactgtactctgatactttttcgcttccttggcgagcattcccgcaggacgtgcatgcagaccgatttcatccttaataacatagctgaactgtttcatcgacaacattcctccctattttatatttcttgctttaattatgtagcatattgtacatactttttgcctgtcgagcttattatatatacatattacccacttttttattgtttgtctacatcacttttgataaattgtatatttttgaacattatcgtaaaattttgtaaactttttaataaaaaatttgcttaaaacaggcacatcagctgagccgatgtgcctgggttttttgatatgatttcatatgattccatgtaagcacccgtcatggagcttacagcatgctttttaatcttcatcttctgtttttcccgggattccatctgatgcctgtgtcatcttcctgtactcatactggggaagaaaatcattcctgccgtaggcatcataataattcatgaatatccgctgtaaaatatccgggatatacgattcttctgcttccaccagtatgatcaggtgctggagagagctgtatcgggtgcatatatcgttcttccggatattttgccggattgctttctccatgcactccattgctttatcgatatgatcaatgtacatcgtctggtctgattttgcatccatggtgaccagcaccagataacagcggtgccggtatcgttctcccaggctgcttacatattgatacagtctggcaaactcacgatagtcaagatctaatgctcctgtatagcttccgctctccagcaatgctccggcgattacctccaggtcattttttctggcctgtgtatccagctgctgttcctccagctcctcataaaaccggtaactgtttttaccgttctgtttgacataatacaacgccttatccgcttttatataatattcttcaaagtttcctccctgtctgcacatgcacagaccgcaggacaaggatgccggtgaagtctccgccgtgacattttttgccgcaccaaagctgtcaaacagctttcttatccgcatgctcatctctgcttctgatgcctccggcagatagaacaggaattcatctcctcccagccggcagaccactgcgttctccatgcactctgtgagcattgctcctaccagcctgagagcacggtcccctgccttatgtccatagacatcgttgatcttcttcagattatccatatcgacaaaccccagacagccatcatgctcctgcattttctcaaggatcagcttttcacccttatgacgcatgggaagaccagtcagataatccaggctttccctggcctctctctgcctggccagctccagctcgcggatgcggtccattgtctggatcagcgtaacgaccagcaggaccaccagtccggttgcgataaagatcccggacaatgacaccactcgatacaccgctgtcacttccagcatgactgcgatcatggcagctaccagtccgatcagcggaagcttgtaatgtttcgccgttcccttgatgagatcccggcaaatggtgataaatatcgtcaggaacgttcctgcgatcactaggtgggacaagaacattgtcgagataaaatctgcgatattcagtagctgtaaggccgtgcatagtacaaaattcacacaggtgatacactctgccacatgatagaccttccggtaccttccctgctgcacactgtcaatatagaacatgatcggaaccgggcagagcatcacaacgaagaagcacatattcgacagaatagaagcattggaaacaaacagctggcgcagcttcgattctcccagcatccacactgctcccaggagcatgcaccatcccaggtactccagatcaaatctcgtcttatatataatatcaagcaccagactgatgatcagcacgaccagtccggcaaacaacatcgtacaggcgatcagagttaccataaaatagcagtggaacatatatgcccagatatctgatttatccccacaatataccgtgttgacgacaccggaatacttgtcggtaaaggactgcagttcaatccgcacttcctgtcccgcatcctcgccggatgtctcgcagaacacatacccactggcagaatttttcccaaaaggtctggtattctccgtatcatacaccgccctcagttccccaccgatgtaaatgcgcacattctccagagaggacctgatggcgatcgtattttcatgataatcctgtgggagcactgaccggatgaccagaggctctccggcaggcacatcacatttgcccggaaccgggatttcctctttggttccgtctgccagcacccggtaaaaggttccggtataagtaatgctttcctccgtgaccgtttccctttcacttgggtaaatagattgtcccaaaaggaatgccgcaagcagcacaagtattaccacataaaataaaattcttttatactttcgaatcgtatatttctcttctgtcaacttttctacctcattaaatgataccgggcagcccctgcttttatgcctatatccaggtgtagtccatgatctttcatccatttatgaataagtttatcacatgcagctggaaaaaataactatctattttcccccgtaaaatgtttatgaaaaattcattcgacaaatcatgctttccgaactaaaataggaatgcgatatgataatttcatgatcctatgaaaggagacaacatgatatgaagaataaaaaatattccatcgtttatagcagcttaacaggtaataccaggatgctggctgacgcagtccatgaagcattacctcaggatgaatgtgagtatttcggtgaggccgacactgtgatcccttcctccgaactgctctatatcggattttggacagacaagggaaatgcagataccaagacattacagctattatcgcagttaaagaataaacagatttttctgtttggaactgccggctttggtggcagcgatatctatttccggaaaatcctgagtcaggttaagcagttcgttgatgcaagcaatgttatcgtcggagagtatatgtgtcagggcagaatgccgcagtctgtcagggaacgctacctgaaaatgaaggaggctcccgatcatccggcaaatcttgatgtattgatccagaattttgactgtgcattgtctcaccctgatgccaatgacctggaaaaactgaaagaagccgttatgaattcatccttctgataagaccataaaataaggcagccccacatagctgagtctgccttaccttctttacttaacgttgatgcctttggcatattgttgtagaaaatgttcttttccacatggtctgccaaaataatatccctgcagataatcaaccttcatttctttcattttcagaagccattctctttcctcgatgccttctgcacatatcctgacgttaatactatgtaccatcgggatgatatttttatataattcataatccctggcactgttcatcgccttggccgtaaaatccctgtccattttcacataactcggattcatatcacggatacaatgaagatttgaatatcctgttccaaaatcatcgatcacgaaggggatcccgttcgtgtccaggctcttacggaatttgcagaacgatggtgtcatatccataaatccgctttctgtcatttcaacacataaacattccggctttaaagcatacttttgaatcacatccagaatatcccgctctacattgccctgcaggatctgaacataggatacatttacattcatccggaagtccggaatatatttctgcatttcacagcacattgctgcggcttcgttcaaaatatatcttccggcgggaatgatcaatccggtctcttccaataatgggataaactccatcggtgaaacaaactcccgtccctcttccgttatcatggaaaaacgcatcagcgcctctgctccaatgatctgttccgtctggcaatccacgatcggctggtagtatacttcaaagccatcataatggtttacaatagcattacgaagtgctgctacgattcttcctttttgcaaaaagacctcatagtcatcctgatcaaaaacatagaatccgtttttacccatgccttttgcctgtttcaaggcaaattcaaactttttgcggcattcttcggttccctcacaaaatgttgctgcatctacaacaccaatagaaatagaaaaaatagcttcataattttcggttactatgaaattatgaagtttatctgtgatcttttctttcagtgccacagcgtcttccgcggaagaggcgtccagatccacgatcacatactgatctgctaccagatggtaaattctctgcttgtccgaaaggcattccttcatacagccggctacgcttttcaggatataattaccataatccgctcccctggagctattgatcgctccaaaatcatcaattcctatatgcataaaaaagcccttggaaataggtgccttttgtgaacacaggtaagcaaggaattccggcccgccaagcagtcctgtaacattatcggctcttctcttgttgccggtctcgttcagacatccgaccagatactctgcctttccctgctgatcatcgatcacgataccacgacagttgacccagaccggcagaccttttttatcaagccacctgtaatgaagattatgtaccttttctcttccttcgcatatatccgcaagattctttgtaagcacctcgcggtcttcctcatatactaccttcataacttcatttgtagcatctgccaggagattttgcgatatatgaaaccgtttcacagccgattgtgaaatctcaaagatattattccgcagatcaaatatatacagataatcatccatacattctgtaatgatctcaaataagatttctgctgtctgctctccaaacaattgaaatatatcattaatcacaacaagaaccttcctcccggcagctgcactctattcctgccatttttctagaatagcttgaagatatttatgcggtcatgcatcttggctgctccctctgccagattaatactgattgcagtat

SEQ ID NO: 5546 - DNA, 22913 bp, Unknown
  gut microbiota DNA sequence
tgaagcaatgttttagtgcaacatcagataattgtgtattatcctttattgaccaccattacatcctatttcgactatgtaatcttagcgacttttcttaattattatactatatgtttttctcaaagaacacttcgatttatcgaacgctcccctacttaaaaggcaccgatattccaccgatgccttccttacaacgcaatatgtatctttttatccactattttccgggctgcctctgcacagtccaatgtaatttcccgattctctatatcgtagatttcagctccaaggattttgttgattccattattgccggcatgcaatattggcagtaattcctctgcttctgccgcgatcccttcattgtataatgcctgtaccagttttggggtgctgaacagaataacgcgttttccccagtatcttcggttcacctgtctgaaagcggcatctattttacccgcagcacccttatcatctgtaatcacacaaaatttcccctcttcttccggtaattttgcaaggacatgcagacataccgcaagcaattcttccccaaggttgtctccggattccttattgtttcgcacaccggagaaaaaacgcatataaaagtcctgcgtgtttttactcttctcctccacaatatttcgaaggccctcatcttcaagaagcgtctttgctattgtacttaccggactgttgatcatccggattgcccagatcaggtaattgttcacctgttgtctggaagaaaagcagctctccataatatcctgcaattattctcccgccatcccggctaccaccgtcacagattccttcccataatactccgcgcaggccgtatttacccacacatagccattctcgggctgcagatcggtatacatgagcagttccacataattcagcggtcggaataccggatttttcacggaatcatccttcagcaccgtgatccgctcttcccagccggcgccgtaggcctgtgcccagccgtttctccacatgcggtaggcacggtaactggtggtgctctggacattgccgaacagaacgactgctgccagaagtgcccccgtcactgcaaaataacgcaggaggtatttctgtgccaacaggtctgccttttcgctcttttccgctttcagaacccgctttgcgatccagccacaccagtacagtacattggccaccatccacagcacataaaaataccacaggatagctccctgcctgccgccgcccatggtgccgtccacgtagatcgttgcagtagcctgggaggcgtatactccgaaagtcagcgcagtaaacaggccggggaagcgaaactcatagttcatttttctgaccgctttccagaagaaagggatcagcagaaccagtagcagcaggaccttcagattcgtccagctgataatattcagaaaagttctctccagggacagccagatggccatcaaaggggaattggctgtgtagccgccgaaatttgcattaaggcgggtagatgtcagcggagaagtcacacacatcaatacgctgagtgtctctaacagagtcacgatccaggtccggcggaaagcatctttacggcagatcaggaataagatctgcagacagatcaacaggcacatggtggatacgctggtggaaaaattgttgccacccaccagaatcgccagcaggcaggccagcacggtaagcacgacccgctttgccttgccggtctcgcgaagcgcaatttccagatacagtgtcagcaggaccagtgacaagctatacacaaaagtgtaattcaccgaaccgttataccaataaaagctttcctccggataggggcagtaaagcacctggagaattgccatgggaataccgatgggcaggatcagccagcggttctcctttgcctggcccgcaatgcattctctaagcagcaggaactgggacaggatcacggatccgaccatcagatagggggtgatccggtaaaaatgttctccaaatgccgcaggctgcaaagccgacagaatcagtatggaaaatctggcttcccacacattttgtgccaatgtctggtatatcgcatgaaatacaccggcgattccttctccggcctgcattgcccggtacatattttttccgaaagaccagtcatccgcagagggataatcgtattttgcgatcgtaaacagcggccacaggatcaccgccagtgccaggatccacgcgatgtggatcaatatcattttctttcgttctgtcagtttcattggtataaaatatcctttcttacaatagatccggtgtccagtccatatctacatcacttccaccgctgtctccaccggaactgccgctgtcactgcttccgctatcgttgctgccggaatcactgccgctgtcatcatcatcgtcgtcatcgtcatcatcatcgtcgttatcctgcacaggttccggggtcggagccggtgtgggtgcaggggtcggagtgactgcaggctttgtcgcagcaggtttggtcgtgggctttggcgtggtaccgggattctgggtggctgcaggtttctgaatacttccaccggtcttgtctcccgacacggttccgctgccggtgatcgtctgcccatcgttaccggctgtactgttgccatctgcactgccggtgattttgccggtaatgcttcccgtgacgcttccggatgcagtggtatcatggttttcttcataagccgcaaaaggatcctgttttgccatttctctgaccgcaccggcgctgacccagtattttccgtcaaaccattgtacttctccgtcaaaaatacggatctgcggggtatcactgtctatggcacccgtggtgttgtccgctgcgttgccgttctctccgccgtccgtggcggcaccggttccatctgctgtatttgcattgttctctgctgtcatatcctctgtcacctcataggaagtgtactccgggcgggtctccagtccgatcatttccccgccaaagcgatagtcctctgcggtaatatccccgccgattccctgccacaggcagttctcaccggtagcatcataggcatagaggatcagatccgtataatctgttccctccagcagttttttcttgatttcttcggaaggctgctctgtcaggatctttccttcggaatcaaaacttcccgtgtaagtgatatattccataccctcccggttgctccagagggaatagacatccaacgcaccttctccggtatggacatcgcaggtatagtctccggcgagcacaccgccctgcatggttccccgttcatgggtaatgcttccggtagcgctgtccacgctccaggcttcgaaggtaccgttccagtccttcatggtttccggtgtatctgccagaggcgctgttgtatccgaaatctctgtcgttgtattttcccgggctctggcttctgtggttcccgtttcctgtgtggcatcgggattctcagtttctgccggatccgcgatgttctcgtccgcaccggccgctgtcactgttaccagccggatcgttgcaccctcctggctcagaaaacgtttcgtgtcacttccggtataccacaccctggagaagcattgtccctcttccgtatagccggtctgtacatagagcagaggctgactgtctctttccagatagtagtttcgctgtccttctttcagtttgggcatcatggtggtgaaccagtcctcgctgtcgatgagattcacgctctcacccagatactcggtcagctccagatcattttgcatttcctgtgcacggctgcggatcccctctgtctcttcctccagattcacgctgagctcctgtagagcagcaaatgcttcctcatccgcatagagccggtaatcctgttccagcatatcccgctgtttgcggatgtatcccgctctggtgtaggcatcggccaatgtcagataatcctcctgggtaaactctcctttattatattttgtctccagattgagaatctccagctccagctctgagagcatcggctgtgcctctacgggagtcacggcatccttcgcattttcatcactgccatctccgcaggccgtcagggatgttaccagaacagcgctcatggccagtgccagaaatcttgttgcttttcttttcatctttatatccattcctttcgcttcgctcaggcacaaaacgttatgaaaatgtttccctgagcctattttttctttataattcttcttatagggagctcggtatactacaaatcacggggaggtgagtgggctgtccggcttgccggatgaccgtatctttatatgtgtagtccgccttttcaagcacaaataagtgtgactctgagcacgtaatcttatctttgtttaaacattctcgtttatggcttaggcgttcagtcaatgccgtctctccctataattctttgaacctccggttcagaaaggagtccctatggctttaaaaatcgtgtacaaaatctgctgtggcattgatgtccacaagacttttgtagtcgcctgcatcgcttctacaaacgataaaggcgttacttcttacgagagccaccggttttcgacctacacgagcggtctgaaaactctgttacaatggctaatcgaccggaattgcaaggatgtctgtatggaatctaccggtaaatactggatccctgtttataacatcctcgaaaagggttgttcgattgtccttgctcatcccaaatatgttaaggctatccgtggaaagaaaactgacaagaaagatgccaaatggattgctgacctgtttaagcataatcttgttgccggtagctttatgcccccttctgacatccgccagcttcgtgaccttatgcgctaccgtttcaaactgacctgctttaaatcaagcgaaaagaatcgtttgcagaactgtctcacggtttccaatatccagttgggaaacgttgtctcggacaccttcggcaaatctgctcaggcgatactggataagattttggaaaatcccgcagatacttcctttgaccttgaacctcttgttttcaaaagtttgaaaaagaaacttcctgaactccgtgatgccattgatggatatatcaccccagaacaggctggtaagctcaaagtaatcaaaactcattacgaggaccttgaatcccggaaggcagagcttgaagaactcattcttgcgctcgccgctccctatcagcaggaacttgccattcttcaaacctctcctggtatcagcagtgatttcactgccatcggaattatttccgaaatcggtaccaatatggaggcttttccttcggcgaaacacttatgctcatgggccggtcttactccgactaacaatgaaagtgcagggaagaaaaaatctgtccgggtttccaaggccggatgctacatcaaaccgcttttagtccagtgtgctaacgctgttattaaaagcacaaagcatccagaaatgcgtaaccgttatctccgtctcaagaagcgtcgcggtcacaagaaagcaatcattgcgatagcaagaatgcttcttaccgcattataccacatgttgaagaacggagaaaactataatccggaactttaccggaaaaccgatcttcctccagcagggcgtgaaatcaccatagagcaggcccttatgttgatccgaaatcaaggttataaaatcaagtcagcaactacataactttaacatttctaatattcaatttttaaagcgaccaccgtaagatggtttatttgttatgctcccaggtttatggatatcctctacttctcattttcaatcttttgtcctatcttctatattctatgatgtcgagaccaaatgctctcgaccttgatacctgagaatcattccgtgctgtacgtttccactatcctgcccgatattcgcatatcattcctgtgcatcactgatcagttttcgcaggaaagcatccgcctccgagccctgtgcataggttcccatatccagtacctgctgtgccagagcatagatgctgcgggcctgcaccggaccgtaaatggtaatgtccttgccatccttgttcaggatgatgtatccgcggaatgcatattccaccttatactggttcgccggaaggccgaccagtacggaagtgaaccggtatctgccactcacggtctcataaatactgtcctgatgggtgccgttggcattcgtaccgtaagccagtccgctgatgactttttcgccgcctttgatcatgggatagcttgtccggttggcattgttcatgaccagtgttccgtattccttcagatgataaccgttcacaccatttcccagcagttgtgctctgaggtccgtactgatgccggtcttgaagcggattcccgcttttccggtaatccggatggaaaatccgtgataggtcagcagatccgtaagtcccggctgttctgtggccacataggcattgttacgatattccagggtccagacatacatgccgatgggcgctccgttctcattataccggtacacgaccgccgactgggcatttccgttcggcagtttgacgatacggcggttattccgcacctgtggtgtataggcaatgccgtccacatagatcgtggaagcatcgtaacccgacggtacctgcaataccacattggtagaggaagtcggcatcgggcaggggctggccggcatattttcatagaccggaatcttgaagacaaaggtattctccagcgctcccgcactttcatacagtttcttcatgctcagtgcctcactggtgggtgctgagatgttctgcatatactgatgggtatataccggattgctggcagtgggggatacattgaatttctgtaaatacagggtatcctggcccttacgtatgtagcttgcggagattacttccgctcctccaaggatcgagtagtaggctccatgccagtcatgatctttggcataattcaatccattgcggatcacttcttcattggtactgccggaagctccaacattgaaataattgtaataatgttcataaccgggataggtgccggagatcagcggggatgtcccctctccctgctcctgcagtactctggctgccagatggaacgggctgacctgccggttctcctccgcaccgatggaccagaaaatatggtagaatttcattgaggtctccggtgcgttctgactgctgttcatgaaggttccctcgaggaaattctttaccgcttcttccgtatgatagcttgcgttgtaggtcagctgttcaaactggaaaatagcattctcctgcagggaatttctggggtccatgtataatttcagtacatcttccgaagcgaaataccagttggggctgtgctgtccttccttgcaataatccccgtaactcttatagaccagactttttccaccctgcagttcgttgttgactgcggtctggaaatccagtccggtattctgtcgtacaaaggtccagttgggatgtttctgtttcaaagcctgcaatgccggccggtagctctccgggaactgctcgatgtccacatagacaccggtggcattttcctctgccagcataaccgccgctccgggattcatgccgtacagttcttcccattccagaaaacgttcatccgagcatgccagataatcccgggggatatatccctcgtagaccttgccctttacctcggcggatactttttcccagacctgatagtcttcatccaccgtcacatcccggatctccaccatctgtccactgggcacggtgaccacttttgtgctgtcttccgccgcttccgcgcggatcgtcagatcatcgcacagataaaccagtgccatgacctcccggtcttctacgatattctgcaaagcccctcgtgcttcttcgatccatgcctgatcttcttcatccaatgcatgcgtctgataggtattgccctcgtaggtgaatataaatgccgccaggagaattgctcccagaaatgccaattttctcttcatataacgtgactcattccttattttatggttgctgtgttgcccgttctatcctgcctctacgtcgtgcatcactctatgtgcttcagtttcttatgcagtacccggattcccttcggtgcaatggcaaacagtgtatgataacacttgttctttttggtaagccagggatttttcatggctctccaccagccgtgacgcaagtcacgcaccaccctgcggtagaatgcgttgtccccggtcatctgggcgatagggatgtgcagcagataatccagccgctggaagatcccgaaccggaatgcgatttccgacagctccggatattttttatccaccagtgcaagcaccatgtccgcattgtcgatattgtcggcgaatactctggagaaccggttcttgtctctggtattgctgtccggacgataaaatacatgatatgcctgtccgggaatgcatgcaatccccggaactgcactttcctcccgggtcagcatttttactaataaatgaaaatcttcattcagtgcccccaacggaaattgttctatggtaaacaggtccttccgcaaaagcttggtacagaaggagcagtctccgcggtgcatcagaagttccttcagaaaatcttctgccgggatcgcctgttccgttgccaccggctcgcagatattcggtaaaatattgccgtctttgtcgatttcatctctgccgacctgcgctacgggcattccggtcttttcgattgccccgtacagccgctcatacatatccgcatccacgtagtcatcgctgtccacaaagcccacatattctcccccggcctgctgtaatccgaaattccgggcggaagaaggcccgccgttctttttatggaagacgcggattctctcatcctccgttgccagccggtcacataatgccggtgtctcatccgtggaaccgtcatcgatcagcaggatctccagattttcgtaagtctgtgtccgcaggctttccacgcagcggggcagatacggtatgatattgtacaccggcacgatcacgctgatcagcggttgcttggttacactactgttcactgtttattctcctatacatagaccgctccgggattacaggggccggagagcaggggccgtcattccataattgtggaatcaccggggcaggtgttgtgatgtcctgcatcacatcctggccggcatccggcatttcctgttcttctgacatttctggcaagaacttcattttccggcacagttcgatcaatctttccgcagccgtccgggcattccattccccgacaatggtctgctgtgcgttttctcccagtctgcggcactctccgggatccctgagaagccgttccacggtccgaaataattcctgttcctcaccgtcccggtacatcctgccgttttctccctgacggatcagccagggagccgcgccgatcatatggtctgccaccactgcgcagccactgttcattgcctcatttaccacagcgccccagccctctttgcggtcactggtgaccagatagatttctgacttttccatggcagcccggacttcttccggaccttgaaaaccggggaaggtgatcacatcggtcactccgagttcctctgccaggcgatgcgtctcttcctccagttcccctccgccgatcatggtaatatgaaacgtattttcttccagatgttcttttaaataagatgctgttttcaccaccagctccggatgcttccagtcgatcatccgggccgcccacagaatactgcccggttctttgcgctcgaagggttgtccggccccgtactgtcttgtttccggaaaatagccgaaccgcagcattttgccggggtaggcatggatcaggtgataatcgcaaggcacataggctcctgcgcacaggaaatacaccggtgccttacggtatctggtgtgatccttgtatttttgcaacaggcctctcggagaaacagccttccattgcccttccttatataagcgttcattataacggaagatcggttttccggcagtcagtctctcctgaatatagctttcgtcatcgcatccgccgaagatcaccacatccgcggtaaacaatagtttctcaaaatcttccgcgtctgtgacggcgttgctgttcgactcagagccgggcgttttctcccccccagacttatgtgcacacgaattcttcgcagcgtagcgcacgtagggacgttcctcggcctgccagcccatcttcacccgctcttcttccatgggctgtgtctggaggaaacagaaatctccctccagcaattcatacagagcatcacagaagggcagctgatgatgattaaaatagtttgagacaaatatcagcttcattccttcctccctgctatgtttgcatagatttcctgcaattttgcgaaattctgctctttatcatgggtttttcttgcatgttctcttgcattttttgagtattccagcattttctccggagaactccacatttcgataacagaatttgccatggaatttacaatattttccaattcttctgtttttgtcgttttataatttcgcgtgttatttttgctttcagaagcatctgacgcatatttgtcattttcagccacttccgacagctgatgtccccggcaccacagaccgtcccttccgccatcaaacaggctggggattccccctacctccgtgctgatgcagggaactcccagaagcatggcctctcccagggaattcggtgaattttccagagaggaacaacacaggaacagatgacttttcagaaatctttccttcatttcttctccggtcagttttccgaggaagtgtaccctgtcctccagctgtccttcccggatcagtctgcgcaggtaacggccatatgccgatattttcagcttttccttcggcgtccggtatgccgtcagatcatttcctgccacatacacctgtacccggggatatttctcccggatctgtggcaaggcctgcagcagatagtgcagtcctttcagaggataatccgcctgactgacgaaaatggaatagggttcacagtgctccggctgccattgtccttcataaaaggaagcccgcagggtctcattcatcgtataataatgtgccttgggattccacgcggtagtcactgccctgtcccaggcggttcttccggtgatattgccggcaagtcctattgcttccctctccattacacctctgcgggcaaatttttcctgctggctgcgcagggtatccttcttcaccagatcccggaaagtggtcttgtggatctccgattccggcatatcggcaaaatatgcctccgcacacaacgtacagattccctgaattcccaccagtatcttctccttgtggggaaacacccggcatactgccagtgtgtgtggatattccgtgccgaaacagtggatcacatccggtgaaaagtcttccgtgatccgatgcagttcttcttccagcaacggctgatatctgtcggggtgtacggtgtcttcgtggaatccataacatgtgatattatatgtttcagcatctgtatttgtctgtaaatgctcccggtcttctttttcccgtggcattgctatctgcagtctccagggcacctccgtatctgccggcaccgggaatgccacagccagctccaggtcactggaattccccgcggctacctgctccaacagaccggacagccagccctctttattcgaagcttctttatgcaatgcttcggctatgaccggaagcatgatattgcagacccacagcactttcataaattaaatcctcttttaattaaagatccagtttagatacggaagcagccgtatctccacatcatacattccccgcaacagcattacgaaatacaatagatatgctgcaacaacgccaataatacacagggttcggaaccatccctttctggcatccttcagcacacccggaatcaggaaaatctggctttggatcaggtaatatgccactcgggatacttccgggataaaggagccgcaggaatagagcaccagtcccgccagattcagatagaagtaataacggtttctgcgattttcctgaacgctgtccttccaatagatcaggcacagtatcagcactgccagacatttggcgatgttgacataggataactgtccgttgtcgaacatggaatccttgtaatagggatagaaccggaagataatattccggtacacatcctgtccgaagatcagagataagatcagtaatacgccaaccgcatagtgccactttttcagccggatccgggacaagagatctatcacaatatatgccgggatgaccagcagtaccgatttgtggatcgtacagcccagcagcacccagagaagaaacttcccatattctccccgcagcacatatttctgcgcatacatgaccagtgccagtgcgaaatagtaacgtaccgaattcatactattaaagtaaaatccctgtgtcaataacagaaacagggaaaatacataccagtccgcctgatcatgcagtgccttcaggaaaaagaagaccgtaatcagggaaaaaaagccaaagatcggaagataagatccctctccgaaaatcagatggaaaaatttcaccagatacacaaagccggtttcgtaggagacatgccttccctgatcgatcagctgaaatttcagccagtagacccagtaatcaccgcccacagcaatgcggcaggcagaaaccccggccaggagacagaagatggcgaattccgccacagcattgcacgcctgctgtctgtccggcccggccgccatcagatccccggaggtattcccacgaaaggagcgtctgccggacagatattctgtcgtatagtcacgattttttaccagaaaaccgaatgctacggtaacaactgtcaatatgatatacaccagtgcgctcttctccatgtggaacctcctttctttatggccttttttccaaaaagcaagctatcgtcttcctgcctcccggatgccttcccgcatccactgttttgcctgctgcaggcttacctctgtgcacagcgtacccttatgagcatacaaaaaccgcagtgccagcggccattccagccatccatacagataatgatacagtactcctctgtcatggaaaaatttttcattatagccatgaaaccaggtggattccccggcttcctctctgccgatggtcaccggtgcggtatatacccggtatcctttttttataaactctgtcaaaaacaggctgtcttctccattgctgtattttgcaccgccgccaaacagcagggagaacgtaataccagattgcagcaggctttctctgcgtacagcaaaactgactgcgccataccgcccgcaattataccaacgtaccggtttccgttccgtaatatggtaggtgcggcgttcttcctccacctcgatattgaaaatgatcatatcggcccggggattccgttcaaactccgcaagaacagccgcctcataaccatcttcatacacaatatccgcatccgaaaaaaggcagatgtccccttccgcccgaagaatggcctcattgcggcttctgccgatgccacggtcgggaaaactgcagaaacggattcttccgttccccggagatatctgcatttcctcctgccccagccggtcgcactgattgatgatcaccgcgtccgattgcaggttcatatgttgtacggtctccggaagagaagcattcattaccgatgccagaacttctaccttcatgcctgctctcctccgtgttctgtattctgtgtctgtatggctcccggcagaaaataatagctgcagatcagctgttcatccgcattccacaggaaggctccgttcacagagcagtcctgggtatgcagatactctaataccgcttccagtctctttcccacccgttctccggccggcaccgccagcagaaatacatctgccttacgaagtgtctctccactctccgggcataacagcggactgggaaccgctacatattccaccggtattcccttccgggtcttatctgtcttagccagcttctgcaaatcctccacgacttccttcggatccgcttccggcagcgccacacatactgccacacggcagatttccgcattttcggactcctttgcctgctttttatcgtacactttctccagcgtatacatcagattttccgcaaatcccacactgcgcaccgttcccagactgttcagtccgtagcgtctgcgaagtgttgccggcagccagatgctgtcctgcgagatctccaccagcaaaaagaggactactgcaaaaaacagagacaataccgccgccagaatgactgcccgcaccgggcgcacatccggtaccacgacttctgcaaaatctccgtgatccagcactttgatccggtcgatctccacgatgctctctgcaaattcgtcacacatggtatcctccactgcatgggccagagcaatactcatctccggatcctgagttgccgcctgcgtcaccggaacgctgaaatccgagggaagtgttgccgagaggtctgcgatccactgatctctgcccagagacagtgcttccgaagctccattgtctccccgttccacagcctcctgcagatgcttctccacaccatccaggaattctcccgtatggatcatggtgttccatgtagcctcgttaatgtagtacgcacccgccgcattggggttctctttatattctaccttataagtggaagaagccgcataccctggatcgggctgcagcaccacattttttacataataaccgccaccgaacagtaatgttcccactactgtcacagccagtattttccacagattgcggcatagccgcagacacataagtctcaggtcgaagggctcttttccgtagcttacttccatgcgtctacctcctgccttctcagtcgtcatccttctcggcacgaccatcgtaggttgccttgaaagccgttacctgttcgctctccacaccctcggtactgtccggccagaacaataccttcagtgtcagaagcatcaatttaagatccagccacacagaataattctcgatatatgttaaatccagttttaatttatcatacggagaagtattgtactttccgtatacctgtgcgaaaccggccagtcccgctttcaccttcatacggaatgcaaactccggcatgacttccatgtactgtgcaataatctccgggcgctccggtctggggccgatgaaagacatatctccccgcagaatattgatcagctggggcagttcatccagccggcatttgcggatcaccttacccacgggagtgatacgcttatcccctttctgtgccagacgtgccacgccgtccttctcggcatcagtgcgcatactgcggaacttcataatatagaattccctctgtccggtggtgcagcgcacctgcttgtacaatacaggtccgccgtcataaagcttgatggcaagcgctgtcagaagcatcagcggtgaagtcaccaccaacaggatcaacgagcagatcacatcgatagatcgcttgatgaaccgctgctccatgctcagggagtactctctggtcagcaggataggcgtgtcaaatacatgcagttcctcggagccaactaaaataacatctgatattttaggcatgacatagacacggatggaatgggcataacagaatttcagaataatattgcgatccttttcattaatatcccagattactaccgcattgatctcaccgttccggtaattgtccagaatctcccgacacagttctgtcgtaccttttttaatgtgctcacattttgtgatcttatatttgtccttacggctttcaaatttgttgacaatgtcttcgatgggacgatcaccgtggatcagcaaaagctctctgggcgggaatgctgtacgatagatcttgttggcaatattggcatagatgatcaccgctatgatctgtaaaaataccatcaacaggaacatatccgccggaaaaatgctacgggccatcatacacagttccgcatagatcagcacatccgccatcagggttgcaaacacctgggagaaaataatctctgtgtttttcatgtatcccagacgcatgccgccgtaggtcacggagaaaaatatcaggattgcactgtagataccgttttccagcagaaagccacgataccagatcttctgcaggggatctaccagctggaactggaaatggaactgccacatgtaggcaaacaggctgatctccagcaacagacagatcatcgacaaccctatattgatcagacgcttaaaggattcccttttccgcagtcggttttcataataattaccgtttgtattcaaaacaaactcctcctatactctgcgttttacggcgcgtaccgcccagaagcagaaatgccaggcactgttcggcactgacatgccttccgccttacggtacagattccagatcctccgcaaagcttccagcttattcgatgacagggatttccctgctctccgatattttaccaaattttgatccaaaccacaagctacataaccctcccgcagtattctccaccacagagcagtgtcctcactcttgatctggggcatctgcagttgttctttcgacagctgttccatatcgaacatcacggtactggtaaagattgtggtatttttcaaagcttctttataagtaatcgtggccggcacacggacaatctttccggtgcccttgccattctcatcggcgaattcatagccggtaaacacaaaggctgcctgtttctctttcagaaaagccagctctttttccagcttgtccggtgtccacaggtcatctgcatccagataggccagataccggccttttgcttcgttgactcccagattacgtgctctcgccgcccccagattcgtagagtaagtcagcatgcggattctcgtatctccggttctctgaatatattgttctatgatctccctgctgcggtccgggccgcaatcctccaccagcagcagttcccagtgtggatacgtctgtgcccggacgcagtccatcgtttcttctatataacgttctgcccggtacaccggcaccacaatactgatcagttcctgttccattttgctttcctgttcctaattcttacaaatcgttatcgttttccctatctttccgcaagatgcctacttacatcacgatcaggaaatatccgccaaaggaccgcagtctgccgtccgcagcctcttgcaattccttctgtacatcctccgacaggtcctccggcaataaaatgtagtctataccggccttcccggcgctgtcaaggcacgcagcaaaatctatttttctgccaccggcttctgtcgtggtattttcatctgtccgcagatattccgtctccccggtagtctccaggtggctcatccacagatacatatcttcctgccaggtctcataggtatcataggagtagctgcccagcgatgcatcccagatgcttctgccgtataccgggtggatctcagcgctgtaggctctggcagcctccatgacctccttcggcgcccacagactgtattcccgtgagtttcctttttccgcattgtatacagaaagctgctccagaatttccctggcgggagttccctgttgctgtccgggcattcctgtcagtgccggtatctgcgttgtctgtgccacggtccattccgacaccgggtttccacccaggaacaggatgcccagcaggatcagcgcagccatcccgtttcgcaggcttttctcttttaataagttacacagaaagtccgttgccgcccatgcgatcaatgctgtctggggcaccgccgcccagatccatacataagagtaaaaggcggtctggtattttaacaggatcagtgccgttacgggacagatacagccaaatgtcaccagtgccccgtaaagatacagccgtttccgtgctttttccgccccggatgcattggcttcctttccggaaccatagaggacaaatcccagatacaggatcgccagcagcaaaagtgccgcaaattttccatgttgtgtatagtcggtccagcctgtcagggcggactgcagaagtgtcatcattctgtagcctcctctcctgacctgccatgtgcatcagtcattttccgtttttcccatcgtttccggaactgggaaaccaacgctccaagtatcagccatgccacagtaacaagcaggcagactcccgcgccatacagggtccagactatgcaggcctccgacaggatacaaaggatcacgcccgtatattttctgtccatcagacagaacagcagatacggaagcaacaccgccgcccggatcgtcacaccgcggaatcctccgtaaaacacgtcaaatccatccactccgggcatataggcccctgtactgaacagtattcccacgatcagcaaaaacgtccgtcttttcacagaattttccggaaaaagtactttccccaggcttccgtaagctacataagacaacagcagcgtaatgcaggggatcagacgatacaccacgtctacgggtgccatacccgtaaaacggctgatggccccgtacagagtgggcaggcacaatattttcagccgtaaggacatccccatcgaatatgccgtccccgtgagaggattcacggtataaacagcattttccctgagaaatgtgttcacggtctccaccgtcatatctccggtcagccacatgcggtttcccgtcaggatccgcaggatctgcagcaggatcagaaaagccaggacgcctgtgagaatctgtgtgcttttttcctttgccgtgtctgtcccgctgttttgatccgcaaccggatcatttttaccggctgtggcccgttttcgtctctgtctggatattacagacaataatatcgccgccagcagaacgattcccacctctgccagcagcagatccgttacagtcaaaaaagaccaccctaacaggcagcctgccaaatgggcgatctctgtcagcccgataatgatcaggctccccccgatcaaaatatccgatgtccgaaaagtcatttcatctcccatacccgcctttttcttacacgggcttttgtacatcttaccatatttatatggacttgacaaatataacagcatttccctgcaacaaaaaaccgcgtaccggaaacttcccattccgatacgcagtctttctcagtctgcagaggagaatactgcatctgcttaattaacaaactctccctgttccaaacaattaaaatcaatatgttacatagccttataatccagccggatgttgtcggcgatacgtgcgatgtactcgctgttcgtaggtcttgtccttccggaggctacagaatagccaaaaatcttttcgaatgtctccacatttcctctggaccaggacacttcaatggcgttcctgatcgcacgttccactttctgatctgtggtcttgaaatgtttcgcgatggtgggatataacagcttggtaacgctgcttactacctccatgtctttccctgacaaaatgattgcatcacgcaaatagtgataacccttcaaatgcgccggcacccctatctccaacatgattttggttacatatctctctaactctgaatcttttactgcaacaatatccaaaacaagtccccctttttacttgtcgagtattgctcctctgcagtgactgatagagaaatcatatcatagctgtcgatatttgaaaagacatttttccgttaaaatatagttaagaaactaaaaatgttacattttacccctattttgtaacatttttacgtacataaaaaacggatatttatgcggtttttcttaaatttcctcttttaccaggtaaatcggacggcgttttacttccatgtatgcctttgccagatactgccccagaatacccgtacagaaaaactgtacgccgctggtcatcaggatgatgcacaccagagaaggccagccggacaccggatctccgaagatcagcttccgcacgatgataaatatgatcatcaaaaaggcaatgatgcagaacagcacgcccacaaaggaagcgatcagaagcggtgccgtggaaaatgcggtgataccgtcaagggaatataccagaagcttccagaaattccacttggtctcgcccttggcacgctctacattctcatattccagccatttggtcttaaaaccgacccagccgaagattcccttggtaaaacgattatattcccgcatggacaggatggcatccaccatctgtctggtcatcaggcgataatctctcgctccgtccatcatttccgtctgggaaatcttcttcatcagatggtaaaatcttctggcaaaaaagctgcggatcggcggttcgcccttgcgggtcacgcggcgggtcgctacagaatcatacccctgccagatccattcaaacatctccggcagcagggaaggcggatcctgcagatccacatccatcataaccacataatcgcccttcgacttttccagtccggcaaacatcgccgcttcctttccgaaatttctggagaaagagacaatatgcacacgggaatcctgttcgatcagctttttcacttctctcacagtgccgtctttggaaccgtcatcaatatagagaagctccagttctatttccttttccttgaaaaagggatcatttttcgtcaattcctgataaaacagggcaacgctttcttcttcattatagcagggaacgatcacgctcaataagctcattttgtaatctccttaggttttcctgtcgctttttcaggcttatctgcgccactgtgcgacaggtaacagctatattatactatccttcgatgcatcatttcaaggtcaacactgtactttttccgctttttggattatactggatttatatatgtctgttctgcaaactacagcatataggaaacgaggttatttatgactttttttgaacagtttttcagcaataccattttcctgactgcagccttcggctggctggtggcacaggttctgaagacgctgatccatttgatcgtctccaagaaattcgttgcggagcgtctggtcggcagcggcggtatgcccagttctcactctgctaccgtatgtgccctggtaacagcggtctgctacgaatacggtgcgggaagctttgaatttgccatttccctgatcctggcgatcattgtaatgtatgatgctatgggagtacgcagagagaccggtattcaggcacaggtattgaacgaaatgctgaaggtcttcgaagatatgggccgcagtgagatttccgcccatgataaattaaaggaattcgtgggacatactcccctgcaggtgttgatgggtgcgctgttaggcattttatgcggcgtggtcatttacagcttcttactctgataaccgatcgaggtgtgattatatgcgtaaatataaatttcgacggcagtttctgcagactgcggtgcctcttctgctgactgtctccatgatgcttaccggatgtggacagacgggtaactccgattccccggtccgtccgatcctcccggataacagcccggattcctccacggtttcttccggggaaaagcttccggatcccgtaacgatcgttgtagaggatgattccactcctcccgctgagggcatggtccgcagccgtcttacgaacgaatgggtggatgccgatgtggctgccacacgccccattgccgtaatgattcctaatgaggcctctgcgatcccacaatacagtctgtccgatgcttctattatttatgaggcgaatgtagagaaccgtatgacccggatgatggcaatctacgaagactggcagaatctggacaagatcggcaatatacgcagtcttcgtgattattatgcttactgggcattcgaatgggatgcttttatcgtacatttcggcggtccgtttttcatcaatgagctgctggcgcagccggatactcaggatgtagacggtacctccggcagtgatgaggctgcctttttccgtactaccgaccgcaacaagccccacaatgcttatgcttccggtgaagggctgcaaaaggtgatcgagaaaaaggggtacagtctggaataccgcggactcagcgatgagaatcacttccggtttgccaccaaggcggaaccgaacacccttgggcagtatggtgccaaagcaaaggatgccacctatattgatatgtccggatgttatccgctgacaaggtgttattttgaatttaacgaggatgacggcctctattaccgttcccagcatctgtccggaagcacagacggccctcatatagatgccgccaccggagagcagctgactttcaaaaatattctggtacagaatacgtttcacgaggaactgggcgaggggtatctggcttttcagtgtcatgacaccacccgggacggctggttcttcaccaatggcagaggaatacatgtgaattgggagaagacttccgattacagtgccaccagatattacgatgacaacggggacgagatcatcctcaataccggcaagaccatgatctgtattatcgaagatggagattcctttacgttccattaatgtaaatggaaagttagtaaagaaatgctatcaaatccccgtagcccttggcaaggtataagaaacg

SEQ ID NO: 5547 - DNA, 9935 bp, Unknown
  gut microbiota DNA sequence
atacgaccttggcatggcgtattattatctgggctgcctgctctatgacaagagagtgtatggagaagccgtggcagactatgaaaaggcggcgcttaaatatccggagttcccgacggtacacaggaatctggcactggcatattacaatgtgaaaaagctgccgcagagagcgtacgaggaaatggagaaagcttttgcactggatgagacggatgccagagtgtatctggaactggatcagctgaaaaagcgtctgaatgttgccgtgaaagaacgatggagtgatatggaaaaacattttgacctggtggaaagcagggatgatctgtatctggagtatgtgacacttttaaacactctgggagaacctgagaaggctctcggcctgatcaaagcaaggaagttccatcagtgggaaggcggtgaaggcaaggtggcagcccaataccttatagccctgtaccaactggccaaagcggctgtggcaaaagaggactatgcggaagcaaaggaacttcttctgcgggcagtggacgaatatccacacaatctgggagaaggaaaactggagtcggcacaggaaaacaatctgtactatctgctggggctggtgcaggaaaaactgggagagacagaggaagctttcgtgaaccttacgaaagcctgctatggagagtcagaaccagtgggcatgatgtattacaacgaccagccgcccgaaatgatctattatcaggggctggcgtaccgaaagcttggtgacgaagaacaggcagtacagagattctgcaaactggtagactatggcaaagagcatataggcgatgagataaagatagattattttgcggtatccctgccggatcttctgatttttgaagaagatctgaaggagcggaaccggaagcattgcctgtttatgatgagcctggggcttaagggactgggacggacagacgaagcggaaaaatgtgcgcagcaattgcttgccatggataatgcccatcagggaatccgggtacatgatctgtaaaaaagcttgaaaagaaagacttgaataggaaggtttttgaggaaaggattacaaaatggaaaacatgggaaaagaggtatatagctataacagcgaatgcttaacctgcaacgacagaccgatcctgcccatcatgggagaattccatttctcccgctatccggaaggggaatggaaaacagcacttaagaagatgcaacagggcggcgtagacatcgttgctgcgtacgtgttttggatccaccatgaggaagcggaaggtgagtgggatttctccggcagaaggaatctgaaggcgtttttgaactgctgtcaggaagccgggatgaaagtatggctgcgtatcggtccgtgggcgcacggagagtgcaggaacggtggcttcccggactggctggtgaagaaagaaaagcggggagaactggctcttaggacggatgatccagagtatctgaagtatgtggacatcttttttaccaagattgccgagcaggcggatgggtatatgcataaggatggcggtcccgtcatcggcattcagatcgagaatgagtacgggcatgccggaggtccttccgacagggaagagggcatggcgcatatgcacacactcagagctatggcggaggaaaagggactgaccgctccctattattcggcgaccgggtggggaggcgcttatgtaccggaaagcttcctgccggtgctgggcgggtatgtggatgccccgtgggcaaatcatacccatgaacttgcggcaagtgagaatttcctgttccagccttttcacgatgatgccaatattgcttcggatttttctgagggtcagagcggttttacctttgatgccgcggaattcccttatctcacagcggagctgggagggggactgcaggtaacggcacacaggcgcacttacccgtatccggaggacatcgaggcacagacgatctgtatgctgggagccggggcaaatctgatcggatattatatgtatcacggcggcgtgaatcccgacgggaaatattccaccctgcaggagtcgaaagctaccggctatgccaatgaccttccggtgaaaagctatgatttccagacctgcctgcgggagaacggactgccgtcggaaagctattacagactgcggaaacaccatgcttttatcaaaaatacagaagaactgctggcaccggcaaaggtgtacctgccggataatatctccgagcctgcgagtgcggaggacatggagacgctgcgggcagccttccgttataataaaacggcggactgcgggttcttatttatcaataatcaccagagaaaacggaaaatgacggagaaacagatcacaccggaaaagccattacagtttacggtgacagatgttgaaggaatacagaggcagattattttcgaccggattcatgtgcggacggatgcgattctggtgctgccttacaatctgccggtgataatacggggagagcagttcagacttcggaaaaccaatgcctcttatctgggatgctttggcggaacttattatttctatacggatgagaagccggaggatatttatttcgagtggagtgatggcaatgatcatgcggaagcggtaaggatccttaccatacacgatgcggagcatttttgttatgcgcaggaaggggcagatgaaaagggcaaggtgagtctgctgccggatctgcactttgcggaagccggtaaggtgcggatcgcggatgccggacaggcagtggaaagcatctggaacgtatatggtcaaacagaaccgaacgtctatgaattaaccttggaatatgagtatcacccggcggatgcactgtctggcgatgtctggctggaactggactttggcggagactgcgccagactgtatcaggacgggaaactcctggatgactggttctccaacggcgagttatggcgcgtggcactgaaacgctatggctatccgacaaaactgaccctggaactggatcctttcaaaccggatgtctattatgatctgccgccgaagcgggagaaccgtctggcaggggcgagactgctgcggttaagttgaccggaacccggtttggcaggactcactttggaaacagaaggatagaaaagaggatacagatatgaaagacatgacacagggaaaaccgttaaagttgatcatcggcttcgccataccgatgctgatcggcaatatctttcagcaggtatataatgtggcggatacagtgatcgtaggaagattcttgggagagagcgcgctggcgggcgtgggaagcacgggaacgctgacctattttctgctggcactggtcagcggcatgtgtaacggcgcaggactggtggttgcgcagtgtttcggctgcgggaataaagagcgtctggcgaagacggtgacagcactgatctgggtggcgggagtgctgacctgtatcatgtcactgatcggtattttcggtgcggaatttttcctgcggcttttaagcgtgccggaaaatgttatcggctattctactacgtatctgcatatcatttatacttttgttttcggcagtgtggtctacaacggctgtgcggcgatcttaaacagtgtgggggattcgaagactccgctgcgggcggtgatcgcttcctcggtagtgaacatcgtgtttgacctgtttttcatcattgtgtgtaagatgggagtagcgggagcagcttatgcgacgattctggcacagtgtacttcggcggtgatctgttttgtgaaagtaagacaagtgagagaagagatcggattatctctgatgaaatggaaaccggaagtccattatattcagctggtggtgaagaccggattcccggcggcattccagtcctgcatgatcgcactgggcggaatgagcgtccagagactggtgaattccttcggatcctctaccatggcggcctatgtggcggcgaaccgtgtggacagcgtggcgatccaggtcattgtctccgtcggaacggcattgtcggtatttaccgggcagaatattgcgaagaatcaatatgaccggatccgggaagccctctataagacgctggcggtcatggtgggagccagcgtctgtattgcgacactggtgctgatcttccgggtacagctgatgagcctgttcctggatgccggcgaatcggcagaagccatcggcatcggctgcacctatctgaccattatcggcgtggcttatgtgatcgcgggggtgatgcagagctaccagaatgtgatccggggagccggagacgtcaatacctgtatggtagcgggactgacggagctgtccggcaggatcgtgttcgcgtatctattgtccggaaccctgggcgtcacgggaatctggatcgccactcctctgtcctggagttgtggctgtgtgattccggtgatccggtattattccggcaaatggaagcacaagaggctggcctgatgaccggagtggccggaacacagaggggctattccggccgcatccatccggcaaattccagaatggactggttctcagcctttttctcgctctgctgcatctgcttgcggtattccctgggagacatctgcataagtttgataaagtagcggttgaaactggacacggaatggaaccccaccatctcggaaatgtccagaatagagtgttccgtactgcgtaacagaatacaggattttaaaatccgggtgttgttgacgtagtctaacggtgaagttcccataatatcatggaaaacccggcggaagtgcgtcgggctccagtggcagagatcggccagatattcgatcgagaactgttgcatataatttttctcaatatattccagagcgggtgagatcaccagagagttttcggcgatctcgccttcttttttacgttcctgtaaggccagtatttcaagagagtccggtttggccgtgtcgggattgacaccgccgagactttcaatccggtacaattcaatataaagggagcataacaggcttctggcactgatctgatagcagggattctgctcttccagctcgtggatgatatgagataccagatagttgatgtggggaaaagcctctttgctgaaaatataacggaatgctgggaaaccgtccgtggacaggtcgtaatttttccaggaggcggggaggagattgcggaacaattccttcggatccaggaaaagataagaccagtggcttttcgtgcctggtgcactgtaagtggtatgtggaacattgcggggaagaacggtgacatctccggcatggaaagtctgtttttctccgttgatctccagcgtaccgctgtcggaatgacagatcccaatctccagacagttatgaaaatgaaggcttccgctgggaatatcggaaatcttccaataatcaccggacagaagcagtaccgggaagtgtgttggcagataataacttcggtattctgtgacagctcgtttggatttcgccatagtgtgcctcctgttccagagttttctgaatagctttgtgcatcctgtatgatgatgcaacggaaagatatgttgcagtagaaataatgtctatacattatatataacaattaaaatggataaaatcaaccattatgttgcgaaaatgacttttttagggttggcaatgtttccgtggaagagattaaaaaaggctaaaaataccgtgaaacagcgaatcctacagcaaaaacgctccaaaattcacgtaaaatttacgaaaatgcaacgaaacttcaatacttacgaaaaacgaccatgatctataatgatcgtttttgcatagttttctataatgattgattagaaaaatatgacaacatgtatgataatatacttacaaagttacaaaaagtgtacaaagtgacgagaaaatatagctgacacttgaggaggttcgacatggcgaagaagaatgcagccaatgtggtgggagtgaaaacgaaaaccacgtggaaacaagcttttaaaagagactggcaattgtatctgctgttactgcttccactgattatggtatttgtattcagttacggagcatacccgggattgaggatggcctttatggattataaaccggcgaagggatatgcaggcagcgaatgggtgggcatgaagacattcgttaagatattcaaggatgccgatttcatgagagcacttcgcaactccatagtgtttaacctggcggatctgatcatcggtttcccaatgccgatcattctggcactgatcctgaatgaattaagatatccgagattcaagaaagtgtcccagacgatcctgtatctgccgcacttcctttcctgggccatcatcggaagcgtagccatgacaatgttccgtccgaactccggtctggtgaacattctgctgaccaacctgggagtgatctccgaaggaattcctttcctgaatgagaaatggcactgggcaattacatatctgctgatcggtgtatggcagacgatgggatggggcacgatcctctacctggcagcgatcaccggtatcaacggagaattgtacgaagcagccatgatcgatggagcgaaccgttggaagagaatgtggcatatcacacttcccggcatcaagagcacagtagtaacactgctgatcctgaacctcggacgtgtcatgggaagtaacttagagcgtctgaccgcgttagaaaattcacaggtcaaggacttccagtatcagctggctgtctacatttacaacaaaggtattggagccggaaaattcagtgcggcgaccgcagttggtctgttccagtcattgatcggattgatcctggttctgttatctgataaattcgcaaagaagcttggcgaagacggattactgtaggaggtgagagagatgaagaaaaaagaagttaatattaatgaagaatctacctccgcaggcggagcacatgcggtcaacaaattccgcatcagtgatttcgtcatgatggcagtgatcgtcatcctctgcgccagctgtgtattaccgttcttacatgtagcagtaaaatccatatccggtaataccgcagtaatgtccaagagcgtttacttctggcccaaagacatcaccttcgatgcttacaagaaggtatttgcagataactccatgacctactccatgatcttctcggtgatcgttaccgtgatcttcaccgctctgggaatgctggtatgtacttgtgccgcttatcctctttccaagaagagactgaagggcaaaaagttactgactttcctgctgatggtaccgatgtacttcagtgccggcatcattcccagctacctgttatatcagaagctgcatgtgctggataccatgtgggtgttgatcttacctctgatctattccccgtacaacatgctgatcatgaagaactacttccagagtacgattcccgacagcttagaggaatccgctttcctggatggcgcaagtaacttccagatcctgagcaagatcgtattaccgctgtccaaaccgatcctggcaacgttgtctctgttctacgccgtaggccgttggaactcttacgcagacaacatgtactacaccaagagtgctaacctgaagctgatccagtacaagttatatcagttggtagcatccgcagcagaagcacagacttcctccctggcagataccggcagtgcgatccagtccactcccgaagtattacaggcagcaagtatcatgtttgtaacaattcctatcattattatttatcctttcctgcagaagtacttcgtacagggtaccatgatcggagcagttaagggctaaaagttaaaaggaacaaaacaaccaagttagttttccccaaaaccgggggtacacataaaactatgtataatttttaaggaggaaaatcctctcctcgccagggactcggatttttccttcggaaaaacaaggaggattgatttatgaagaagaatactcttcacaaggtaatggcaacagcacttgttggtgctatggcaatgagcactctgaccggatgcggcagcagtgcggacaacacaaccgcagatgcaggaacaaaggaatctgtagcagagagttctgcagcaagcacagatgcaggagcatccacagcagtagcaggtattgacggatgggaggctttcgcagacaatgttactctgcagatccccgtatacgatcgtggctcttctggaaacggatgctctgatgtagagaacaactactggaccaactgggtacaggagaacttcggtgataagtacaacatcacggtagaatatgtaggaattacccgtagcgacgttatgactgattacgctatgctggcagcaagccagagccttcctaccatctgtatggaatatgactatgataagctggcaagctggcaggcagacggctatctgcagacctacgatgtagaagagttcaagcagatcgctcctacttactgggagaccatggtagagcacggcaacgatgcttacaccaagctggatgatgaagattatctggtactcggttacagaccttacggtaacaccacttatacctggtgcactttctatcgtcaggactggctggaagaagctggcttctctgagtatcccgttggcgacaacaccaagctgttagagctgtatgcaaaactggttgagaacggccataagtatcctttaagcggtaagaaagtaagcggcgcaggtattgaccagaactatggttacagagattatcctcaggatgagaccacatgggcaaccaccggtgactaccagatccccgctctgtccaccgaggctcagaagagattcttaaaatgggagaacgagctgtacaacgatggttactacaatcctgagtactatctgagagatgcttccgaggcagaggcagacttcatcaacggtgaagcatttacctggaccggatatatctcctccagcatgaacgtactgaactccttctatgatgctaaccccgatgccaagctggcagtagcagtgactccttccacctggacacaggatgagacctggggatcttccgcttcttacagacccggaaccaacttcggtatgatgattggcttcgctaacgatgctaccgaggatgaagtaaaggcagctatgatgtaccttgagtggctgaaccagcccgagaatctgttcactatgcagtggggtatcgaaggtgtgaacttcaattatgatgataacggcgatcccgtagcggtagcagatcagaccggtctggctgagcagcagggacacaacaacaacgtagactactggtgtgcagtaaccgcagttaagaccctcggatctatcgagaaagatatccaggcagttacccctcagggtattcctcaggacttctatgatcagatcctggctaactacaacggacaggttgctatctatgaagcaggcaaggctaactccgactgtctgttcgcaaccgctatcgatgctgttaccgagtacaaccagacgctgtatgatctgtatactgagtaccgtgacaagctgaccatgtgccctaaggaccagttcgattctctgtatgaagaactgagccagaagtacctggatgcaggttatcaggaagttatcgatgagagacaggctgctctggatgcaggtaacaccaccagacttcagtaagtaaaaagttttattacaggaagtacatacagcccccaggcatgaatggcttgggggctatattaaaaatgcaactattcagagccatgtaaatattattcaatgggcgtcgaatgcttgcattcgtaagaacatttgataatatttatagggcgaagttactttatgtccttttccgaccg

SEQ ID NO: 5548 - DNA, 26499 bp, Unknown
  gut microbiota DNA sequence
aaaaacaactgtgggaaaagaatataaagagccaaaaggcagaaatggaggagctatgttaaaactggaatatgataagaaagaaatagagggagtcattgacaagatcgtcaaaaagactatgaatatggatctcacctgggactggccctgtggtgtggcatattacggaatcagcgatgcctatgagaagacaggcaagaaggaatatctggatctgttaaaggatcgtatcgacgaactgatcgatctgggactgcccaaggtatggacagtaaacgcctgtgccatggggcattgcctgatcaccttataccaggccaccggagagcagcagtatcatgacattcttatgagtaagatcgcttatttaagaaaagatgccttgcgtttcggagatcatgtattgcagcacaccgtatctgccaacaacgatttcccggagcagtgctggtgtgacactttgttcatggcagcgttcctgatgctgcgtgtgggcgtgatggaacacgatgaagaactgatcgatgatgccttgaaccagtactactggcatatcaaatatttacagaatcccagcagtggactctggtatcacggctatgacaatattgccggagatcatatgtccggcatctattggggaagagccaatgcctgggcagcatttaccatgtcgcaggtaggcggtattctgcctcagtgctatctgtatccgaagtatatcgatgtggccggctccttaaatgagcagttggcagccctgaaggtataccagacggagaatggattgtggagaaccgtagtggatgatccggaatcttatgaagagatttccgcatctgcaggaattgccgcagcaatgctgaccagaggcaatcctttacacagcaaatatatcaacaaggccatcaagggcctgcttgccaatgtcagcgaggatggtaaggtgatgaatgtctccggcggaactgccgttatgagagacaaggaaggttacagaggtattcccaaggcttatatccagggctggggacagggactggcattatcattttttgcaactttgttagtatctgacgagattgagaaggacggtgcattataaatgtttcgcaggaatttcctgttcggaaaggatggaggaacggccaatctgatcgatgtgggcagcgaagacctctatcagccgggcaaaggttacggttttgtaacagaaaaaaacagaagagagcagaagttgctgcagatccgggaactgaattcctcttttgatacgatgtactggtatcaaaacgaacagctgtccttcctgaaggaagatgagaacggctgctatctggattctgcagaagaagtggcagcattggaggcacagtcaggagagaagatggcgggatcacccaggcggatcccgttactgttcaaggtggatgtgcccaggcagggcaattataaggttacgctgactatccgctcagaagaggagataggagaggtactgatctttaccggcagaaggcgtcttgctttttatggaagagtgggagccggagagttcacttatacaatgattacaaatgtctgcgatattgtacctgtgggttattcccggatttttgcggataagactgtggatattgcagtactggcggacagaccaaggatcagtgctcttacggtagaagaggtgaacggtcctacggtttatctggcgggagattccacagtgacagatcagcccggagattatccctattatccaggcacctgttactgtggctggggacagatgcttccggcatattttgacacacgtgtggcagtgtcgaatcattcccactccggactgactaccgatagcttccgcaaggaagggcattatgcggtgatctctcagtacagcaagccgggagattatgtgtttttccagttcgggcataatgatcagaagcttcccgggctgcaggcaaagggcggataccgggcgaatctgcaacgctatatcaaagaaaatcaggcaaagggagtatacccggtactggtgacacccattgcaagaaatacctggagactgcgggatcagacttatctggatctgctggaggaattcgcggatgtatgtctggaactgggagcacagtacggaattccggtgctggatcttcatgcccacagcaagaaatatgtgttggaaaagggcttacaggatgccaaacccatctttttccccggggactatacccataccaatgacttcggtgcttataagatggcaggatatgtgtcacaggagatccgggagaaatgcaaaggtcattctgaaagagcctacgcttatctggcagagtgcgtgacggatggtttcggcgcatgggagcctgtgggacaaatcaatgttcctaagaaaccggagatctacaaggacattccggatcctgcaggagatcaggtgctgttgtctgaggcagagcagctggaacgtgtggtcagactgtgtctgaaagaggaattgctgtaacaggacagatattgtactggaaaatagaagtgaagaaatgacaggaatgaaaaataagcaggaatatgaggaggaactcagaatgggaaaaggtggttttaccttaccgggagaatcaggatatgaagaactgactctgaaaatggcggaaaaatggggagcagatgtgatccgtgacagtgatgggaccgtgctttccgacgaaatcacccatgccggttacggaatctattctaccatttgtattatcagagatcacaatgcctgggcaaaggagaatcaggacaaattacagcagaccttcctgtgcacaccgccccaggcagcagagagtgacaccctgaccatcggactgatggacagcttttttgcggagcagttccggatcaatgatagcgcagagagtctggaatattgggaggtttatgacagaaccaccaatgtgaagatcgacaatgcggactggagctatgacaaagagaagggaagcgtgtccctgagcggcatcatcccttttcataagtatacagtaagcttcttagcctatcgtatctgggaagaaatctctatgtacaatcatactacgaaccactgggacaaggagcatctgatgcagatcgatcccagatatcctgagactcaggagtatctgctgggctggatgaagcactggtgtgagacccatccggataccacggtggtgcgctttacctccatgttctacaatttcgtatggatctggggcagcagtgagaggaaccggaatctgttctctgactggggttcctatgatttcactgtgagcgttcctgctttacaggagttcgagaaacaatacggatatcgcatgacagcggaagattttatcaataagggacagctgcatgtgactcatatgcctggcaatgcgaaaaaggcggattggatggtatttatcaatgatttcgttatttcctttggcagaaagctgatcgatatggtgcattcctacggcaaaaaggcttatgtcttctatgatgacagttgggttggtgtggagccttataatggcagatttcaggagtttgattttgacggactgatcaaatgtgtattctccggttatgaagccagactgtgtgcgggcgtggatgtgcctacacatgaactgcgtctgcacccctatctgttcccggtggggctgggcggtgctccgactttcatggagggcggcaatcccacactggatgcgaaaaaatactggaatagcgtaagacgtgccctgctgcgtgcgaagatcgaccggatcggtctcggcggataccttcatctggtggagggtttcccggatttctgtgattatattgaaaaagtggcagatgagttccgtctgatccgcagcttccacgatgcgggagaaccttaccgcatcaagacccgtgtggcagtgctgcattattggggaagcttacgttcctggaccttgtccggacactttcatgagacttatatgcatgacctgatccacatcaacgaagctttgtccggacttcctgtggatgtgaaatttatttcctttgaggatgtaaaaaatggtatactgaaggacgtagatgtcgtaatcaatgcaggtagagccggaagcgcctggagcggcggggatgcctggaaggatgaggagcttgttactgcacttacaaagtgggtacacgagggaggctgctttatcggtgtgaacgagccttccgctgtggaaggatatgatacgtatttccgtatggcacatgtgctgggaattgacgaggacaccggcgcaagagtctgtcacggcagatggacctttgagacagcggatccggagcatctgatcccagagggcgcaggtgtggaagcgaaggagaaccggtatctgacggatggaaaagcacaggtacttctggcagacggcgggaagccactgatcaccctgaatcatttcggcaagggactgggaatctatctgtcttccttccaggtgaacctgtggaataccagaatgctgtaccagctgatccgttatgccggtggagaaggcacctccggcagctatatgacggataacctgtatacggaatgtgcttattacccggagagtaaaaaactggtagtcatcaacaacagtgacaccgagcagaccaccactatcccaacggaagcggacgcatgtacggtaaccattgcaccttacgacactacctttgtagaaatcagataaccaacgataacgatcagggcggaaatcctgtgttcgttttctgagggagcagaacgcaaaggaggcagagaatgcataacgaaaaagaaagacctacggaatatttcccggacggaactcccatagatgactggttttatgatatagggatgccggagcttgaggaactgggcagaccctatgtcctcacagagtacgggatctgggacgacggaaaagtttataccaaagagatccagaaggtgatcgacctggcggcagaagagggcggtggtgtcctggtggtgccgccgggaacctatctgacgggagcactttatttcaaacagggagtgaatctctatgtttccgccggtgcgacgttaaagggcagcgatgatatctcggattatgatctggccgagacccggatcgagggagagacctgcctgtattttacggcactgatcaatgcggacggtctgaatggatttaccatgtgcggaccaggcactattgacggtaacggacttaagacctggaaagcctgctggctgcgctggaaatggagtaacggcaccaacaaggatggtcagagaccccggctggtctatctgtccaactgcagaaatgtgcggatcgccggtctgaatttacagaattcccatttctggaccacacatatttataaatgtgaccatgtaaaatacttgaactgccatatttattccccggcaggtcctgttgcggcacccagtacggatgccattgatatcgatgcgtgtacggatgtgttggtgaaaggctgttatatggaagtcaatgacgactctgtggtgctgaagggcggtaagggcccctgggcggacagccagccggagaacggctccaatgagcggattctggtggaggattgtgtctatggcttctgccatgggtgtctcacctgtggttcggaatcagtacataaccgcaatatcatcatgcgcaggattcagatcaagggggcagcgagactgttgtggctgaaaatgcggccggacaccccgcagcactatgaatatatcacggtggagcagatcgaaggccgggtaaaggagttcctcaagatttatccctggacccagtattatgatctgaaggatcggaaggacaggccgctgtcttatgcagatcacatcacgatgaaggactgtgactgcatctgtgataccttttttgatgtgatgccggatgagagccagtatctgctttccgattttaccctgcaggatctgcggatcagggcaagagtggataacttttcggaagacaagttaagaagtgtagtatatgagaatgtacaggtggaagaaagtacggagtctgcggagagctggcatgaagtgaaaggcttccaataatgaacgctctgcaggaatcgcactgcgacggaacggcgtaatgccgcaacagtggtaggaaacggatgcctgccacagaaaggatcaatatggcaaaggtttatattaacgaaaagaataaaaagggacatatcaatccggaactttacggcaatttctctgagcatctgggcagatgtatctatgaaggactgtatgtaggtgagaattccgagatccccaataccaatggtatgcgtaacgatgtagtggcagcactcaaggagatgaagcttccggtgcttcgctggcccggcggttgtttcgcggacgaataccactggaaagacggtatcggaccgaaggagaaccgcaagaaaatgatcaacactcattggggtggtgtgaccgaggacaacagcttcggtacccatgagttcttcgaactgtgtgaacagatcggttgtaagacctacatcaatggcaatgtgggaagcggtaccgtacaggagatgtccgaatgggtggagtatatgacctttgacggggtatcccccatggcggacctacgccggaaaaatggcagagaaaaagcctggaaggtggattacttcggtgtcggtaacgaaaactggggatgcggcggcaatatgaccccatcctactatggcaatctgtaccgcagataccagacctatgtgagaaattatgatcagaagcacccaattttcaaagtctgttgcggccccaatgcgggagatacgtattggactgaaaatgtgctgaagacctgttttgaaaatgcaccggaatggatgcatggctttatggacggactttccctgcattactatacactgccggaggatgactggtctcacaagggaagtgcactggacttcgacgatgcagcatggtacaagactctggccaaagcatttaaactggacgaactgatcaataagcattctacgatcatggacaaatacgatccagagaagaagatcggcctgatctgtgacgagtggggtacctggtatgatgtggaacccggcaccaatcccggatttttatatcaacagagtaccatgcgtgatgcactggtggccggactgtctttaaatattttcaacaagcactgtgaccgtgtgaagatggcgaacatcgcacagcttatcaacgtactgcaggcagtgatcctgaccgagggaccgaagatgctgcgtaccccgacttaccatgtattccatatgtacaaataccatcaggatgcggatctggtggaaagctatatcgatggtgtggaacagatcggtgaagatgaaaagttcaaggttcctaatttacaggaatccgcttccgtggataaggacggtgttgtgaccatcaccctgaacaacctgtccattgataaggcagaagaggtggagatcgctttcgcagagtgtgatccaaagcacgtgaccgctgcgatactaaccaatgatatgcatgcttacaacacctttgaggatcccgataaggtacacgaagaagtatttacggagtataagatcgcggatggcaggatcacctttaccatgccggcatgcagtgtcgttatgttccggataaaataagcgataagaacagttatggaagaagaacaaataacagaaacaataaaatatccctgtcggaaatgtctgttgcgggaaatggacaaaaatgcctatatggagaatctgtatgcctacatagacaggatcgaagaggatagtaaagcagataaggcggtctatgaagaccgccttgctgtatgtaaggaatgcaaatatctgaatgagggcctgtgcggtgcctgtggctgctttgtggaactgagggctgtaatcgccgtcaaccggtgtccttatgagaagtggtaacttctaagatcaaagggttaccttctcaggaacatattttttcagggctgcagccacggcccccacaccggagcttaattctgcaaaatactgttttaccagagtatccatgccgatggcgtggaggttcacaccgaatattttctcattggcaagtaatgcgtccagctttgacagatccttgggagagaaactaagttcgtagtctgcaacgtactgacgggcttcctctaacagggggtcggagctgggcgtaaattctctgccctcatcatcgattcccatgagataccggagccatccggcatagaccagaggaatcagcttcaggtcttccgtatgcaggtctggagaagcttcgtaagctttgatggtctcgccgaagcggatggaaagcttctgggaggtatcggtagcgattctctggggagaatccggcaggaagggattggggatcctcacattcaccacttcgtcaatgaatttcttcggatccaggatgccgggatttaccactacgggaagtccttctttgtaaccgatgacttccaccatatttttcaataacgggttcttcatctcttcggagatcagggtatatcccagaaggcagccatagatggccagtgcggtgtgcagaggattcaggcaggtacataccttcattttctccactttgtctacggtcgctctgtcggtgaagatgatgccgcctttgtccagtgcgggcttaccgttcggaaaagcatcttcaatgaccaggtattcgcattcttccgcattgacaaagggagcgatataggtgtttttggaagtaactacggcatccagaccgccgatatgatcctcggccagcatagcttctactttggcatcaggtcttggggtgatcttgtcgatcatgctccaggggaaggtgactttcgtctggtcattgacgtagcctaagaagccggcttccaccagtccgttgtcggtccatgccttggcgaacgcattgacagcggcatataatttgtcaccgttatgggagcagttgtccatgctgaccatggcaatggggagcgctccgtgagtgtatctggtataaagcagggagactaccttgcccaggtagctttcgggggcttcgggacctttttcgaagtcagcggctactgcggggaaaaattctcctttggcattggcggtagcatagcctttttcagtgatggtaaagctggccatctggagagaaggatttttaaaaatctcccggagacgtgcgtattctgcttcgtttttactgtccaggatcagagactccatgatgctgcctacgatggtcttttccacggtgttgtcggcctttaaggtggcgagaatgcttaaattgtcgtgtggacggtagcttttttcaatgatctcgtagtcatagccttccgctgcgatgagaccggtatccagaacgccgctgtttaacagattctgtgctacgttggcctgaaaggcacggaagatattgccggcaccgaagtggatccagtggggatgttccacggtgtttttatgaacggtatcgtaatcgaattccggcagatgataaccggcagcgagaaatgcgtcccggtcgtcatgaagactttttaaggtaagttccataatgatttcctccaaactgatttatgagttttcaggtgcgatggttatttctgcttatgggacttctcgatagcttcccacagaccgtttaaataggtggcgcctaaagctctgtcgtacagtccgtatccgggcatggccacttcatcccagatcatacgtccgtgatcgggacggatgggaccgtcaaaaccaatatcataaagagccagcatgatctcgtacatatcgaaggttccatcgttggacagatgtgcagcctcctcaaaatcagtaggagagttgaacttcaggtttctgacatgggcgaaatgaatgcggcctttcagggagcggatcatatccggcagatcattttccaggttggtgccgtaggaaccggaacagaaggtaacgccattgtgagggttatccaccatcttcatcatacgcaggatattctgcttgttgatgatgatacggggcagtccgaaaacactccacgcaggatcgtcagggtggatcgccatgttaatgtcatatttatcacaggtgggcatgatacgctccagaaaatatttcaggttggcaaaaagcttttcgtcatccacatctttgtacatttcgaacagttctttgacatgagccatacgctcaggctcccagccgggcattacagtgccgttcatatcgccggcaatggattcgaacattttggccggatcaatagcgtctacagcagcctgattgtaagcaaggactgtagaaccgtcgggacgcattctggcaagttcggttcgtgtccagtcaaagaccggcatgaaattgtagcataccatatggatgcctgcctgaccgagccgttccagggtagtgatataattctctatatattgttcacggtcgggagaaccgatcttgatggcatcgtgaatgttgacactctcgataccggccagctgtaagccggcagcttcaatctcagtctttagggccaggatgtcatccatttcccagacttctccgggagcggtgccgtagagagtggagatgactccggtgacaccgggaatctggcggatctgttttaaggtaaccgtgtcgtacttgctgccataccagcgtaatgtcatttgcataatagaaatcctccttgtagggaatgctttggtttcgttttttgctgtcttaagcatagcagaatggtaaatgcattaaaactgcatgaattgcttgaaatagtgcaaaaattgctatatagtaagacaggggatataaaccatggaaaataaaaactgaacagaatgatacaggagagaaaatggatggtcgtgaacagaaaaagcagcctgcgttgccgggatgcggcggacgaacggcaatatatgttgagcggtgactatgaggtctatgagaaggtaggggagcctgtcggagcggtgtcgttccattatcatgatttttatgagctgatctatattatagagggggaattttcttccctgatcgaggaccgggcggtgcggatgcggaagggagatttcctgctgatcgataagaatgtcatgcacaaatatcatcccacggagaagaaaatggattcgtcccgccggatcattttgtggattagtgatcagatgctgcgggagctggcggcgggagagccgtttcttgcagaatgcttctggggagcggggccgaaactgtatcatttccccatttattatgaggaaattttgcgtggatttctgctaaagcttgctatgtcggagatcttagagggggatgatgtccagaactgcggaatccgtaaggtcatggacagaggcaatttgagcctgttttttgggtgtctgaatgtgttgtgtaaacgggaggaatatttgtcttccacacaggagatcgtggatcatcctctggtggagcaggtgacagggtatatcgaagcccatatcggtgagaagatcaccgtagaggatgtggcggagactgtgcatatgagtaagttctattttctgcggaaatttaaagaaatcaccggaatgacggtgcataattttattgtgaacaagcggatcattgctgcctgtcagatcatggcggaggggaagagtattaccgaaagctggcagatgaccggctttgcggattactcctctttcctgcggaatttccggaaaatctatggcatttccccaaaagagtaccgggaaaataaccgcagcttgattatttcccagtaaagaggtaagatatcaaaaacactaaaaataagaacaaatgatctgttgattacaggggaaaaagaaatgagtgaaaataaagtaaagaagattcaaaatggttattataccggagagagaccgttgttccgtggggagcatttggagatcggggatacgatcttcggagagggagaatctccgttaaaggaaagcagcgatattacgttaaagaacagtatgttccagtggaaatatccgctgtggtacagcaaaaatgtggtggcacaggattgtacctgggcagagatggcgagagccggtgtatggtatacggacaatctgcaggtgaaaaatgccctgatcgaggcaccgaagaatttccgcagatgtaaggagcttacgctggagcatgtattcctcccacatgcggaggagacgctgtggaactgtcagaaggtcaccatgaaggatgtcagcaccagaggagattattttgccatgaactgcagtgatatgcagatttctgattttgaactggcaggcaattattctcaactgcaccatcgagagcttgcagggcatgtgctatatcgacaatctggtgatgaagaattgtaagctgttaaatacgacactggcctttgaatattccacgatagatgtggagatcacggacggcatcaccagtgtgctgaatccggtttccggaatgatacgggcacagagcatcgataccctgatcctggatcctgcgaagaccgatccggcggagacacagatcgtgtgtgatcatattggctgcagactggataagaacccggaggaaagtgtggaaaattaatatgagcagtatgtttgacaaagaggttaaccgccggggtaccggcagtatgaaatggaacgtaggagagtacgagcttcccatgtgggtggcggatatggatttcgagacggctcctgcagtgacgaaagccatcatggaccgggctgtacagggcatctatggctataccgaggtctctgaggagtggtatctggcatatcagaactggtggcaggaccgacatcattttcccattgaaaaagactggctgatcttctgtaccggtgtggttccggcgatttccagtattgtgcggaaaatgaccaccgtagcggaaaagatcgtagtcatgacgccctgctacaatatctttttcaattctattgtaaataacggacggaatgtgctggagagcagactgcattacgaagatggtgtgtacagcattgatcaagaggatctggaggagaagcttgcggatccccagaccagcatgctgatcctctgcaacccgcacaacccagtgggaaagatctgggatcgtgaaacgttagagcgcattggagaactgtgcttcaaacatcatgtgctggtgctgtcggatgagatccattgcgatattacgagacccgggatggagtatatcccatttgcgtcggtatcggagcattgtaaaaataacagcatcacctgtgtggcacccacgaagacctttaacctggcggggctccagacggcagcagtgatcgttccggatgcggcgctgcggcaccgggtgaaccgggggctgaacacggatgaagtggcagagcccaatgtgttcgcagccattgctcccattgcggcatttgaccggggcagagagtatggcaacggttatggatttttacgtatgaatctggcatgcagacgggaattgttgaaagagggactggagcgcctgaagagaagcattcacagttaccggaaaggtatcagcaatggtatcatatgataggctttatatttacagaagaggtgttttatgaagaagatagtacattatataatgtgttttgtcatggcagcagggatatttttcaatacaggactgacaagccgggctgccgatggaacggaatccggaagcaattttaccaatctgatcgtatttgcgaaattttcaggagaagaggaatttgtagatacagtatatggtggaagcagtgtgcgtaaaatcacggataattcttttaatacggcagaatacagtgtctcagattattttgagaccgtatcagcaggaaaattgtgtatcaattatgtatatttgtttgataaaggcggctccataacgctgaagaactcaaggggatattatgccgcatatagtgagaataaccaggagggctataagacagcacaggagcgtcaaagccgtatgtatgaactgaagctggactggtcggaggcaattaatacggccatagcttcaggagctgagatcacaaattatgatggaagtgtcacttataacaaggcagatttagataaggatcatgatggcaaaatagatgccataacattgatttataaaaatacgacccaaagtaatatttcggtatcacggggagcaccattatggaattaccgggattatgcttattatgtaaatattactacagagaacggtgattcgttggtcagcgaagactatgtacagttaacgaccccttatcaaaacagctccggagaactgcaaggatatctgtatcaggacaagaatgggaaccttacgacatctctgggaacggccatccatgagacggggcatatcctgggattaaaggatctgtataatacgcaggatgcacagccggtatattatatgtccgtcatggcaaagcatctttcccctgtgccgcagtttatttctgtgaaggagcaggaggcgttgggctgggccgatgctgagcagcttcctgtgctgacagcagatggtacctacagcctgtcggcatcagggacacagaatgctggtgcagtgatcggatacaagatgaatattcccgcaaaaaacaagacactttacctggaatacagaaatttcggagagtctggcaataaatatgattctcaggtaaaagagttttataaggcagatggcagccaggtgaatgctttcaacctgaaatcgggactggtctgctatctcgcagaaagtgacatccgttttcccagtaatattaattgtgttgcaccgaggtggaactatgaggtgctggggggaggaaacacaaaaaatgatgcagcactggcccaaggggaggaaaagtacattacggataaggtctgcatccgggtaacggaagtcacaccggatagactgacatttgagatcagtggaatcggtgaagagcatatccataccggaggggaggcaacctgtgtctcaagaccggtatgtgaagtgtgccaacaggtatatggagaaatcaatgcgtccaatcataagcacacggaactgcggggagtaaaagaacctgacagcacgcaggaagggtataccggtgatctctattgtacagattgtcagcagctcatacagcaggggacagtaatcccgaaaaaatgtcccgatattattgaaggacaggatactcagattgatggaaatactacggaagcggccacattccggtcaaatgcgttgtttgatgattttatccgtgtggaattagatggtgtggtgcttcaacagaatattgactatacggtggagcccggaagtatcattgtgcgtctgatgccggagcttttgcggacattagcagaaggcagacatagtatcggcattgtttcagacggtggaacagcggtggccacatttaacatcagcagagtagtgacgccggagacaacgcagccacctgaggcaacacagccacctgaggcaacgcagccacctgaggcaacgcagccacctgaggcaacgcagccacctgaggcaacgcagacacctgaggcaacgcagccacctgaggcaacgcagccacctgagtcagcgcagccacctgaggcaacgcagacaccggagacaacgcagacacctgagtcagtcagaatccaggcggtaagtatggagccgacagcaacactaaaaccgacagtaacaccaaaaccgacagtaacaacaaaaccgacagtaacaccaaaaccgacagtaacaccagaaccgacagcaacaccagaaccgaaggcaacgtcagaaccggagtctccccagattccggaggcaacggtaactccggcaacagagtctgcaacggcagatccggaacaggaagtatcacaggcaggcggacaggcaatggagcagcagagagctggcaaggcatggctggtgacaggaggaattatcctgtgtatgggaattgcagcagggggcttctggctgcaacatcatattgtgcaggaaaagagaaaaaatgatgaaggataagtgtttaccggaagaaaagtcatgagaaaagtcacaggcagtggggtgcagaattgttacaaatatgttatactacgatgtaacggtcataatcctttttgctcccgacattgtacgatagttatcggtatggaacaaggggatgacaaatcatagaaacatatagggatgttatcatggaaaattatcaggaacagtataaacaggaattacatcagcaggagattaattccaacctgcggacgttgaagggatttttatggatttttgtgacaattctgattctctggctgttgactttagtgggaatctttattgtggatgccggaatctttaccatggcagtggggatgtcggtggtaatagggatcccggttttatacatatacaaaaaggtggatttgtcaagggattgggtgaagtatgtgcttctggcgctgatctgtgcaatatcggcagtcatggcggcatttttgtcttttcatgctgtgcttatctatgtattgccgcttttatcagcggtgcagtaccgggaaaggatgacactgtgggttacttatgccgtgaatgatgtgactatgacactgagtatgctggcagggttttatcatggaatctgtgatctgaatcttctgcttggcagtaatcataccagagactggtatatggagcagtggggggcaggaacactgcagtttagtctggaacctgatcctgtatttaccattttgttctacggagccttgccacgggcagtgatccttctggcatttacctttattttgcggtatatcagcattaccagccacgaggatgcacagaggattgccgacctgacatatcgtaaggagactgatctgggaacccatgtgtataataagaacaaatatgaggaaatgattgctgactattatctgggggttgacagactggctgccattttctgggatgtgaataatctgaaatatgttaacgaccaatatggacatgctgcaggggatgtgctgatccagacgttgtcttccgtattatatgaattatccactgacaggaggaaggtttatcgtgtgggtggagatgagttcgtcatgctgatagagaatccggtagaaacagagatcgagtcaatggtagagtctgtcagtgctgcattgcaggagaaaaacagtcagggcgagatgccgttctccagtgctgtgggctgggcagaaggctgtggtatggatgtccgtaagatcatcaatgaagcggatgcaaagatgtatgagaataagacgcgtggaaaggaatgcagaaaataggatggcaaactgggtaagtgcaggctgcggtgtcattgcaaatgagctggcgcaggctatggaaaaaagaggacagaagctgtatggtgtcgtgaaccggacacaggagaaggcagaggcttttgcggaaaaatacggtgtacagaaggtgtttgcaagctttgaagaggtatgtgcggatcctgcggtggatatcgtctatatatccacacctcataacactcacattcactttctgcggaaagcgctggcagccggcaagcatgtgctgtgcgaaaaatccattacgctgaattccgaagaactggaagaggcagtgcagctggcgaaggagcatggtgtggtgctggcggaagctatgactatctatcatatgccgatttataaggagttgaaaaaacgcatggatgccggaaaattcggagaattgcgtgtgatacagatgaatttcggaagttataaggaatacgatatgaagaaccggttcttcaaccggaatctggccggaggggcactgctggacatcggtgtgtatgccctttcctttgtcagaatgttcttaaattcctgcccggatcagattacttcgcaggtgaagcttgcacctaccggtgtggacgagcaggcgggaatacttctgatgaaccgggagcaggagatggcaacggtcacattgtccctgcatgccaagcagcccaaacggggcatgatctcttttgacaaggcttacgtggaaatgtatgagtatcccagagggcagaaagcagtgatcacgtacacggaagacggacacaccgaggaaattgtggcgggagctacggcagacgcactgggatacgaggtggaggatatggaacaggccatcgccggacatccggaattaatgaagcttgagcttaccgaggatgttatgaaaatgatgacccggatccgaaaagactggggactgacttatccagaggaagagcatgccacggaaaaaatctgaggagcagccctgatgcagttcctgacaggctccatgatctctgtggcagcctttgtatggatgaaaaaacacccgggaaagctgacttccgggtgctttatcttatctcgctaaacttagaagaagtttttgcagcgcataagagtcaccatccataactgtaaagcgggctttttttggtggctcatctgcggaaccggaagaggtggcggtgtgcaggtaacagcagtcgatccccgcagctatagcacctgccagatcactggtgcgttcgttgccggtcatcagacaggtggtgaaatctaatccgtagcggtcaaacaggatctgaaaaaaagcgggatccggcttgcagcacccctcgtcagaggagataaggataccgtcgaacagatcccagagtcccagcgagcgcagctcgtattcggtgaagatccgctgggcattggacaggaggtagatcccacagccttttgcatggagctgctgcagtgtgccaatcgtggcgggatagcattgtaaaatattgagggattcgatccggaagaactgaccggtagcggtcagaagagcctctgtgggttggatccctttttcgacataaagagttcgaaaaatatctgcggcgcagatctccggacaggtgtaagatgagggaatcttgcgggcagccgtttccagctggcgatatctgttcctcagttccctccccgtataggaagcaccctggaaggtatagaacagcgcaagccttttccagagggaagttttattttcattagtgtggatgtctactaaggtgccgtagagatcaaagataaaattatgatacatggaagacctcatttcttgtggtgaaaaaccttattccagggaaaatcaggacggctcttttctcaagcggaggcagagccgatagatatagtatagcatttcttgcatttttcaacaattaaaaatataatgataccaggggcaaaaggtctaagcccacacgagcttgctcataagtgggtgaaagaccttttgactccgacggaactattcagaaccatgaaattatgaagcttttgtaccgctggataaagaaaacaggagcgaccggcggtatgcagggagagtaccgatgatacgaaatactggtccggggaagagacttctggcagcagggattgtacttatactaggcatgaccggctgtggaacagacaatgaattatctctgacagggacggaagagacaggaatagaagtaatggccacggtggatttcacagaagaggctgccaccggggagaatgcaccggatgtcacggatggggatgccgccgccggagatgcagagcagactacggcggaccgcatggcgggacggacgaaggtaaagggcatttacgtcaccggcccgaaggctggcagtggcggaatggaagatctgatccgcctggtggatgagacggaactgaatgccatggtcatcgacgtgaaaaacgacgagggaaatttgacgttccggctgactaatgaggagattccacaggacattcccgtgctggaccggatatccgaaatgcaggccggaatacgttacatccgggacattcagacaatgatgcaggaattgaaagatcataatatatataccattgcgcggatcgtatgctttaaggatcccattctggcggcggcacagccggaactggcactgacgaagccggacggtaagccggtgacagatgccaatggactggcctgggtaaatccctacaggcaggaggtctgggaatatctgacagagcttgcggagatggcggcagatctgggttttgatgagatccagtatgattatgtgcgattcccggtaggttcggatgccgatgcggcagattacggtgtggatatggaagcctatccgaagcggcaggctatacaggattttctctcctatgcgggagacagacttcacgaaaagggctgtgtggtcacggcagatgtcttcggcactattatcggcagcgagacggatgtgcagaccgtagggcaggattacacggcactgggacagacagtggatgccatcagccctatggtatatccctctcattatgctaacggtgtgtttggtctgaaggtgccggatgcccatccttacgaaacggtatcggccgccatgcaggggtctgcagaagaattgcaggagattccggaagcggagagggctgtagtacggccatggctgcaggcatttaccgcaacctgggttccgggacatatttcctacaacggaacacagatcagagaacagatccaggcagtctacgatgcgggatatgaagaatggatcttgtggaatgcaacgaaccgctattctccggatggattacttgccgcaggagaagagaagcaatagcggcagaagctggctttataacaaatccgggcaggagcacaggccaggagcccggtctgataggagcataagatgaaagtagtcaataagatcatgataggaattgcagtgttgtgtctgctgttgtgtggcggaatcctggtattcgcattgaaccccaatatgaccagttctctggcgcagaaactgtatggcaatacagtggatataccccctgggaccgaagagaccggggaaggacagacttccgggaatggaaatatcagtgtgacgcttcctaatggtatgccgggggaaatgaacggctacgtggcgccgtccatggatcagatgcagattccggaggatgtcagcggcaggacaggatttactcccgtgcagccggaagaacagcagattccggatcaggaagcacagaatctgaaggaaacattaggttccggagaaacgggagaggggctgttattttccgcagaggagtatccgtattatcagatgttgtcggagaatcagcagtccgtataccggcagatttatgccaacgcacagaacctgacggaaaagtttgcaccggagaagaccgtgtctgccagtgatgtaaagacagcgtttgaggcggtgatcggtgatcatccggaaatgttctggctggagacgggttattccagcaaatatctgaccaacgggcaatgcgtggagatcgatttaaaatataacagtacggcagatgatctggagagcgcaaagcaaagatttgatgcggcggcacagaatctgattaccggggcagcgtcccttgacagcaattatgaaaaagagaaatatgtgcatgatgcactggcatcggcagtgacctatgatctgacagcggatatgaaccagagtgcttacagtgcactggtgaatgggaagagcgtgtgtgctggttatgccagagcttatcagtatctgttacagcagctgggaattccctgttattactgcaccggttattccggtggggatcatgcctggaatatcgtaaagctggaggatggttattacaatgtggatgtgacctgggatgacgcagcggccatccgatatgactattttaacaagacggatgcagattttgcctccacccatgtaagacagaatctgtcggtgtatctgccggcctgcaacggtaccgcttacagacaggaaaataccacaggggcagcgggtaccggtcagccgtctgaagcaggtggagccacaccggatccggacgcaggcaccacgccctccggcggtcagacagacgggagcgttacagatccaggacagcagggagacggtacgcaggaaccggagcagcctggcagctctctcagtgattatatcaatccgaatcctcaggagccgttgcgttatccctccggcaataccgcaggctctgcaggcaataccacagctgccgctacgccggagcccagagccgatgcgctgacggatttaagttcctattatgaagactgcaggaagcagctgaccagcctgggaagtggtgaccagcattttgacaatgttgtgcctaagagcctgtggagtaccattgagcaatcctatcataccggagcctacgagcagggatatgtggtggatgtgttgaaaaatctcggtatggagtattttgcaatacagctgcagctggtggatatcggagacggatattacagagtgtatcataacgttgtgacctattaggaaacagataagaaacactggtatcgaaaggtatcggtgtttttaaattatagaaataaaaataagaatcattactaatattattgacagataatttcaactgtgttattatcagaataaaaaaataagtaatgttaagaaaataaaatatggtagataagagatactaaaaaggaagcgaaacaggctgaaggagaaaaggagagaatataatgaataacaaggcaatgcacaaattaagttatggattatatatcgtaacgacgaaagatggagagaaagcaaacggttgtatcgtcaatactgcgattcaggcggcatccactccgaatcagctctgcatatgcatcaataaggcaaattatacccatgatatggtgttaaagactggcgtgttcaacgtatcggtgcttagtaagacagcactattccctctatatcagcgctttggtttccaatccggccgggaagtggacaaattcgcagactacacagcgtataaaaatgcggagaatggcgtgccctacatcatagaaggcacaaatgcttatctggcggtaaaggtcagtcagaccgtggatctgggatcccacaccatgttcattggtgaagtgacagagatggaagtgttaagcgaggagccatcggcaaactatgagtactatcaagaagaggtaaagccgaagccggaggaagtgggaaaaaccgcagacggccagacggtatggcgctgcaccatctgcggttacgaatacgtgggcgaggaactgccggaagattttatctgtccgctgtgcaaacacccagcttccgattttgaaaaggtgatcaaaaattaatccagtggttttaataaggtgaaatgactgcgctgtgtccggaggatgccaagctttgtgagcttgcccagctctgcggacatggcacttctttctaccccgagataatccgccagctcctgccggttgaaagggatggtaaaatcgttgctccttttcaattatgcctgatcggtaagataggccatcagtttttcccgggtggtcttacgggaggtatatttgatcttctgattcagatacatatttttctgcgctacgattcctaggagattgcgtatcagggtatgatggaaagtgcagctgttgtcgcaggtgtttaacagtgttttcccatttaggaacatcactgtacaatcctctgctgccacaatatccacgggaagatatggaattcctgcacaggcaaaagcctccccaaacagggaatccggggggatagaagcggtgatattgcggttgccgtaataatcgtcctgtaggatgtgaacggagccggattcgataatgccgatgaaatccgcaggatcaccggcatgcttgatgtattcttccttttgataggatttcgtatatgcattcagacgcttcagcataacagggatatcttcgggtaaaatattctgaaagaggggattggccataataaattctccttttgttggaaaaccaacatacttgatgggatgattctagtataatcacttcagaaagtcaagataagttccggcgggagcgtcagaatatgcgcagaggtagctgtaatgacggaaaataggatagtgcagttttgcaaatgacgcgtgtcgaacaggcataataacgatgtagttaataaaggatggataacaatgtataaaaatatcgacaaacagaccaaattaaatctgaaggatctggtagaataccaggagggccaggtagtcagcaagactctggcacagaacgattatgtgagcatgacaatcttttcctttgacaagggcgaggagatatctacccatgtagcaggcggagatgccatggtgaccgttctggaaggcaagggcagatttaccgtgggcgatgaggtattctatgtggaagagggcgagacactgatcatgcccaaggatattcctcacgcagtatacggtgaagagagattcaagatgcagctgaccgtatctttctaaattataagtcgtgctgtatataccgcttgtgtggaactaatattcatgcaggcggtacttttttgccctttgtgttcggaattttaccgctggagctaggcgagaacatgatggtgcccataggttagactggttcactatcggttctttttatgaggccattggtcataagctggaaggagaagcgctgcttacgattaatcgcaggacgctggagaagatgattttgtatgcgaagaaaataatgattttgttggaaaaacaacataacaaccggcttaagtctgttatggtattcgaagagacaaagagaacagcaaaattaaggaggcaacatgattcgaaaaatcattcatattgatgaagaaaaatgcaatggttgtggtatttgtgcgaccgcatgtcacgagggtgcgatagatattattgacggcaaggcaaagctgatgagagagcatttctgcgatggcttcggtgactgcctgccggggtgtcccacgggagccatcaccttcgaagagcgggaggcgccggcctatgatgaggcggcagtaaagcaggcacagcagctgaaacaacaggaaaagatgcaacgggaaggtatgcagattccccatggaggatgcccaggaagcagaatgcgtcagatgaaccggacggagaacgcagaaattgtggcagagagtagtgcgacaatgaaatcccagttgtgtaactggccggtccagatcaaactggcacctttgcaggcaccgtattttgacggggcaaaactgctcatcgcggcagattgtaccgcttattcctatgcgaattttcataaggaattcattcgcggcaaagtgacgctgatcggctgtccgaagctggatgcagtgaattacagcgagaagctgacggagattctgcggaacaacgacattcagtccgtgaccatcgtgcgcatggaagtgccctgctgcggaggactggaaatggcggcaaagaaggctatacaggacagcggaaagttcctgccctggcaggtagtgaccatctccattgacggagaaatcttggaataaacaggattgtctgtacggaaagcaggcatctgaaaaatggaggtttgtaggaaaatgcagggagacagaatcatcagcgccctgatcggcttggtgggagccatgtctaataatggcaaaacagagcggacggacagtgtggtccgggaagcatttctgcggttgacagacggcgatagcgaagaagagacagtccagaagattcatgcggagaaattcgccattgcaccggattgcgctaactgtctcaacccctgtggcaatacttcagattacgatatggcgcaattttacgcagcagatgtgaagatcatcgcggcaaagcgggatctgattgaggctatttgtaaaaaaatgagttcatcggagctcattccggaaacagtgtatcagggaattgcctatctgggctatgatctggagccggaggcttatgcgcagatacagaagaagattatgtgctatgatttgattcaataaattgaaagttagtgaagcaaatccacgaactcccggagcatgcgatacacatgtctcgatgtaaggtctccggatgtgaattttctacgaaaagtgatgagtagttctcgtcatgacggggccgcctacagtcgacatccatgtcgacaatcggctgacgcggacatcgtgtccgctttccccctgtctttcagcacttttctagaaaatatcaacatcctccgacaaacatcttcgacatggcaccgcatacgccgggagttctgcgtttgggaaagctttcaaaaaaccagtagccccggctgggtataagaataagcagtgccgtaagcagacgtcg

SEQ ID NO: 5549 - DNA, 15367 bp, Unknown
  gut microbiota DNA sequence
cgccgtaagcagacgtcggtaccatagcgtcccaaggacgcattgcggtcgtattgtgaccgcttatgtaccgctacgctctgcgacaggagcgcatcgtactaaagtacgagcgtgccgcgtttcttataccctgccaagggctacggggatatttcgctaaatttcaagttacactaactcgatttgccggcatagcaagattatgttatattaagtttatcttagagaaatgagagaaagtaatggctggaattgaaaaagtgattttcatgaatatgtgtatggtctatgataaagaaggtaatgtggtggcgctggacaaggtggggaagaattattcgggaacgacatttcccggagggcatgtggagccgggtgagactttcaaagaatcggtgatcagagaaatctatgaggagaccggactgacgatccaaaatcccagactgaccggcatttatcactggatgacaggggatataaggaatgtgggatttttatataaaacgtcggaatatgaaggaaaattgatctcatccgaggagggaaaggtctactggatctccggagaacagtttttgaagaagccgctggcgcccggtatggagcaggtgtggcagatgatgcatgatgagaatgcacaggaatgtttgcagacattgacggaagaaggcattgtatcaaagatccagtaggatatttcggaggcaggaggcccgtgaaaacggaaagcatcacaaaggaaacccggtaggaggaaaataaaatgatcaacaaattacatatggcaatgatcgaactttaccatggagatgcaaagcgcattcagcatttttgcaaggtacacagctatgcgaagctgattgcggaaatggagaatgtggatgctgagaccttatttattttggagacggcagcactgactcatgatatcggcatccatctgtgtgaagaaaaatacggaaactgtaacggaaaattacaggaaaaagaaggcccggccattgctgaaaagctgctgtcagatcttggtttttccggagaagtttctgagcgggtacagtatctgattgcccatcatcatacctacaacaatatagacggcattgattatcagattctggtggaagcggatttccttgtaaacatgtgtgaggacgaactgtctgaagaagccttgcagaacgcttatcggaatattttccggacggaaactgggaaaaagatctgcagagagatgtatgatatagcatgacttttttgcgaatgaaaagatcgccggagagcttgacatgacgaaaggagcattataccgccattacaagagtaaaagagatatttttgactgcattgtagagcggatggagcagggagacagcgagcaggctgcagagtatgacatgccggaagatgataaagagagtatgccggatcagtacaagacagtgtctttggaggaatttgtcgaatatagcaagtctatgtttgcatacaaaaatgcaattgaaaaataagaaaaacagcttgcaaaacaaatggtacagtgctactataaccacgaaaaaaacaagttggaggtgaatttcatggacagttgcgatggttatgggcgaagtagaaaacacggtgctttttcctgcgagcagggtacagctgtctgtggaaagtgacggccgtattttgatttgttgtgcatagagatttatgcagaggaagcatcgtgtgatgcttcttttgttttgccctttacgttgcatttaaaagatgagaacgagaaaggagacttagactatgaacaagaaatattccgaactggcagaattattccgcagcgagaaaacggatgaggagatcctgaattttttattgaattatcataaaaacgatattgccgatatgatggcggggatgacagaggaagaacggaagcgattgtatcatctgctgggagcgcagaaggtcgcagagatcttcaaatacattgaggaaccccgtaagtatatccgggaactgtctgtggagagtgctgcgagagtgatctccgagatggattccgatgacgccgtcgatttgttggaagatctggatccggaagagaaagaacagatcgtccggatgctggacgaggatgcgaaaaaagatgtgaagatgctgttgtcctatgatgaagaagagatcggcagctgcatgacgacgaactacatctgtatcccggagaacctgaccatcaggcaggctatgagcgagttggtaaagcaggcaggagaaaacgacaatatcatgaccatctacgtggtagatgaaaagggtgtttttgccggagccatcgatctgaaggatctgatccgggcaagagaaaatacacatctggaagatctggtgttgaaatcttatccttatgtgaccgatcatgagaaaatcgatgattgtatggacaggatcctggattatgcggaggactcgattcccgtattgtcagaagataagaaaatcctcggtgtcatcacatccgaagacttgatcgaaatggtagacaatgagatgggcgaggattatgcaaagttagcaggtctgaccgcagaagaggatctgaaggagcccacgcttcaaagcatgaaaaagcgactgccctggctgatcatcctgttgttcttgggcatgggagtgtcgtcggtggtaggtttattcgaaaatgtggtggcggtattgcctgtcgtgatctgcttccagtcactggtactggatatggcgggaaatgtgggaacccagtccctggcagtgacgatccgtgtgttgatggatgaaaatctgacgggaaaacagaagtttcagctggtagtcaaggaagttaagaccggttccttaaacggagcactgctgggcattatggcattactttgtctcggtgtctatgtgcatctgttcaaaggatatacctggatgggagccttcggcatctccggctgtgtgggagtatccctgctggtggcaatggcaatctccagcgctgtgggtactgtgatccccatgtttttccataagataaaggtagaccccgcagtggcatccggtcccctgatcaccacagtaaacgatctggtggcggtagtgacctattatggaatggcatggctgcttctgatccggtagcaacagaggtgagtcctacctttaagtggtggttgtaaaagcgtaagaattgctattggtcagtgccatacaggtggcgatgacttttcccatatcatccagggcaaaaaataccatagcgcactgtgtgatcagagcttccccatgatccatggcatacgggtcaaagttatgcggtttatactggatgactgatacaatgggtcagcttcttctttctgtattcattgggactcatatgataatgctgtctgaattttcgacaaaaatagctggaacttgtaaaaccgttttcttcagcaatggaaaaaacgcttttttgagtagtataaagctgttcggcagcctgcgccagtctgtattgaatcagatatgctaccggagaacagtggatgttggattgaaaaatgtgtaaagcaccacttttgctgatagatgccgatgctgcaatcatttccagcgtaatttcttccatatagtggtcatgaatatattgcatcatagtttgtaagcctgcctgtttgtgatttaaccgatgaatactgtcaggatcggatttccaatctttattttcaaatagtatgttccaaagctgaagtaaaagctgcatggtacctaattcattagtttcttttgcttcttgaagggaaaaaatatgtgtcaaaagctgcagaatctgattttcccatcggttgtatgggcgaagcacctgatagggaacagaagagtttatcacagggataatatacttttcataaatgaggctgttttcgggggctaacagagtcggcgaaaaaacaatgttaggtgtaaatgtactgccttgtacttcaaaacgatgaatgataccactattgataaatatgccgcagcctttcggcagttctattttgcttgttcctgcaaggcagagaacagagccttcagcaacatataaaaattccaactcatgatgccagtgccagtcaatgtgatgaaagtcaaattcccagatattttcaggatagtatgcaaatggataatgatcactgccatgttggacggtttcgcgtagtgtttcatctgtagttattttataaaaatccatggtagatttcctcacaaactatagagtttgttatattgtactataaaaatgcgattttgtgcaatgactgaatctttgatttgcgatataattccacctaacaggaggaaacaaaatgaaaaatcaatacaacaagacaattacagcctgctttgtggggtatattgtacaagctatcgttaacaatttcgtaccattacttttcttgttttttcagaaaaactatcatgtgccgatttctcagattacattactggtgacttttaattttggaattcaattgttggtcgatcttctttccgtcaggtttgttgatagaataggttatcgcgtatccatggttatggctcatgttctggcagcggcaggattgatccttcttacagttttaccggaagtgataccgataccatttatagggatattgacttctgtaatgatttatgcagtaggtggcggacttttggaagttctggtaagtccggttgttgaagcgtgtccatcggataataaggagaaagcaatgagtctgcttcattctttttattgttggggacatgcaggagttgtactcatttcaacattgttttttcatgtggctggtatagataactggaaaatattagctattatttgggcggtaattccccttggaaatgcttttattttttcaaaagtcccgatggcgccattgcttgcggatggagaggccggacttggggtaaaggatttattccggttaaaaatattttggatactgctgatcatgatgatatgtgcgggagcaagtgaacaggcagtaagccaatgggcgtctgcttttgcggaaaaaggtcttggtatttccaaggcagccggggatctggcgggaccgatggcatttgcaatcttaatgggaacctcaagattgttttacggtaaatatggcgaccgtatcaatttggaacactttatgatctttagtacttttttatgtattttatcttatttggggatttcgttattatcgatgcctatgttaagtctgattgcctgcgccgtctgtgggctgtcagtgggaatcgcatggccgggaactttcagcaaggcatcggctgctttgcccaaaggcggaacagctatgtttgctttgttggcattgggcggagatataggctgttcgggaggtcctacattggttgggatggtatcaggagctttgggagataacatgaaaatgggaatcctggcaggaattatttttccggtactgttgcttataggaatcattctatgtagaatggaaaatggagaattttcagaataatggaaggtaagatatttatagaagaaggtaaggatggactggggtatatcgtatttgatgtcagacaaaggaaagacgtaaatggattaaccttagatatgataggaatgggaatggatgtgttgtatgagccgagaattgtatctggacgatatgaaagctgcgttatatgtagtgaaaaaataggtattaaaatagttgcggctttataatggcaattccaatgtggttcttgggaagaatattttcagtggcaggaggggcagtaatagcaattatggtggaagaacgcaagacctaacaggacggctgaaaggaaaaatctatttcgaaggagttatcagtttttatgtcagagatattattgggttcccatgtgggaatgtcgggaaaagagatgtttttaggatctgtgaaggaggcggcagagtacggtgccaatgcgctgatggtctacaccggggcaccccagaacacgagacgaaaagagataaaggatctgaatctggaggcagggcttgcctatgcagacaaagcaggcatcaaagaaatcgtgattcatgctccctatatcattaatctggggaatatggaaaagccagagatgtttgactttggggtggaatttctggcaaaagaagtaaaaagagccgcagcctttcacagtaaggtactggtactgcatccgggatcttccttaagcgccggagtggaagcctctgtagagcagatcgcaaagggactgaatctggtgcttaatgcagatgacagcgaggtcaacattgcactggagaccatggccggtaagggcagtgaggtcggcagaacttttgaagaattgcggatgatttatgataaagtggatcgaaaagacagactgcgggtatgctttgacacctgccatgtgaacgatgctggatatgatctggtgaatgattacgaaggtgtgcttgcgcagtttgacaagattctgggattggaccagatcgcagtgatccatgtgaacgacagcctgaatcccttaggagcccacaaggaccgccatgccaatatcggacagggtaccatcggctatgagaccctgcaccggatcgtccatgacgaccggtttaccgccgtacctaaaatcttagagacaccttggctgtgtgctgagggcggagacaagaagacgatcccaccgtataagcaggagatcgtatggctgaaagcctgataaatatagaagtaagagggcagacgattgaaaaaaaggattatcgcagcagtagcggtatttggacttttgggcggaatattatattttgcgtatgcacagacagcggcgcagaacaatgtgaagcatttcacagctttttttgctgtggagggagaagccattgaccagaataatgatatgaaaaaagaaatcgcacgcctgacaggtgcggattgtgaagaagtgtggctggtgggacagtccaaggaaagtgccttgaacagttatattgtgagtggggaatatccggattttatttccggagataccagtctttatgaggcaggggcattacttcctttagatgaatactgggagaattatcccaatatcaaaaattacctgacggaagaacagtgggagagattccgcagaccggacggtcatatctattggatcccccagtttggtgtgacccatggcgaagatgtggaggtgacccactcaggtgaagccttctggattcagaccagagtgctgaaatgggcggggtatccggagattcatactgtggatgaatattttgatctcatcgagcgctatgtggcggcgaacccggtaatggaggatggaacaccgaacattccgtttacgattttgtgtgatggctggcggtatttttgtctggaaaatataccgcagtttctggatggttatcccaatgacggaagctgtattgtagatccggatacgttacaggtgattgattataataccacggatactgccaaatggtactttaaaaagctgaatgaggaatatcataaaggtattcttggtgcagaagtatttacagagacctatgaggactatctggcaaaattatccacaggggcagtctgcggtatgccggatcagtggtggcagttctattattcgattcaaattgcctatgatgagcaggggctcagagaacagggctgcgattatgttccacttccgattaccagagaggaaggaatcgccaatcaatggcatgtaacgcgctctgcagagctggacagctctacaggcttatccattacggtatcctgcgaggatattgacggagctttgcagtttgtcagtaatctgctggaaccggagatcattaaactgcgattctggggcgaagagggagtcgactatagcgtggatgagaacggattgttctacctgactgaggagcaggcgaagcgatggatgacttcggaggaaaagagaaaacacttttgtttttattcttattttcccagagtggaaggaaagcttcccgatgggatcaacgcattttccctggaatatcagacaacggaattttttaaaaatcaaccggaagatattcaggaatgtttttctgcttacggagtgacaaattatgtggatatgatcggcaacaatgagtctcccggggcatggtatcccatgtacagttataccacatccctgtcgtctaattctcctgcgggacagatccgggatcagatggaagcggtgaaacacaaatggcttccccaggtgatcatggcagaagattttgagactgcgtgggagcaatatatggaagcatatgattcctgtaatcctgagatttattatcagatgttgcagcttgaggtggaaaaaagagtaaaaggataagtttttcacaaaaaagtataaaaaacaaatagaaaaatacttcccaattcctttaaactaaagaaaaggattgggggtatttttttatgaacgagaagagaaacggagctttggacagatatccaatagaaaaaaagagagcaggaagaccatctgttacagtgaaagaagacggcgcagtcattttttatctgtatgcaccggcagcaaaaatagtacaggttgccggacttgggggatattttacaaataagaaaataaatctgatgcccgatgggcagggcggattttttgcggaagttcaagattttcactgggggatgcattattatttctggtatgtggacggtgtccggatctgcaatccgtacgccggaatttcttatgggtgttttgctgcgatcaatacttttgaggtgcaggagaagaatgtggatttctattttgcaaaggatattcctcatggtacggtcagcatctgtaaatacgtttcgaaggtgagcagccacctgaaggaatgttatgtctatacaccttatggatatgaagaaggagatgaaagatatccggtattgtacctgcagcatggcgtaggagagaacgagaccggatggatctggcaggggaagacgaactttatcatggactatctgatcgcagagggaaagtgcgagaaaatgatcgtggtcatgagcagtggctatgccttcaaagatggagaaaaacctgtattttaccctgggaattttgagagtgaactgatccacaacattattccttatattgaaaataatttccgggtgagaaagggaagagattaccgggcgatggcgggactttccctgggatcggcgcagactacggatattgtggcaaaaaatatgaagttattttctgctgccggtgtattttccggagttgctattcatgagatggaacggatctgcgacagcaaggaaacattggatgtcgtatttatgtcctgtggatgctatgaggatcagatcagaacgggaatgaagcagatagaacaaaagtttgaaaatgcaggaaagtattgcatttccaaagtatatgagggatatcacgaatggcatgtctggaggaaaagcctgtatgattttgtaccgttattgttccggaaagcgggggcagaaacggatgacattccgggggaaagaacagccagaatcacaagacagagactacagcgacagaccatggaagaacagatactgatgtttgatccggtataccgccagatccgctttgagactgatgaagcagggaggcctgcaggaaaatacccggacatccctcacggaatctgcattacggaacagggaacggcagtcgtatgcttcgaggcaccggaggcagtctcggtagaagccgccctggacggaaaagaattcctaaaactcaggaaagatcaggaaagacaaggatattggacaggggaaatccacaacatcacgccgggataccataatgtgtatttcagggcgaatggtacggatgtaatcaacccggatgctccggtgggatactcgggagacagggctgtgaactatctggaaatgccagatccggagttcccgctgacagaacttgtggacacagtgcatggtcagctacatatacattatgattaccttacacaagaagaaaaggtgagtacgatttatgtatatacgccagcatactttgaaagagcggaaaaagaacggagagtgatgctcttaaaagcgcttcccacagagactgcgtcttgtttcctgcaccaggggaaaataccgaacattatggagtattttctggcagcaggaaaagccgtagagactatattggtgatgaccgatgccgaagagacaccggaacggatgcaaaatattataaagaaatatattccggatggacaaaaagcaaaagcaattgtcatggaacgaagcgacggagaagattggaattccttccggagacgatttgcagcctgccggatataaaattattacctgcatttcctatattttcccgggtgtttgtgcaaggagagccggactataatagaactgataaaagttcgggagggatagaaatgacaggaccggcagcaccgaaggatccggaaaaggcaagaccttttttctatatattaaaagacaaagatatttttggagaacggcaaaaggacggaaccggaatccagtttatctatgaaagcgacggacggctgatcaacagtgcacagatcacgggaaatgttacggataaggaagaactgacacttctggagacagtagagggatttggcagattggtacatagtatcggcgtaagcgtggagacggaccggccggaagaaaccgcagaatttgtatttcagatgtatgggaaaaaggacctatacggaggtggaacgaatcttacgacttctcttaagtgtgacggcatggaacatagaatctatctgtcggattacaggtggacagaggatgatcatgtgccgggacagattaaaattctgtttgcagcgccggagcggatgggaaaagtcagtgtaagactcttcctaaatgacggatacgaagcacctccggaggaagaggatctggttatagatatgcattcggaagaatactgcggcatgatcagccgctctctgttgcagctggggaatccttatcgtatccgtaaggctattgaaaaatctaaggcaggaaaagaggtaacgcttgcctatatcggtggatctatcacgcagggagccggagctataccaatccatacggaatgctatgcatataagtcctttcaactgtttcagaatcgtttttcgacacagaacaatgtcaggtttatcaaagccggagtcggcggaacaccttcagaactgggaatgatccggtttgaccgggatgtgctcagggaaggggaacgaccggatattgtggttattgaatttgcagtaaacgatgagggagatgagacaaagggtgtctgttatgaaagcctggtgcggaaagtgttgaaactgccatggaagccagcagtggttctcctgttttcggtatttgcaaatgattggaatttacaggagcggttaaggccggtgggggatctttatgatcttcccatggtgagcatcctcaatgcggtcactccacagttttcattaaagtgcggcgagggaagaattttatctaaaaatcagtttttttatgatatgtttcatcctaataataccggacataccattatggcggactgcctgcaatatctgtttgagcgttgtgatgcagcagaacctgcaagagttgggacttttgtggaaggaatgacggaggaacagatcctgtcggaaaagctttctggaccggcagtgatcggtgctgattttgaaagaatttttttactggataagaagaaccgttatgtgggagccaaaatccggacgggtagttttacttccacagatatagaattgcagagtgtggaaatggacggaagccttacacagacaccggaatttccgtataactggatgtatgatggaagcagaccgcagatgccgggatttgaaatggagattacctgcaagtcactgtttcttatatttaaggattccggagaaatggatgtggggaaggccgatgtatttgtaaatgatgtatattgtatgacggcggatccccataagaacaattggctgcattgtaatgctgtattactgttttgggagacagaaagcagatcccataaagtacggattacagtgacagaggaagaccagaataaaaaatttacaatcttaggatttggatacacaatatagaacagagtgaggaaaacaaaatggttacagcaaagaatccaattttatccggtttctatccggatccatccatatgcagggcaggagaggactattacattgtgaattccagttttgtgtatgcaccgggagttccaattttccacagcagagatctggcgcactgggagcagatcgggaatattcttgacagaccggaacaacttccggtgaagggaagtgaaatatcacaggggatttatgcaccaaccatccggttccatgatggactgttttacatgatcactaccaatgtaagctacggaggcaatttcattgtaacggcaaaagatccagcaggaccgtggtcggatccttattatctcggcgaagatgctccggggatcgatcccagtcttttcttcgatgatgacgggaaatgctattactgtggtacacgaccgaatccggaaggagtccgctataacggagactgggaaatctgggtgcaggaactggatcttcggcagatgaagcttgtgggagaaagcatggcaatctggaaaggggctgtaaaaggagttatctggccggagggaccgcacctttataagatcgacggttactattatctgatgcatgcagaaggaggaaccggaccggagcacagcatcagcattgcaagaagtaaaaagctgttccagtggttcgagggctgccccagaaacccgatcttcacccacaggaatctggggaaaaactatcctgtgatctacgcaggacacggagatctggtggaggatggtaaggggaactggtacgtggtaatgctggcatccagaccttgtgaaggacacagcagcatgggaagagagacttttctggcgaaagtcacatgggaaaatggatggccggtgattgcagaaggcgtcgggcatctggaagatacattggaactgcccacaaaggaataccgttttccagaggaagtaagcagtacttccgatcatatcagtttctgggagaaaaaaccggacaaacggctggtaagtgtagaagaaatctgtgaagaaaactattcgctgagtcaccgtccggggatgctgcggctctatacaaaaaaggaaaaaatatctgactgcaatcattgttcctatttcggaatccgtcagaaaaattatgcattctatgcagagactgggatggaatttgaaccgaagcaggaatgtgagacagcgggaatggtgttgtaccagaatcatgaaaatcatctgcgcatggagatccggaaaagggctgacgagaattattttgttgtgacagcctgtatccatggggaagagagaatccttaccgaaaagccggcaggagaaggtagacaattctttaaaatacgaatgcattgcgacaggcagaaggcacggatatggctttttcgggatggcagggagagtctgattgctgaggatatcagtctgcttccttataccacggaggaagcagggggatttgtgggatgtacgataggaatgtacgcatctgccaatggacaggacagcagtaactatgctgattttgcctggtttgtgcagaatgccatataaaaatgcattgcgggcagatcataaatgtcctataataaagaagagcaggctacagaaacgtctgctctttttcacataaatgaggagaggatcttatggggaaggcattacataagctgggtctttggatggatgatttcaccatcaaaaaaaagttttatattttctatgttgtctgtgtgttgattcccctgattgtaacagacagtgttgtgttcctgacgactgcaaaatttgacagagagcgcagggagcatgagatgtctaatattaccagtgcggtggaatacagtctgagcagtatgatcggaaatgccggggagataggcaacagtatttataccaatcgcgattttgaagatttcttatccaaaagatacactaattctgcagaatatgtggcggcatatcagaatttcctgagcgggacgttattggaaaatgcactgggaatgaacagtatgatatttaccctgtatacggataacgacaccattgtaaacggaggaagagtcaatacgctggataagctcaggaatacagagagttatctgcggctgaatgaagaagcgaaaagcaaagggctcttttttgtctatgatgacagcagttccaaaatcacaagggaacggcgcatcatttatctacagcggctggatttctatgatgcagagacagaaaagtatttaaaaatcgagtttgattatggcagtatggtgcgcaccattaaaaacatgaactatgataatgaggttctgatctgtgaaggagatcggatccttctttccaatggacaatacggcagctacggcagtgagtttcagcggctggataacgcaacaatgagagaagcctatgaacataccatcagtctgtatggtacggaacttacgatttatgtaaagccggtagagaacagttttcttacaagcatccggaacgaacttcccatcatattgctgctccttgcggtgaatgttatttttcccttctggttcgttcagatcttcaaccgttcctttacaaaaaggattacagaactgagcaaggtatttaaatcagtggacagtgatcatcttattccaatgccctgtgaagaaggtaaagatgagatcagcagtatgatacgcaattataatcgcatggtggaacgtaccaatggactgatcgagactgtatataagaataaaatccatgagcaggagatgctggtgggaagaaaaaatgcggaacttctggcattacacagccagatcaatcctcactttttgtttaatgtactggaaagcatccggatgcacagcattttgaaaaaagaaaacgagacagccgacatggtgtccaaactggcggtgatgcagagacagtatgtggaatggggcaatgattccgtgagtatcttccaggagattgaatttgtgaaagcttatctggcgcttcaaaagtatcgtttcggagaacggctgaattatgacattgaagtagacagagaatgtgaaaacttcaagatacccaagcttacgat

SEQ ID NO: 5550 - DNA, 1243 bp, Unknown
  gut microbiota DNA sequence
taataatggcggaactcaaattatccgtaatgaggtacaccgatgctgcgatcggcaggggtgccgccatcatggtaaagaagcctttcatggtacggacgctttttcccatcttgcataccagacttgccaggaacaggatcatacacaatttcgctacttccgcaggctgcaggttgaagcccgtatgtgggataccgatccatctggtagcgccgtgggaagtgatacccaggggggtctttaccaggaagatcaggatcatggacaccacatatcccagggtggcaaaccgttcccagaaggtatacgggatattggcaatgaccatcatgaagaccagaccgatgatattggcgatcagctgtttcttcatataataggcggcatctccataggaatcataagcctcataggagctggccgaatagatcatgatcagtccgaatcccagtaaaaacagcacaataaaaagcaggctgtagtcaaaaaagtattcggattgttgtttctttttacgtcttcttccccgcgtttccgccatgcctgcttttactccttacttctgttatgatttcttattccgccagtccgtgtacatattccttgaaaagctgtcctctgacttcatagttcgggaacatgccccagcttgcacaggccggagacaacagtaccgcttctcccggctgggccagttcggtacacagcttcaggcattcctcataggtatctgcgaaacggatcttatcaaagccatgctttctggcacactcggcaatcttctctctggtctggccgatgaggacaaggcactttaccttgccatcaaagctgtcgatccactcatcgtactcgctctgcttgtcatagcctccgcctatcagcacggtaggcttgctcatggctttgatgccctggatcgccgcatcgggattggttcccttggaatcgttgtaatagtccacaccgcccttggtagccacgaattcgatccggtgctccaccgcatggaaaccgcggatcacagtaaggatcgtctccatgggcacctgcataccttctgcaatggctatggctgccatgacattttccacattgcacaggcctaccagattcatatccttgtgaatatccatcagttcggtctcttcgccgttcacactcttgataatcttgtctccccgcaggaagtaaccgtttttcagctcgtgatgggaggagaacagtaccggagtcgcag

SEQ ID NO: 5551 - DNA, 11893 bp, Unknown
  gut microbiota DNA sequence
tcctttggaatcggaatctcaccggagagagcccctgccatcagctatctgaaagattgcgccacgatggctatgaacagtatcaaaggcaaagtatatcggacatatgcagtatttgatgaaaaaatgcgtagtcagaagatgcgagaacgccaggtggaaaatgatatcgtgtcagcactggagaacggagaactacagttgtatgtgcagcccaaggtcgatatgagggacggaagagtgatcggaggcgaggcgcttgtgcgctggaagcatccggaaaaggggctggtgccaccgggagagtttattcccgtactggagaaaaacggatttatcatcaatgtagatgaatatatctgggagaaagtgtttgcttatcttggaaagctgcgtaaggaaggccggacacttattcccgtttccatcaatgtatcccgattgcatgcgtatgatgagaaactgacagagacactgctccgtctcagggaggaatatgatgttctgccggagtatgttccgctggaactgacagagagcgcattcctggaggacgaggttggtatgtatcgccgcatggaaagcctgcgggagcgagggttcctggtgtccatggatgatttcggtaccggatattctactatgaacatgttaaagaatcagacattggatgagattaagatcgatcgggaattcatccgggatctggagaaagataagagtcagatcattatccgcaataccattgccatgctgcagcagctgggagcccatatcgtcattgaaggtgtggagacggaagaacagaaggagttcctgttaggctgtaattgtaccgatgtacagggctttttattctaccggccgatgccggtggaggagttcgacaaactgctttggcagcaggaacgggagccggatatggcaaaatagacaaagacaaaatagacaaatgcgcagaccgcattctgacgggctttttgaaattaacctgacagaatgcggtttttctttggccattcttccgaaaatgagaaaatagttccggaggcgttgacagatgccacggaagggagtaatctgcatattacccgacaggtcagtcgaggtcaaaattctaaatatcaggtcatattcgaccaggaatcacataatgtattaattagtgcaaaatggattattttgagaaaaaccaacaggaggatgtatggaggaaagagaaaacaaaagggaagaaaccgcctctgatgcagaattgcagaggctggtagaagattttatcacacagaaacaggtgcttttgatccaggtaaaaaagggtgtgttgggcaaggaggaatttctgcaggaggcaggaaaacatatcgatcaatattatcatttcccagcaacgaaaaggaaaagacttttaaaatcatttgaacaatatattttcggttattccagactgtcaccgctcatggatgacaaaagcatttcggatatccgggtggtgagtcatgactgtatccggatcaagagagaaggaaaacgtatggatgccggaattgcctttgcttcggagaaggagtaccggcagtttattgattatgtggcaaccagaaatcaggtgaatatttctaacctgaatgcgatccaacggtttacggatacagaaagtcatccggactttatctttcgttttaccttatccatgcccattgtcaatacctacagcgaaccttatctgtgtatccggaaggtgccgaagagttttcccatgatgacagaactggtggagaaagagatgctggacaggaatacggcagaactgctggtgcagaggttccgacagggatcgaccctgatctgcggaggaaattcttccggtaaaaccacactgttaaatgcgttgaaggagacgcttccggatgatatggcaattctggtggcacagcaggcggatgagctgaccacactgtttcatccggatatgatgttccttcattcgcttccgggaacctcggaaagcagtgtgaattatgatttaaaacatatcagcatagcgggactgacgatggacgtggatttttttatcataggtgaggtgaagggaggagaagcattgtatctgttgaatgcagcgtatacaggacagatctgtgcggctacggtacatgcaccctctgcggacagggcgccggagaagatcgtggactatgcaatgtatgacagtcgttattcccgcaacgaattaatgaaaatgatggactgctttcagaccctggtgtttatggaacattaccaggtgaaggagatcttcgcctgtctggggtggaatgcggagaaagagaatctggagtatgagagattgttttgaccattacatgagaggagagacttatgatcatatacgtatggatcttttgtttaatatttacgggttttctgcttctgtttggaaggatacggtgggtagagacggcaaaacgcctgctgtcccggacgaaaaaagggatggatcagtcggcaagactgcgggtattggaaaaccggcacaagctgcaggaactacagcgtaacaatacctggatctgccgggtcgaagaatttctctgttattgcggtatgcggcgcagatttccggcgtgcaccccggagaaatggatcgtaggaaatcttctgggaatgacggtgatctttggagtgttgcttggaagcagcgggaaattccaggtagctttattgggaataatgatatgcggagccatggaatatctgttcctgagcacactgcgggcagaagaattgcgggtgaccaatgaaaatctgctgaaatgtctgaattttctggggaattacagtctgacagcgggagagatcaccatggttctgggtcaggtgagccgttatgtggaggagccgttaaaaggagcactggaggaatgcgcctatgaagcacagacgaccggagacagttcgctggcacttttgtccatggcggaacgaatagaacatcccaagataaaggaactggccagaaatctggagatcagcatccgctacatggcagatctgaccacactggtagacagcagcagacgttccgcgagggagtatctgcgcatggaagaggaacgcaaagggatgcttcgagaggcaggtatcaatatggcattgcttctgggaatgtcggtattcgccctgctgacggtggaccggctgatcgatgtgtcggtctggaaaatagtatccgggactttaccggggcatctggcagcaggtatctatggactgatattgtttctgtttttgcgaaaactgtatggttttcgccgctagtcagggaggtgtggagaatgagctggagagttatctggattcccgaactgttgggagcggtgctgggaggaatttttgtgttccggctgggtatgggaacaatgccgaaaacggtgttgcatgcctgcgaggaatttaccggaatgctgcgggagagccgaaggtatgaaaactgggtcaccggaacagaaaagaaattaaggaaaaacggtgcaaaatttcactatgggaagaaaattacaccggtaaaatacctgctgatgcgcctgtttctttctcttggcgcagtactgacactgggaactatcggctggggatatgcactgcttgcggcaatgggactgtattatgtgccggaactgttattgctgtacctgaaccgacaggacaatcgtaagatgatgccggatctgcagctgatctatcaggcactggaggtacagacctgtgccggagtctatgtaacggatgccttgacggaatgctgccagagcgtacggacgcagagattacagcaggcattgatggaactgtccggagatctggtcatacagtcggatctggttacggctttgtctgacttccaacagaaatttgacaaccgtcagatcgatgcattgtgcattaccctgatccaggcaggagagtcggggcaggcggtagatctgttgaaggacatgggagagcagttgaaggatatggaacttacggtgcttcaacagcaaaaaagtgctctggaccgtagtattactttttatcagctgggaatgctgggggcggtactgggaatcattttatatgcctgtgtgggatatatgttccgggcagtggtgcaattctgaaataccaataaaacaaaacaagaaagggacaaaacatgaagaatttacagagaatctggggaaaagtaaaagaacatgccttacggcaggagcaggggatcgacgggatcctggtcactgtaggtctgtgtattattgcactgttattgtgcgtggtcatgaaggacagtctgacaacgtttatacagaccattgtaacagcgatgcagaccaaagcggcagatatcctgacaggggtataggataggagagaagatgacggaacgagggaaacagccagggaacataggagaactgctgacgatgggtatgtgtgtgctggcactgacggtagtgatgctgaactacctgcagaatgtgcagctgctccaggcaaaagagaatgtaggacagctggcgagggcctatctgctgaaaatggaaacggtagggtacctggaaccggcggagcaggcacacctcacggcagaactggagacggcaggactgacagagatcgattatgagggaagtactttggaacctgcaggatatggggaacgcattatcctgcagattcacggaaagctgggcggacattatgaaatacgggaaaagagagtatcgactgccaaaaactgagaaccggcaggagacaggaaaagcagaaagtggacaggtttcctgggtgctgggattgtttctgatactgtttctggcaattttgttgtatatgcagctgcaactggcaatgtacaaggcatccgcacggtatctggaagatgcattggcactgtccaatctggcatcggcagtcattgatatccgggagtatggcagcacacataaggtacatatcacagatcaggaacaggcgtatgcgggatattgttctgctgtccgtgaaaatctggggttaaatgaaaattatgaagcagtaggtcacaagctgatttccggaaaggtagagatacgaaattatattatctataatgtcacgggaacaaaagtgcaggtgtgggaacgaaacggtgacggaaggatcctggaatgggaaggaaccctgggagaagtgaggactccggggggacagaccattgagaataccggtgtgtacagtgagatcacatatccggtggaaggttttctgggaattacagtaactgctgaaaaaagtaagctggtagatgtggtcagtgaatatatgggagaggaaacgaatgaaaaaacggaagatgagtcaggcgtggaagaatagaatctggaacggaagtatcctggcagcgtttgtggcggctatggcagtatttgtttttttgctgcagacagaaaagagagtgcttacggaatacgaaaaagaacaggtatgcgtggtaacggcggcaattcccaggggagaaaaaatctctgcggaaaatgcagagcagtatatgacagtcatggaaatcgacaaaagaattgtgccggagactgcactgaaaagcacagaggcggcaagcggaagaatagcggcatatggagtggaacaggggatggtactgactacaggcatgctgcgggaactgtcggagatcacagaacagatgcgggaacctgttatagccggattccgcgccgaagatctgtaccaggtagtgggcggtgtcctgcgtgccggagacaggatccatatttattgtgtggaacaggaggaagaggaacaaaacgggaaactgttgtgggaaaatgtgtttgtccaacaggtgtttgaccggaatggagctgcaatcggcggtgatgatgggacaactccggcacagagagtaaatatctatatggaaaaagaaagggtggcggacttttatgctgcactggcacagggctccttgcgtgtggtcaaggcagaggatgcggataggcaggaggaatgagaatgcggtatgggagatatctggcaggattactcgtgctgggaattgcgctcctgttttcgatacagtcggaagcggcagcgaaaaagaccatttacaacagtccttatgtttctttcagtccggatggacgtgcatttacaacctgcgcaggagaccggaattatgtgtggtatgcccgggatgacagcaccactgtgtatacgcagattccttcttcgctgagagatccggtagtgggagaacatatttatacagagaaacggtatggagaaatcccagtgagatattggaaagtggtccaccggccgggacagtgtattcataatggatataccggaaaaaactggcacggggtatcttttggcagacaaaaatgcatgcagtattattattccggctggaaagcctattgtgcggattgtggagaagccattgaagagtacaatatctatatgagcagagaagcggcggcctcgatacagtacctggatctgggcaacgaaagaaaaccgatgagctactattatctctgtccgttctgcgacaatctggagcagggggtggatctgccggcacataaatgtaaaaatatttcctggaatcagtataaggtctgttatcaggccaatacgggaggtgcatcttataacggttatatggatgacagtatccatatgtacaacgatgccatagtctacgaaggcaagacggtcactccggtgacacacctgacagagaacaattacagcaggaccggatatttgttcgcgggctggaacacagagccagatggttcaggaaccgcttatgcggataaagctgcaatcgaaaatctcaggcaggcggattggagagaccggacaacctggacagataacgatcatggtgtagtcaatttatatgcacaatgggtgcggagtgaaagcacccttgtgctttatgccaatggaggaaagtatgatgaccgggagatattttctgtaacgcagccatatcttgaaagatatctgttgcaggaagaactggtctgcgcaccagatgggtatacagtctgttttcgtgccaatggcggatcggagatcactccggtgcaggggaaaaatcggtttgtcgaatggaaaaaggtgcatccgttccgggggagtctggatggaaagcaatatatctttgatgctccggacggtaatgtggacaggctgacggcagtctatcagccggaacctgtcacattaccggagaccaccagacccgggtggtcctttggaggctggtattatgactcggaattccgacggccggcaggaggagcgggcgacagcatcataccgtccgaaaatacgacattgtacgcgcaatgggtggatcttaccctgctggcgaaagataactacaaggaaaacgaaggaaaaggagcagtggatctgtcctgggagcagacggatcacaacaacaaaacgtaccttatttatcagagactggaagacggtgcctggatgcggattaatagtgcaacggatatcaacagcggagcggccgttgaactgaccggtatttatgaagcaaagacgaggacatataacgtgccgtataccggactctacgtcataaaggcgatgggggcgcagggacagggctatggttcctttcggggaggatgtgggggaagtgcctccggaacattctggctgcagaggggggaacagctgacctatgccgtgggtggtcaaaacgggtataacaaaggcggcagagcttcaaattatggaaacggaggaggaatgacatccgtggtatccgaccggaagggaatcctgctgatcgcaggaggaggcggtggagcatcaccgggcggtgcaggcggcaagggtggcagcatggaaagtgtcctcgggcagcaggaaggagaagcgggtatggccggaggcggagccggatattatggaggaaccgccggagagaagatcgtgcatcaccatacgaatgactgctatagaaatgcttcttatacaccaacattcggagattgggaatattttatgtggggatcgaattgctttgattcctcaggcacaaattcttatcagtataacggacataccacaagtacggacgatgatgagtggagccgtgccatagtccgggtcggatgggccagaaacgggaattatcctaaggaacagatgtggaatgtttccggttatcgggggattcccaccaatggcaatacgacattgaatctttcatatttttgcgatggatggggatctctgggtggaaatattgtgaataccgactggctgccggatgaggagcagccgtcggaatttgtaatcctggatcagaaaggaacaaaaattgcacagggaaaatttcgggattatcctttttatgataaacatggcggcggagacccggcagccagtgatttccggcagtccctgcatatctcattaccggaaggaacgacacatatctacgtgcatctgaattttcatttaagaggaaatgtctggtttaccgcgggaatcagctcacttagtttcagtggtgggagaactcttgtatgcggttatacggaaggccaggtcctattctcgaagccggcatatggcggaagcaattatgtaaatccggaatgtgcactgctatatgaaagtgaaagtggagtacggagtggagacgggctgttgtgtctgcagtcaaaagcaataggctaccaggagactttacagctgaagggagtcagggcaactgatcttgcggctcccgggaaaattccggagaacgtcgtaagagaagcactggacagtgaaagaataagaatctcgtggacagagccggaggattacgggacggtatattatcatagagcggaatcttatctgacgggcagtacttccaaactatgtgactccaatatcgcaaaaaacacattgcttagcggtatcaggggatattattatcttgtggatcaaaacagggataccgtcgtaacggacgatgccggttattgtaaagaaccccatatggaactggaggtaaaggatggggtgcagtatctgcatgttgccgctgtggatgtggcgggaaatgtaagcgagaccacacatatttgtgtggatggaaaacagattctgtggaagcttcatacaaaacagcttaagataaacgaggcagagggcaatgtatatccggcggcagcggacaaaacctggtatgtccgggcggacggaaagacaccgttcacgttaacgaatgcatcttatatggaaggtacagccagaccggactatcaactgaatgggacaatatatgaaacggtgacggaggacggtggcagggcgagaaatatcattgtcacaccgtctgcggagataacggatgatgtgatccggacagatgcggagggactgtcttatgcgactgaggggaccaatgtgctgcagcaacattcctattcctatactttgcggtcacaccggaaccaggaacttaccggagtacagcaatttgtcataagtggagaccggaacggacaaacgattcgggtgattccggtagcggaagcggatcacggaacagataaaatatattctgtatctacgcaggatcagaaaaacgggatcgctctgatcgctgacggagaagctccggtcatcagggggatggaaatactggagaaccgggcactgatcgatcgcagagacggagctgttaccatacgtgttactgccacagatgctctaagtggtgtggatcattttacaattgttatcagtaatacggacaatgctgtttctaagacctactttcccggagaagatggctgtatcgtgattacaatcacagaggacgaaccgctgttcagcggggattttacggtactgggatatgcttcggatcatgtggggaatgagagccgtatctgttacggtacgacggaatttgcactggaaagcagtgtgaaacgtattttggagccgcaggagccggtcttcaaatgcggcgaaagcggaattcttacctttaccacatggggatatgcggaccgggtggaggtcattttcccggaatgtatgacagcactggatccgacattgaataaagtctatgattataccgaaagtcaggggtatcgtaagacggaagaactggaatttatggtgcctttatatactccggagaaccagacacaggaaatcacagtgcgggcctttaaaggtgacaagaggctggaagatcatccgacgatcagcgtgatcggagtgtcgggaaatgtgttggatgaactgcgtacccggttacggtaaggaggtatgagagtcttggaaatcgtgttccggatactgtggtcggtggttctgggaggccttatctatggcagtgcaatctggctgctgcgtgtggaactatcgggagacatcgagaggatgaaacccggaaaagcgtggcttctcgggggactggcctggatcaatgcagttgtgattcttgttatagggggaatgggtggaagacttccggaagaaaacagactggtgatcctgggggcacaggagatcctgtgctccctgctggcgggaggtttgttagcggcggcctgcatggatgctgtacacagttatgtgtataattatgtatggtggtggtgcctgccatggacaggaatactgctggggcttccggtgtcggaagcttatatggaggatggagtgtgcaggattactgacaggtttagcatacagcaggcggcagcagtggcattgtttgtactcctgcagcagatattgtttgcccaaatgtacggaagagctgactgtcatgcattttctgtatgtgcgttggcaggctgcgcctggcaggggaatctgttgtggtttctgatccatatgttatcggcgttgacattgctggctgcagtacagttttgcagaagaaatgtgacaccggatggaaaacttcgtgtaccgaagccgtttattccatatatagtggtaaccttctgggtgcagatcccggtaatgttgtatttgcagagtaaagctgcgtatatttatgcataaacagttgcacaattttcaaaaaggtgctatagtaatcaacgtttaaggacggctgtcgtccgtagaaaacagacaggaggataatattatgaaaaaagcaatcgcaatgttacttgcaactgtaatgtgtacagcaatgttgaccggctgtggttctgattccgcagcaaacgagagctctcaggcttccgggagcagtgtggcagagactgctgcagcaaccactacagaagtagcagctactactgaggccgctgataagaccgagggtggcgtactggtattcggtaccaacgcagaattccctccctttgagtatgtaggagatgacggagaacccgacgggttcgatgtagctctgatcaaggctgtaggcgagaaactgggtatggaagtacaggtagagaatatggagtttgactctctggttagttccattggcaacagaatcgacggtgctatcgcaggaatgaccgttactgatgatcgtaaggagcaggtagatttctccgatgcgtattatgaagctgtacagtttgtgatcgtaccggcagattccgagatcgcagctgcagatgatctgaagaacaagaccatcggctgtcagctgggtaccaccggtatgttcctggcagaggatatcgaaggtgctaccgcacagacctacaacagagcaatcgatgcagtaaacgatttggtaaacggcagagtagacgctgttatcattgataagaaccctgcagaagtatttaataccaaattcgagggtaaggtt

SEQ ID NO: 5552 - DNA, 2588 bp, Unknown
  gut microbiota DNA sequence
acatcggtgaataatttttatacaaaatatacatgaaaaagaagagaatggcttgtgccattctcttctttttgctatattaaggtaggcaacatatacggtttgaccaatcgtacacttatattttcacaagaaaggcataggaaataacatgcaaaatatctggcaacatatttatgcagccttcattgaagcggacagatggaagctttatctgaaaggactgggagtaaccttagaggtttctttttttgcggcactgcttggtatcctgatcggaaccatagcggcatttttgaaattatccacgagaaaaaacggatcgaagaccatagcgtcccggattgcaagtgcttatattgatattatccgcggaactcctactacggtacagttgttgatcatgtggtccggcattctggctacctgtaagaacagtgtgctgatcgccagtctgacattcggtatcaattccggtgcttatgtggcggagatcgtcagagcaggcatcctggctgtggacaagggacaaatggaagcgggcagatcactgggactgaacaaattccagacgatgcgatacattatcattccgcaggcattcaagagcatcctgccgcctctgggcaatgaatttatcgtgctgattaaggaaacctctattgtaggttacgtaggaatgagtgaccttacccgtgtggccaaccagatgacctccaagctgtttgatgtatttacaccgctgcttggtattgccttcatctattttgtactgaccaaggtattgtccattctgcttgcaaaactggaaaggagactgcgtaagagtgataatcgttaaagatctgcataaaagctttgaagataatcaggtattaaaaggggtaaattatcatattcaccccggtgagaagatcgtggtggtaggaccttccggctccggtaagagtacatttttacgctgcctgaatcttttagagagacctaccagcggtgagatctggttcgatggacagaacatcacggatcccaggatcgacatcaacaaagttcgtcagcatatgggtatggtatttcagcattttaacctgttcaacaatctgacgatcatgaacaatattacccttgcccccgtgaaattgaaactgatgggtgaggaagaagcaaaagagaatgccctgaagctgttaaagagagttggactggaggaaaaggcagatgcttatccggcatctttaagcggcggtcagaagcagagaattgcaattgtcagatctctggcaatgaatcccagagtaatgctgtttgatgagcctacttccgcactggatcccgaaatggtgggagaggtacttgaagttatgaaagaactggcagagagcggtatgaccatggtggtcgtgacacatgagatgggatttgccagagaagtgggtacgaaggtgcttttcatggacggtggtaatatcgtggaggagaatactccccaggagttcttcaccaatcctaagagcccaagattacaggaattcttatccaaagtgctgtaggaacagcatcgcatgcaaaaaatgcgggaacggagatccggaatgatcacaatatctttgtgtatgattgtaaaaaatgaagaacgggttctgaaaaggtgtctggacagtgtcagggatctggtggatgagatcattattgtggatacaggatccacggatgccacaaagcggattgcagccggatacaccgataaaatatatgatctcacatggaacgatgacttcagtgcggcgagaaattttgcattttccaaagctacgaaggaatatatttactccgcagatgcggatgaggtgctttcggaagagaaccggagaaggttccgactgttaaaggagacactgcttccggagatcgagatcgtccagatgaaatacggcaatcagctacagaacggcacagtgtataattttgatgaagaatatcgtcccaaattattccgcagactgcgaagcttcgtgtgggaagaaccaatccatgaaactgtacggctggaaccggtagtctatgacagcgatatagtcatcacccacatgccggaacagaatcatgcgggcagggatctggcaaatttccgcaaacagatcgcgcagggaagacgactttccagaagactgtacggaatgtatgcgagagaactgttcctggcgggagaggcaagggattttctggaagcggaagattatttccgggcagaagtttcatccccggacagaagtgcggatgagattacggaaggctgttgtgtggtggccagagccgccagactgcggggagctgccgtgacatttttcaagtatacttccaaggtgattgcaggggacggctgttcggaaatctgctgtgaactggggtatttctatgaagagacgggagactttgaggaagcggctgtctggtattataatgcagcttatgaaacacagccggtactggcgctgcggagttcggaagaagaacctttacagggattgatccgttgttattagcagctgggacttcctgcacaggcccggagctatgcggaagaatta

SEQ ID NO: 5553 - DNA, 1323 bp, Unknown
  gut microbiota DNA sequence
atagcgcatcccaatcatgctttaaaacatcatttttaatctcttcagcaaattgctcctctgctgttactcctgtagatgtcatataataatcttcttctgtttcgctgctttgaatgctttcatcactttcacgtacttcatagtcttctgtatcactcatggcaggcatctttttttcttcaggtgtactgtctatatgctgatttttcatcaaaaatgcgtaagacataatcatccccagcacaatcactaccgccacaaccgcaaatactactttctgcttttttgtcatctttttgtttatcccctattatcttctattttcttctgtaaatgaaaaatatggaatctccagttcttcaacattaccttcgtttgcattcaactattccatatagtccgtctcatcgccttacatattttcaaaaaatttctaatcctctacaatctcttctccataatcatagataggcatctgaccggaaacataaacatcaacattatagatttcaccggtcgcttcccccggtatgccgaattcatggaaacattctcctaaagcataacgataaatggtatatctctctttgcctatataagtatgtttttcataagaatctccatattgttcgaccatttgagaataagtatttccggaatatatgcctctcgaggtatgtgcaaatgtttcattactgctgattcttattctgacacattctttttcaagaaaataaacttgtataaattgagcttccccatcacctacgttataataataatcatattttttgttatccgaatcctcaaccttttcatacaacagccccatcttgtccagcttccccaatatttcctgctcaccttcatataaggaaactgaaaaatctcctatattgataacgacatccctatctgtctgtgcatttgttgcattcggcatttcaccaattctattccttatagccgctactgtttcttctatacttttttctccattaaaataatacaacgtctcttcctgcgtaatccctatgaaaggaaggtcactgcgttgcattaccttcgtattatttatcatctcccttacatcctgtatatcctcatcttgtgccgcataaacattttcataggtaccgccaatttcgtatgtcagaataggaagtttctctctttttccatccgatgtctgataatattcctgctttctactatcactaagctgttgatccagcacatcttgcaatattgagaaattccaattgggagcaatcgttttctgtccttcctcagtaaaatagctttccacaaacttccatg

SEQ ID NO: 5554 - DNA, 9863 bp, Unknown
  gut microbiota DNA sequence
cgtgccgcgtttcttataccttgccaagggctacggggatttgatagcatttctttactaactttccagttatttccggcccgggcgcagattttccagcacttcatccggcacatacagcttgccccagccggtgccgaggtcgatcttgggcttattggcaccgtggaagtcggagccgccgctgatcttcaagtcgtatttggaggcaagaccccggatctgtcgttcttcagcagtgttgtaggtgctgtagatggcttcgatacctacgaggccgatgctctttaattctgccacgaggttatccaatcgctcgtcgctcatatggtagaggatcgggtgcgccagcacgggaacgccgccggcaccgaggatcaactccaccgcctgagcaggggtcaccttttctctcggaacgaaacagggacagtggtcgcccacatagcggtcaaatgcttccttcatgctctggatatagccgtgggagagcagataccttgcaaaatgcgccctggtgataactgcaccggggaattctgccagaagcgcttcataggtgatatcaatgtcatgttctcgaaggagtgcgcacattttctcgttgcggttctctcgggaatggatgaaatcctccaggtaatgagcaaaatccggctggtggtaatcaatgaaaagtcccaccatgtggatatcttttccctggtattctgtggaaagctctataccggggatgacttccggcacctgaggcgcgggagcgtcagccggggatccttccgcataccggatcgcccggtccaatccgtttacggtatcatgatctgtgagggcgaaggcacgcagtcccttttccatcgcgtaatcgactaattcctccggtgtgaaagtgccatcggagcaggtggagtgtacgtgtaaatctaccataatagtaaagctcctttcaaaaaatggatgtcggcattaccggcatccattttatttgtcttagttctcgtcgtcctcggtctgtgcagtgaatacagtacgctttcttgccatttcatcgcttgccagatactcatcgtaggtagtgatcttgtctaccaggctgccgtttggcaggatctcgatgatacggttggcagtggtctgtacgaactggtggtcatggcaggagaacagtgccacaccggggaacttgatcagaccgttgttcagtgcggtgatggactccatgtccagatggttcgtgggctcatccaggatcaggcagttggcaccgctgatcatcatcttggacagcagacagcgaaccttctcaccaccggagaggatgcggacctttttcacaccgtcttcgccggcgaacagcatacgtcccaggaaaccacggacataagtggcatcctttacgggagagtagccggtcagccagtcggcgatggtcatatcattgtcgaactctgcggtattgtccttcgggaagtaggactgggaagtggtaacaccccacttgtaggttccctcgtccggctccatttccccggccaggatctggaacagagtagtcttcgccagctcgcagctacctacgaaagccaccttgtcttcacggcccagagtgaaggaaatgtcatccagcaccttttcaccgttgatggtcttggacagatgctccacagccagtacctcgttaccgatctcacgctcggggcggaagtcaatataaggatattttctgctggaaggcttaatatcatccagctcaattttttccagtgcacgttttctggaagtagcctgcttggacttggaagcatttgcggagaaacgcgagataaactcctgcagttccttgatcttttcttcctttttcttgttggcttccttcatctgcttgatcagcagctggctggactcgtaccagaagtcgtagttaccggcatacagctgaatcttgccgtagtcgatgtcggcgatctgggtacataccttgttcaggaagtaacggtcatgggatactacgataacggtattctcgaaatcaatcaggaaatcttccaaccatgcgatcgcatccagatccagatggttggtcggctcatccagcagcagaatgtcgggattaccgaacagtgccttggccaacaggaccttcaccttcaggctgccgtccagatccttcatgagagagtagtggaactcggtgccgatgccaagaccgtttaacagcatggcagcattggactctgcttcccaaccgtccatctcggcgaattcagcttccagttcgctggcacggataccgtcctcgtcactgaaatcttccttggcgtagatggcatccttttccttcatgatctggaagagacgttcgttacccatgataacggtatccataaccacgttgtcatcgtatttgaaatgatcctgttccaacacggagagacgctgaccgggggtgatgacgatatcacctttggtagtgtccagctgaccggacagaatctttaaaaaggtggatttaccggcaccgttggctccgatgagaccgtaacagttgccttcggtaaacttgatgttgacatcttcgaataatgctttcttacccacacggtaagttacgttgtttgcactgatcattctaaaaacctcttcttatttatatgcgttacaaagtcacttcttccattatacataaaagcccacatatttcaaggagaaagtgtgatatttcagcgttttcttgggcggtggaccaaccagtgtgccacgctggaacgacttccgtcacttcgtggtggctgatgcttcgaaacaggcgctcaatgcaaataaaatttcgggaggaaaatttacctcaattttacccccgaagattgcgagaagcattcccctttgatagaatagaactatcaacttgggaggttttcttatggagacaaaattaaattacaaaagaacgtttctgatcggactggcttttcttagcatctgttctttctggcagatgtatgacaacattatcccgctgatcctgcagaacacctatcacctgggagagactatgacgggagcggtcatggcactggacaatgtgctggccatcttcctgctgccggtgtgcggtatgctgtcagacaaggtacatacgaagcttggcagaagaatgccatttatcgtggcaggtacgatcctggcagtgatcttcatgatgatgttgccgatgatcgataatgcggagaaggcaagatgggccaccggagggtccttcagtaaccaggtgttctttttaggggtgctgttcctcacgctggtgtccatgggactgtaccgttctccggcggtagcactgatgccggatgtgacgccgaaccatctgcgcagccgcgccaatgcggtgatcaaccttatgggagccgtaggcggtgtctatgccctgatcatgatcaaggtactggtgggcaaaggggaaacaccggattacctgccgctgtttgccagcattgctgcagtcatggctattgcagtgggaatcctcgtgatcaccatccgggaaaataagctgcgggaagaagtggaaaaggcagaagccgcaaacgcagacaccatagaagaaaaagcgatggccgaaggcgtggaagctgccggagagatcgaggcagtgggagacaccggagagacaaaagctttcgaggaaaaacagcagacggcaaagaccgaaagcgccaaggacatgccgaaggatgtgaagcgcagtatgtacttcatgctggcgtccatcttcttatggttcaccgcttataatgccgtgaccacagcattttcccgttatacgaaagtagtatggaagatggagggcggaagcttcgccaactgtctgatggtggctaccgtggcagccattttcagttatatccctatcggaagtatttcagcgaagatcggccgtaaaaagaccatcatggacggtgtcctgctgatggcagcctgctacggagcggctattttcgccagagaatatcaccccatcgtcaatgtggcctttgccctgatcggtgtggcatgggcagcgatcaacgtgaattcctatcccatgatcgtggccatgagcagtggcagcgatgtgggtaaattcaccggaacctattacaccttttccatggcggcgcagatcctgaccccggtattgtccggatttttgttggagaaggtgtcctataacactctgttcccctatgcgctgttcttctccctgatggcattcctgaccatgacccaggtacgccacggcgatgtgaagccccagaagaaggagagcattctggagaactttgacgtggacgattaataaaatagacaataaatcgttagaaaatctttagaaatagctacttgaaaattgcggggcagtggattaaagtaagatgcagcagcttttcgcggagactaagagggcgcagaaaagatgtatgtgaatcaaaacataagatagaaggttgaattgagaatgaaagttttagcaatcatactgatcgtcattgtagtgctggcgattctttacttccttatgatcatgccccggatgatccataagcccgatacggccccttttacagaatggctctacgcccacagaggcctgcacgataatgcaacggaagcaccggagaactccatggcggcattccgtaaggctgcggatgcgggcttcggtattgaactggacattcagctgacgaaggacaagatccccgtggtgttccatgattttacattaaaaagagtctgcggcggcgaaggcaagatcagtgattatacctacgaggaattgcagcagtttcacctgtgcgattctgtggagaagattccgaagtttgaggatgtattgaagatggtagatggaaaagtgcctttgatcgtggagttcaagatcgagcgcaccgacctgtctttgtgtccccttgcagataaaatgctgcgggcctacaagggaatgtactgcatggagtccttcaaccctctgggtgtgtggtggtatcggaagaaacatccggatctggtgcgaggccagttgtccgatgcttttctgaaagaaggagagtatgtcgggatattatattttgtattgcagaatctgctgctgaacttcgtgaccaagccggattttgtggcatacaatcatcattatcctgaaatcctgtcccggaagctttgcagaggtttgtaccataatactgcagccgcatggaccatcaagagccagaaggaactggacgaagcgagaaaacatttcgatattttcatcttcgacagttttgtaccggaagcgggaaagtagagaaaacagcataaaaaggtcggttccatgctccccaggaaaccggccttttactatatgcgatatgcgaggaaaaaatatgtataccaaagaagaattgaaacagcagttacggaatgtgggacttacgggaaaagagacgatcctgatccattcttccatgaaggccatcggagaagtggagggcggtgcggatatcgtgctggatgcctggatggaatattttacggaaggccttctgctattgccgacccatacctgggccaatgtgaatgcacagcacccggtgtatgactatcgtaatacccaatcctgcgtgggactgctgaccaatctgttccggcagagagagggtgtggtgcgctccctgcatcccacccattctttagcggggtacggaaaaaatgctgccgaatatctggcaggagaggaagaacgtaacactccatgtaccccgggaggagcctacgaccggctgaaagactgcggtggtaagattctgctggttggcgttggacatgaacgcaatacttacatccacagtgtggaagaggtgctgaatgttccgaatcgtctggcggcggagcccatgttattgacaacgatcctgccggacggaagagaaaagaaagtatatatgagaaaacactataatcccgaccagccccatatctcggaagattttgtgaaattgaaccaggcgtttctggattgtggagcagtggaagtggtgatgttcggagatgcgaagtgtctgctgtgtgatgcgcagaaagtgttccgggtggtacggcatgtgctggcaccggatccggaatgtcttgtgacgaaaccggagatttctgcagagcggtggagaggattccgggcatgaaaaaggatcagtcccgtgggactgatccttttggtctgtcttgctattaagctacaacagtaacgttggtagcacggatcttgctgctgttctgaggatcgcactcggtatcgaaagttaccttctggccctcttccagagacttgaaaccatcagcgttgattgcggaaaagtgtacgaatacttcttcgccgttagcatcgttggtgatgaaaccataacccttctgagcattgaaccacttaactgtaccgttattcattattggtacctcctttaataattcaggctttgcctgatccttttgatgattctaaaacgtaggacaaaaaaatcacatatttttgtaaagcatccgtgaaaaagtagcaatgtcttacaaaaatatgtgagatcaatgactttcatttagaatacggttagagtataccattgccctgatcgaaatgtcaataattatctttgatttttagacctattttcttatggaaaaagcatatgattttaagagcaacaggatgcggagaatgacgatggatcttagatttttgggaaaagtattacaaggggcgctgatcggtctgggagcggtactcccggggatatccggcggcgttttaagtgtagtgttcggagtctatcgaccgatcatggagctgctggcggatcctctgcgtaagtggcagacgcatctgccgcgattgctcccgtatatgatcggttctgcggcgggatttttaggtgtggcgaatctgctttcttatgtgttggagacctatccggagcaatcggtctgtgtatttgtggggctgatcggcggaatgctgccgtccctgtggcgggaagcgggagagcagggcaggaccggaggagacaggattgtctccggagtgacgtttgcggcaatgatttttttgctgttttcgttgcagacttccaagactgcagtggagccgggactcggagcgtatctgttctgtggatttgcccttgctctgtcggtgatcgctccggggatgagtttttctacactactgatgcccttagggctgtatacaccgttcgtagaggggatcggtcatcttcggccagaggtgttgattcccggaatgaccggctgcgtggtgacttttgtgtgcctggccaggctggtaaaccgcctgcttgaaaaacagtatgcggggatgtcccacgggatcttcgggatcatcagtgcagctacagtgatgacggttccatggaacagttttgccacatctccggagaccgcatcccggaatctgttctgcatggcggcaggaatcgtggcggcacttcttttggaagttatgaatgaaaaaatggcatgttttcccgaaaatgagacagaataaggagcgggaaccttatcatggaaaaaggaaggtagaaacatgcagatgtatgacatcgtggcaacgggagtgctgggactgttggtcggcttctggtctggcaggagtatccggtggaaaatggaagaaacagaagagacaggggaagacagggaagagagaaaaaatacagcagccaagcaactggtgagggaaggtgtcactataggcagcccggtgaacggagagatccgtaagcgcatggaagagaccgctgaagagaccgctgatgccggaactggctgtatcagcatcgtgccagaggatggaaaggtctatgcgcccacggcaggaaaggtattgaaactttatcccatgggaaaccggatccgattccgcacggacagcggactggaactgctgttgaatatctgcagagacagggaagaactgcacagcgcctattatcattgcaatgtcctgcaaaacgagatcgtgcgcaaaggaaaactgctgatggaatttgatcaggagggcctggcaagggaaggcgtggatacggcggtgacggtggaaatgtgccagatcccggagcggggacagatcgtcggtacctggaaagattatatccgggcgggagaggaacttctgtggatacagcgtaagggaaggaatcaggaagactctttctgcctgcggtaagctccgggagtggtgtgataagcggaatgaaaggcccggaaaaaggtgcgggagcttccgaatcccacatccagcgcaatctgcgtcacggagagctccgtggacaatagaagatctctggcatagtccagccttcgggagttcacgtaatcaggaaaagtggtgtggagtttctcagtgaagatccgggacaggacaaagcggctgacaccgaattctttcgagagactttccagggacaattcttcggtatagtgggcatccagatagagaagcagtctttgctccaattccaggtcatctgtgtttttacgcacttgcagaggcaacgatggcagcaggtctgccagcaggagtgtgagatacccttccgcatagacttgtacatcggaaggtgtgggacgatccttttccatggcagcggccagtgttttaagtccctgcagggcaatacggctgtgctctgacagggaggagacggtaaagtcattgcgggcaggctttttgttctggaaaaactggcggaaagagtggcagaaatccggctcgaagatacagagcagattctgaccgggttccacatgcttcaggccatgcatctggttcggaaaaaccagaacaccctgaccgggggtaagtaaaaaatcttgctgttccacggtgacggtggtggaaccgctcaatacatagatcaactccaactgtctgtgaagatggacggcataggggttgtttttggataaatataaataaagctgttcctgacggttctggtaaaagaaactcaatgggattccctcctgcaacttttgtcactattatgacatttatagtcgctaaatgcaagatttgacacaaactaatgggaaaatggcacgcgatacaagcaaacatctgttatactgaaattgttcagaaacaggtaactattatcaaatgagtgttgaacacctgcatttgtaaataaaaggcggcaaaggctgcggaatggagaaattatggacaagaccaagatacataaaatgtggatcgctgatcagggcgacggcacctataccaacccgatcctgtataccgattattcggacccggatgccattcgtgtgggagaggattattttatgatcgcttccagcttctgtaacacccctgcagtgcctctgctgcattcgaaggatctggtgaactggaaggtcatcaattacatcattgacaagcttccctttgactattatgacaagccggtacacggctgtggtacctgggcaccggccatccgttatcatgagggaacttattacgtatttatccccatgccggacgagggcatcatgatgtgcaagaccacggatcctttcggcaagtggagcgagccggcttatgtgcgtaaggtcgtgggctggatcgatccctgtcctttctgggatgaggacggcaaagcatacatggtgacagctttcgccagaagccgtatcggtttcaagagcatgctgtatatgtctcccatcgaaccggactgctccggagtgctggatgacggtcagttcatctatgatggccatgcgacccagcccaccatcgagggaccgaagctgtacaagagaaacgg

SEQ ID NO: 5555 - DNA, 6161 bp, Unknown
  gut microbiota DNA sequence
cgtttcttataccttgccaagggctacggggatttgatagcatttctttactaactttccatttacataaaaacccccggccaaataaccagccgggggattgcactattcttataattttatgccagagggaacttgaaatatctcttagcgttgttgtaggagatatcggttacgatctcggacagagtatcgtaatctgcagggaattcaccactctctacccagttaccgatcaggttgcacaggatacgacggaagtactcgtgtctggtataggacaggaagcttctggaatcggtcagcattccaacgaatccggacaggttgcccaggttagccagggagatcatctgatcctgcataccggtcttgtgatcgttgaaccaccaagcggaaccctgctggatcttggcaacagcggtggaatcctggaagcatccgaggatggtaccgatggcctggttgtcgttgggattcaggctgtagatgacagttctgggcagctcgtcggttacgatcagagcgttcaggaagtcagccatctgtgcggaaggagcgtagttgttgatgcagtcgtaaccggtatcgggacccagcttctcgaacatcagagtattgttgtcacgcttacaaccgtaatgcaactgcatagcccagtcaagcttgtgatattccttgcctacgaacagcatgaaagcggtcttgaacttcagttcctcttccttggtcagaaccatcttgttcagtctctttaagaagatctcttccagctcatcgtcggaagcgggatagtacattacatactccagagcatggtcagatacgttacaacccatggatgcgaagaaagccatacggttcttcagagcttcctttaagcttgcgaaggagttgatctcggtcatgcctgcagcagcagccagcttctccagataatccagataatcgggcttctcgatgttcatagctttgtcaggtctccatgcgggcagaacctttacatcgaaagtatcatctgcagccagcttcttgtgccactccagagaatcaataggatcatcggtggtgcagatcagggtaacattgctctgcttgatcagattacgaacgctcatggaaggctgctgcagtttttcattgcacaggttccatacttcatcagcggtattcttgttcagaacgccggtgtaaccgaagtatctctgcagttccagatggctccagtggaacagggggttgccgatagccttgcccaggcactcagcccatttgcagaacttctcgtaatcggaagcgtcaccggtgatgtacttttcgtccacaccgcaggaacgcatgaaacgccacttgtagtgatcgccgcccaaccatacctgagtgatgttgtcgaactgacgatcctcagcaatctccttgggattgatatggcaatggtagtccagaatcggtgttttttctgcgtagtcgtggaacagctttttggcggtctcagtctctaacagaaagtccttgtccataaatgctttcattttaaaaatcctccatgttcatatgagtcagatccggtagggatccggcgactatagtgataaatatagaaaaggggtgatttgcagctcccccgtgctgtcataaacaaatgcctatatgtgccgcaagctactttgtggtaccgcgttttaccagttcaccggagaatacagtcttcttcggcatctcgcttccgcccaaaacgcccatcagcgttgtgatcagatgctggcagagtgtttccagtttattgtcgatactggtcagctccggatcgcagcagttcaccagcatggaattattataaccgatgatagccagatcctccggaatccgcagcttcatttcacgggcgtatttcagagcacccagtgccagagaatcgtcagcagcaatgacaccgtggaaggtgattccctttgcatgcagcttcagcagctggtctgccatagcgggaatatcttcatgagatccctgatagagctgcaggaagcttccgttggtcagaagtcctttttcctccatggcggcacggtaaccggccagctttttcttaccactgtaagaagtggagttgtagaagtacaggatgtcttccactccggaacggatcatttccattgtggcatcatatatggaagtaaaatcatccgatacgatgctgtaaacattgggagcgtccatggctgcattcaacagcatcacaggcacctgtccggcagcgccgaggatgtatttgttgtcatcttccttctcgtagataaaattggaacctactaatataatgccgtccacttttttcgtgatcagaaggttcatggaacttgctttggtatccagatcataaccggtacagcacaggatgctgtcgtaaccgttggcccgaagcttctgctcaatatagtagatcgctttggcaaggtacggatccgaactgtcggcacacatgataccgatggtcttcatggtgttgagacctaatcccctggcgaatgcgttgggggtgtactcgtactggttgatcacatccagcacttttttcttggttttctcgcttacattgttgcttccgttgagtacgcgggaaacagtagcaatagagacaccggccttttcagaaatatcgtaaattgtcatctgtggcttcctctctgcttctatgtaacagtgcgtaaaaagatatgtaagaaaaatgtaagtagttacataaaaaagctatatctgaattataacgaaagacttctcttttttcaagatactttttcaacttctcatatgtcaaaaatttatcaaagcgaaatattgctgataaaagcggtagtttcacgaaaataaaactttctttttttggtgattgacgaaaccatttttttgaagtaaaatgaatcatgaaagtacttacataaacttcctacaattcagaccaaagacaatgccccgggcggtgtaacagattcgttcgtaaggcgtgccggggaaagtaagtgcaggtaatagagtgccgtaagacggtgcagataggatacgctaagcgtagaatggaggacaaaatggatatcttaaacaaggcaaagaccggtaaaaaggaaagacctatcaaggtggtacagttcggcgagggtaatttcttacgtggattcgtagattacatgatcgacatcgctaacgagcagggcaagttcgatggagacatcgttctgatcaaacccatcgagttcggtaacctggatatgttccacaagcaggactgccagtatactgtatcccttcgcggtaatgtgaacggtgaagccaagattattaatagaatcgtaaccagtgttgcagatgctgtagacacttataatgaatatgacaagtacatgggacttgccgagatcgataccttacgtttcgtagtatccaacaccaccgaggcaggtatcgtatatgatgataccgataagtttgaattagagcctcccaagactttccccggcaagctgaccaagttcttatatcacagattcgagaccttcaagggtgatatgagcaagggtctggtaatgcttcccgtagagctgatcgatgacaacggtattatgctgaagaagtgtgtaatgcagctgatcgagctgtggggcctgggcgatgagttcaagaagtgggtagatgaggcatgtgtattcacatctactctggttgaccgtatcattaccggttatccccgtgctaccgagaaggaagaatgggagaagctgggttacgaagaccacatcatggtaaccggtgagccgtttgctctgtgggttatcgaatccgctaaggacatcagcaaggagttccctcttcccgatgcaggacttcctgttatcttcactgacaatcagaagccttataagcagagaaaggttcgtatcctgaacggtgcgcatacctctttcgtactggcttcttacctgtgcggcaacgacatcgtaagacagtccatgcatgatgacgatatccgtaacttcatgctgaagaccatttatgacgaagtaatccctaccctgtctctgcctgaggaggaactgaagcagtttgcaggtgaggttgtaaaccgtttcgacaatccttatgtagaccatgcactgcttgcaatctccttaaattccgtatccaagtggagagcaagatgtatgcccagcctgttaggctatgttgagaagaccggtaagcttcccgctcatctgaccttctccattgcagcactgatggcattctaccatggcaccgagatccgcgataaggctctgatcggtcatagagacggtcaggaatacaacatcatggatgacaaagcagttctggagttcttcgcagcaaattgtgagaaggacaccaagactttcgtaacttccttccttggtaatgaagacttcttcggccaggatctgaacaaggttcccggactgaccgatgcagttgtagcatacctggatgatattaaggcaaatggcatgagggcagcattatgcaagatttcttaaaaattaatgacaatgataatgtagtcgtagcattaaatacgattcctgccggtgagaagatcacagtctctgtaggtgacggtcagaagaccgttaccgccagagaggagatcccagcaggacataagatggctatttttgatattcccgaaggcggcgaggtcatcaaatacggttaccgtatcggtaatgccaaggagaacatcacagagggcagctggatccatactcataatgtaaagaccgctctgggcgatctgctggagtacacctacaaccccactccggtagaggagaagaagacggaagatgtgacttttatgggcttcaaccgtccggacggcaaagtaggtgttcgtaacgagatctgggtcatccccaccgttggctgtgtcaacaacgtggcaaccgctattgcaaagcaggccaatgcattcgttaagggcagtgtggaagaggttatcgcattccctcatccctatggttgttcccagatgggtgatgaccaggagcatacccgtaagattcttgcagacctgatcaatcatcccaatgcaggtggtgttctggtactgggactgggctgtgagaacagcaacattgatgtattaaagccttacattggcgattatgatgagaaccgtgtgaaattcctggtatgtcaggagcacgaggatgaaatcgcagattccgtagaggtgatcaagggcctgattgattatgcttccaagttcgagagagagcccatcagcgtaagcaagctggtcatcggtatgaagtgcggcggcagtgacggactgtccggcattaccgcgaaccccttagtaggacgtttctccgacctgctgatctctaagggcggtaccaccatcctgaccgaggttcccgagatgttcggtgcagagaccattctgatgaaccgttgtgccaacgaggaactgttccaccagaccgtagatctgatcaatgacttcaagaattatttcaagagtcacaatcagactatttacgagaatccttctccgggcaacaaaaagggaggtatctccactctggaggacaagtctctgggatgtacccagaagtccggaagtgctctggtcaagggtgtattgcagtatggtgatacggtgaagactccgggactgaaccttttgtccgcaccgggcaacgatctggtagcagctaccgcactggcagccgcaggagcacatatcgtactgtttaccacaggacgtggaactcctttcgcatctccggttcctaccatgaagatcgcgactaactcccgcctggcaggcaaaaagtccaactggatcgatttcaatgccggcgtactggtagaggataagaccatggaagaggagaccaaggctttgtttgatctggtagtggagactgcttccggcaggcaggtatgcagcgaggcagcaggcttccatgatatggctattttcaaacagggtgtaactctgtaaaagatcatacacaaaacggcgttcttttgttacaataaacgggcaggagaacgcctttgttatataggaggaagagtgaaaaataaagtagatttttgggcgcacttatataagggttcataaaaccctgtttttacaa

SEQ ID NO: 5556 - DNA, 633 bp, Unknown
  gut microbiota DNA sequence
catcatgttttccggcggctgcggctccacaatatgatttattataaaaccatttgaaagcagtgtatttagatatgtggtcagtgttctatgaaattttgtaaccttttctcccaaaaacacagctgttcgtttgccttcataataataattatccaccggaaaatgcagtatttctcctttttcattataataccagtcttgtgttccataggcagtaaaaacaggatgttcaaccgtaaaaactagcttaccaccagacttcagtattctatatatcttttttactaaaatctcataatctgctacatagtgaaacgcaagtgaacttaatattacatcaaaactctcctctgggaattccacatcttctatagcacagcatttatattcaacctgtggaaaatgtgttttttctttggctacctcgagcattttatgagaaatatcaacacctacaacagaagacgctccgtgttccatcgcataaatacagtgccatccatagccgcatcctaaatcaagcacacgcttatctttaaaatccggcagcagctttctcaatgtttcccattctcctgcaccggctagtccctgctgtgagcgactcatttgactgtatttttgaaaaaa

SEQ ID NO: 5557 - DNA, 65910 bp, Unknown
  gut microbiota DNA sequence
tatcggcattcttagcgccgggtattaacacggctcctccgcacttcgtgctctcggatccgtaacacacattcgcattccggactatcggcattcttagcgccgggtattaacacggctcctccgcacttcgtgctctcggatccgtaacacccattcgcattccggactatcgtcctacatgctcatgtgtgtttcatcagctaatggccagccggttccgcctgcaagcagtctcaccggctggtcattgctgatgttaatatcccaggtagctgaggttcagatccacattgccgctgatgccgctgacttttcctgtggatttgtattgccacagatcatagcgtccggtgtaggtgggtgctgctgcatactgggccagccagatcttgtagccactcagtgcacttgcatccatcttctggctgagccaggtcttgttggcatacacacctgcggtgtatcctgcattctgaatggtattgcagaatgccttacatactgccgttctggtagcggaatcgatcttatcacctcttccgccgcttccttccacatccaggaataccggataggaaatcttgtaaccgctgatacgatccagtaccatggaggcttcctgtactgcctcgacctcatccactgcctgggtaaagaagtatacacccactttcagtcctgctgccgtagctcccttgatgttggtcttgaaggtagggtcatcgatcagtgctccctgagaggaaccgcgataacccacacggatgatcacgtagctgacaccggaattcttcacggcgttccagtcaatttttccattccacttggacacatcgattcccatggtgccggaaccaactaccagagatccgtcactggcaaaattgtattttgcgccctgaatgacctgttctccggtaaccttgttgccatccgctgtaaagaaataaagctttccgtccagtgtctgccatccggtgtatttcacatcacctttgataaagaacttagaggcagtaaagtaatccgcattgactgcttcacgatagctgtcaccatcctgtacatacagctgtacaccgctcttgtctttcagcttggtagttttatcttctctcgcattggaagcctttactgttactgtgcacttggcttccaccttgttgctgccttctgtatacgttaccgttaccgtagcacttcccgctttcacaccggtgatagtaatggtcttgccgcttacagctacagttgctataccggtatcgctggaagccgcacttacggttccacttccgctgacttttgcggtaactgtatccgttgccttctgataagtcgtcactgccgttttatccagagtaattgtcgccgccggagtcgctgtaggggttgccgtaggagtcgctgtaggagttgccgtaggggccgctgtcggggttgctgttgccgtcggggttgctgttgccgtcggggttactgtcggagtcgctgtgggctctgcagtcggggatactgtcggttcttttgtaggttctgctgtgggctctgttgtaggttctgctgtcggttccgctgttggttccgctgttggttctgctgtaggagacacttctgccatccgcaggaacttaccgctgtaagccaccgttacggtctccggatcggtaatggtatccttggatacttctttataagtattggcagttgcggtacttgccacccactgcacagtatcctgcagtgtggactctacagtagtatccttgatctgtgtatcctcttttgcagcattgatctcagattctttcttgatctcattggagacatcgacctttttataggcgatatctttctttacttctactttctgtgctgctgtcggcagaacatagtccttgtatttatcatccgtcagtgcgtttaccgctacggagtaattccccggcgtaataccctttttatagataataccgtccatatcgtcatcagtccaggtctcggtcttgccgttgggatctgtgatggttacgctgaagggtacgttggagatcagcttgccggtctttttattgttaaatttgatcttcagatccttctgtacagagaccaactccagttctaccgtaccgccgttggtgtactctgcctcttcatattccttctgttcttccggatcttcttctaccgcattggctgccgcgatctttgccatctgtgcgtctgccactgccagaagtccctgctcaccgatcatctggatgccgtccagctgtgttcccacgctgacgaactccgatacctgtccatccactgcccgggcactggcatagacacttccggtcacgatagccagaatcagtaccgccactccggtagctgccatgatccggtccatggtactcaggttcaggaattttgtccagattacagcgattccgccctgctttttgcccccggtctttctcctgcccgtgggagccggctcttcctcgtaatcctcgtcggcataatactcttcatcgtcactctcttcgatgtactccacatcatcggcatagtactcctcaccgtcttcttctccggtgtgctcttcctcatcggcgtagtactcctcaccgtcttcttctccggtgtactcttcctcatcagcgtagtactcctcaccgtcttcttctccggtgtgctcttcctcatcggcgtagtactcctcatcgtcttcttctccggtgtactcttcctcatcagcatagtactcttcgccgtcagtctcttccggatactcttcttcgtcggcatagtattcctcgccgtcagtctcttccggatactcttcttcatcggcatagtattcctcgccatcgtcttctccggtgtgttcttcctcatcggcatagtactcttcgccgtcagtctcttccggatactcttcttcgtcggcatagtattcctcgctgtcttcttctccggtatattcttcctcgtcccaatcgtaaccatcctgtacgtcttcttcccagttacggtccggacgttttgtatggttaaataattttttcatctgatctatcccttctgctcataattctcggtgtaacaattccgtaacattatagcattgtattttccccacatcaaggcattcatccatttcttcagaatttcttaaatctttctaatattatggactttcttttcgtataatagtaaaatcaatataactctttttaccactacattattgaattacctgaaacggagagaatacatgaaacgaaacaataacaaccataatatccacgcatcttctgtgaatgacatgccggatattgagattgtagatctggaaaacgacacaatgcaagacacagattctggtaatttccattccgggaatactcgttccggttctgtgcacaatttccataccgattccgatgacgacatagaagacctttacgtagatgccgatgaagaaatccctgagggcgaagagtctgtggcccctgccggtatccggcgctttctgaattttcacgtactgtttgctctcgtgcttcttattgttgtcggcgtggtaggataccgcgtcacacactggggacagaggatcagccagtccgacatcttcaaggacggacagggttcctacgacgacagttgggattccatccttcccctgaccgacgaaaacggtcagatgatcattaatgatgcttccaatatcgttgtcttcggaaatgctcccttcgcagatgacagggactcttccgacaatctggccaatctgatcgccaaagagaccgataccaccgtttataactgttccatcagcggaagttaccttgctgcacagcagttaaactacgaccccaccgttgcccccatggatgcttactgtctctactggctggtgaacctggccgttggggttcctctggatggctactacaccgatgcagccaatgctctgggcgacaagacaccggccgaagcagaggaagtaatcaacacactgaaaactctggatttcaacacgatcgacaccgttgccattatgtatgatgctaccgattatctgtccggcaatgccatgtacagtgatgagaatcccacggatcccacgcagtttaccggcaatctggaggccagcattgaagtattgcagaactattacccccagatccgcattatcgtcatgtctccgacctatgcatatgctgtggatgagaacggcgactatgtaagctccgatatgtatatttacaacggccgtgatgtcttatccacttatgtgatcaaggaatgttactccgccaatatccacagcgtatccttcatggataacctgtacggcagcattaccgaagacaatgccgatgaatatcttgtcgacaatctgcacctgaatgtaaaaggacgtaagctcatcgccaaacgttttgaatacttcctgaattactattccaaggattatgcatcccaggaaaaataattccggtcaaaaaaggctcccgaagcagccagttactttgctgctccgggagccacttgtttttccctgaaatctcattccttcataaagtaatacagatccactgtggaatctttgtagatcacatatccgtgcattcttccgaattcttcaaattcctgatcctgcatcttccccaccagttttttatcttccgacaggatcacataggcgcaggcctcttctctggccagttctgccagctcctgtgcatcaatgacctcctgctccataacatcataaagatcattctgcaccgtccacttgctcaccataatgtccctgccgtagggcatacaaatcacattggaatactgtctcacatactgcagcagttctcccgggaatgccgccatgacttctctgcccggaacctcaatggtatcacagatatccacaacgctctggggtacatgatacgcattttccgccttctgaaaattgggattcctgtagatcagactgccggatatcgtaaacagcacaatagccaacgttatccccacatatctttttctaccggcgagttttccacaaagctgcaccgtaccgaaagcaatcaccggtgtcacaggcaacaaccacaggatccggtaatagatttccccatccgccatctgagagacgatcttcgccaccagcggattaaaaaagacaagcagcaatactaacggcacataaagaaacatcacccggatatattttcttttctctgtgagccacagatacagcagactcaccaggaaccacagaacgatcagtccggtccccatatattcctgaaacagctttaaagcatccattcttctcctccggtcctatcatcccaacagcaaatacattccggcatacacaatgcagggaatacaacagccgatcaatggcagtatgagtttccattttctgtaactgaccgcaccacagagcccggccgttcccaccagcatgcatgccagcaatgctcccatggtactggccagacagcaggccgtcatcacagatcccaacagcacccagaaaccgacagtgatcttctgttcttcctgtatttttcgaagcagtgtcagcagcaggaaaaatatcatggggatcaggatacttcccaatgcagccttcccctgtctgctcctggcaatcataaaattctctacagtataataagaataatctccgaaaagcaccagcacttccgtacagagtaaaaatgcaggcaacgcccatttcttccggtatgcgccctctcctgcgaataataccctgcttcccagaagatagaatactccgtaagtcatggagatcagagcgaccggcaccagagtcttcgccacgatcaccgtagtgatgccggtcatctgggccagccatgcgatccagataggaaaaggtgccagcccgtgtctcacatccagttccgtatgcattcccgtataagggatcttctgatacatcctgccggattcctctgccgctgcggagattgccacataataggcatcgtcaccatcaccgtagaccatcagcactgccaataccagctgcaccagcaaaagcacaccagccagcacccacaaaataatctctgctttctccggctttgcttcccggactgcccgcagagtacgggactgccggaaataccggaccgttgccgctgccagcagcaccaggatgtagccgcaataagctacggtcaccatccacatacggccttccaacaggatcaccggcacacagatcacctgaaatcccgcccatagcagcatctgaccactaatccacagaaataccggatttctacagggtttatccacatttaaaaaacaatttcccacccatgccggtatcgctaccagcagaacggcaagccacagcaaacgaactgcgatcatgtttcaacctcatttctgtcttcttatcatttcattccttatctggaaaacatatatatcatatctccgtgcacgccttccgaaagcagaagttcctccgacgtataaccatacttatcccggagcacagacactgttgcttctttatccacacccggtttaatcaatacgatcacccggtccagtgcctccacggattccgtatccttacgttccttcagttcctctgccgttaccagcaaagttttggtgtaatgcataaattccggcaggttctgataatagcccactcccgcataaacgcagatgcatgggaactcctcatattcttccgccaatgcttcctgtctggcatatccctgatagaggtattccccatcataggccgcaagccgcagcccctgtaccaccacgagcaacagcaccagcatgcctcccacgatctgttctttccatccggagatctctgtcagtttttttccaaggagacacaatagcaaagcaagcagcaatgccacaaacggaaacaaaggcataatatagcggtccaccagatacggtgacatgcgggatgccagcagaaaatatccggccaccggcaccatcagcatccaggccgcatctcttccggaattttcacctttctgttcctgtttcccggcccggaagctcagatacagctttcccagaagcaggattgtgccggcggcacatccgcaggtcagaagaggcgctcccactgtccgatccgccagaattctgccaaatgcagccagtctctgtccgtaaccggcaaatccggaggccagattgccgagagcttccatccctcttccgctggagaacacatccgaaattgcaaaagggaacaataccagtccgatcactgcagcgatcaccatggaccggatatagcaccataattctttgttcctgtgccggtacagcaggatcactgcggtaaccgccgccagcagaaggcagtaaaacaggaaaaaatactgtgtcaggaaacccagcaccgtaatagcgataaggcccttgtttttcttgtcaaacccgttattcttccatttttccacatggacggaaaacagggcgacacacagacaggaaagcagtccatacatacggatcagcagcaccgtagccagtgctccggtactcattccatagagaagcaccgccaggatccccagctgtcttccctttccttccagggaaaacacatctgccagctgtctccccagccgcagtaaaagccacaatgtaattcccagacagaccagattgatgctgcatccaagccacggtgacaatgttccccgaaagacagaactcatggtatgcagcagcataaaatgtaccggcggatgattgtcatcttttacattaaaataaaccgacaggtaatcaaaggcatctttctgatccaccgtaacataatcctgaaactgccggtccgtgatccagaccggttcctcatagacatctgctttataagacaacagcttgctgtttccccggttcctaagcacatctgttactgtatttttcagattctccagaacctctcccgcactgtccccctcgatctcctcgttcacgaatttggccagacgcccttccggctgggtaggtacgatccagggattatacctggcatttgccagttcaaagctcagaagttcgtccatgtgatagccttccttccggctgactcccgcacccatcaataccaggcacaatataactgccagcagttccggcaggatttttttccatttatcccgtttttcctgtccaatcataggatcttcccatctccgttattattcattatccattacccgatagagataaatgcggtaatagctgttctctgtctcaaaggcctccggcctcatcagttccagaccggtatcctcactgtgatcgatataggctgctgacaacagatagcttccgcccagctgcctcagactttccgcatcgatcgtatagtcctgaaaataaaagccacctttttcgatcgtataatagccggggcattccgcgctgaacaaatagcaacgattcccccaatggtcaaagctgtcttccagatattcactcttgtccagctccggtgcaatgatctcccggaaacggtgcttgtactccagagaatagttatttgaatagccgtccagacagtaaaatccatgatacaatgccgcagcgggatcgatccccagacttacgacccggtaatcctgtggttcttccccggtattctcccgcaggtactcctgtacctgatccagcacatccacggcataataatcccggaagctcatggctgcataattccggttcaccagtttttgcagattgggcttcagattgctctccagcaaaatcttcccggctgttgccacggtaagaagcattgcggccattacgatgatccccgggatcacaccgttcctgcgtccgttccctgttttctccgctcctgtgtctctttccgggagctgttccgtcagcaataacaggctgcaccccagaataaaataccacaggcagggactcagccacaggactctgttggcctgaaagcccttcagagcacccagactggaacggatagcgattccgatactgctgtcccacagtacggccactgccgcaaagcctgcaataacggccagtgacaggcccacggctttccataaccgtttttctccgccctcaggtacattctttttatccgctatgtccttcttcgttgcccgatttaggaaaaataaaacaactgttgtcatcaacagcaccacgaggatcagtccatgataatccacactgtgctgtcctccctgcaggaggtttgttttcaactgactgaaaaagtccaccgggctgagcagatattccgatttgtgagaaatctcttctccctgtcccccggacagctgaagcaatagcgaaccgttctcaacgatatacgtaagcagcaaaatcccccaggctgcagcctgtccggcggagaactgtttccttttgtccaccagtgtgacgatctcccataccgcccagattcccagcacagcaaaaccggataacaccagggaagaattacatccgaaaagcagtacataaaaataacagagaatccggaaattcttcggtctgtccttttcccccagtcgcagtacacaatacattaacagcggcaatccatactgggacagcccgtacaccggcaaaaacggcagatacgcatacatacatccggtcagcatggctatgaaaccgacaagtccttttcttctccgcagtgtttccgatgtttctccggcccatccaagcaggcagaacattcccagatatccggcaaagctgccagccacctgcatacaggccagtgccagttccgcaggcagccaccggtataacagcacacaggcgggggccggcatggtaagcgctgtttttgctgcaccgttcatgaattccggcaatacaccgctgccatcccacagatgtcttgcctgcagaagataggcgatcacctcaccgtccagctgatcgtgatacacgaacacagagtccttccctaatacaagatacggaactcccataaaaaatactgccaacgctcccagaaagaaccaggctttttctgatttctgcgttttcacttttgttgtcatcttcgtcatggttcctccttcccgcgtttctgctgtcacaattctattatttctccgggttgtcttctgtatctccggcgcttatggtcctatcggtccagaggatcattcccacaagccacagagaacccggcagcaatccgttcttgtaatccaggcatccggcatcccgcatggtataccacaggatcatgcctgccgcagtgatcacacagactcctgagatcttccagaacaggcttctgtccggtactgttttttcttttttctgtcggcgcatggcaatgatcccgcatatcatgcagctcacgaccacaacagcgattcccgacaggaaccaccagctgctgtattttagcaaaagctctgtcagccttggatctcccgtcatcataatgtctacatttctgccagagaaggagtcatatcccctgccgtccaacagcagctgcaacagtaccgtaggcatggcatatccgaggcaatcccaggcgatctgatggatattgtctgaagtatacgtcttcaggtgatactcggcatactctctgaatatcttctgtgcttccgccttgccgaaacgatcctccagcgtcttttgtatgccggactccatggttcccgcataatacccggcattcctcatctctttccaggtcatccaggtacgtagctgttccggccattcatcgtattcttcttcctctctcatatgcgtccagctgaaccggcgcatcatggcggcgctcaccgtattctccgccttcccatagctgcccggtgtctgccacatgggcaccagcgtgaataaaattcccgccattgccagaaggagcaaaagttcccggcctactctctttttctccgtctttctgctccgtagctgccacagatgtatcagccacagaacaataagcggtaccagccccagatacagattctccaccacacacagtgtactgagcgcccaccagattccggcttcgaacagaccatgtaacggtctggccggcgctgtcgtctcaccatcctccgccacagcatcctgccgcagggtccggatcaccgccgacagttccagcagtaaaagggaatatcccggggaattcggcaatacggccagatgactttgcatggcacagggaaaggtcagaagcgccaggcttccccagcacaaaaatatctttttccctgtcactccgcatgcccgtaaaaatactacaccggcataaaatgcaatcaggatctgtaccgtatatacaaaaaaagtataagggatagaacttatggattctatcccttttacaagcatcagaaaaagagggtagccgatccccatgtagtcatcacacacaagtgtctctgacgctttcagccatgtgtagctatcgccgaattccggaaaaattccaaaggatctgacgccccagcagattcccagaagaatctgcacggagacacccaggaacagaaatctgcctgcaacctgtgcagacgctctgccaattttttgcatgttactgctcctctaattcaaaaaagtttttcaccagtccacagatgaaatccacctgatccagtgtcagcccatagtacatgggaagtcttaccaggcgctcgctctctctggtagtataacggtcctcgccgtggaaccggccgaacttctgtcctgcgggagaagtatgcaacgggatataatggaataccgtaagcacaccgttctccttcatatagctgataaatcttgttctctgttccagatctcttgccttgatgtagaacatatgcgcattatgcacacagccttccggtacggtgggcaggtcgatctttcccgctttctttaagggaagcagctgctcataatagcggttccaacaggcaagtcttgcctcattgatctcatcagcgatctccagctgtgcatagagataagccgcattcatatcactgggaagataggaagatccgtaatttacccaggtatatttatcgatctggccccggaagaacttgctgcggttggttcccttctccctcatgatctccgcttcttccacatccttcttatcacggatcagcagtgctccgccctcacccatgctgtagtttttggtctcatggaagctgtaggcaccgaagtcaccgatggttcccagtgcttttcccttgtaagatgccagtacaccctgtgcggcatcctctactacctttaagttatgtctttttgcgatgtccataatggtgtccatctcgcaggccacaccggcataatgcaccggaacgatggctttcgtcttctccgtgatggcatcctcgatcagtgtctcgtcaatgttcatggtatccgggcggatatccacgaacacaggaaccgcaccgcgcagtacaaaggcatctgcggtggatacgaaggtgtaagcaggcatgatcacttcgtccccgggccgaatgttacacaaaagtgctgccagttctgtcgcatgggtgcaggaggtcgtcagcagacattttccggctccggtcctctcctcgatccaggcattacattttttcgtatattctccatctccgcagatcttctgattttttacacattcctgaatgtaatctgctgctttatccacataaggcggtacgttaaacttaatatcaatctctctcataacacatcctcttttctactgtcttttagctttctctatgttcccgcttccagcttcctacggctgtcccaggcacattttccgtcacatgactgataatatatttcggtcttcccttgacttcttcatagattctggcaatataatggccaatcacaccaaggcttaacataataaatccgccaataatgaggatcagcaggatcaccgtggtaaaaccttccaccgccgttcccatcagatagcgcaccagggtctgaatcgccaggatcacactgaacagaatggataccccgcccatgatcgtcaccagctgcaatggcagtgtgctgaaggaagtggcattggtaatggcatatttcatcagactccagaaggaccacttgctctgtccgtatttccgctcctgtacttcatattccacagtctccgtacggaaccccgcccagaaggtcaacgcccggaaaaaggtattgcgttccggcagttccaacaggacctgtactacttttctgtccagaagtttgaaatcggaagaagcattcatgtccatcttgatcagtttgctcatgatcttgtaaaaaagtccggcagacaacttatatcccagactctccttaccgcggtcggccttgataccttccacgatctcggcaccctgctgccatttttcccacatctgtggaatcacctcaggcggatgctgcagatcacagtccataacgatcaccgcatcccccgtagtcagctccaggcctgcaaaaattccagcttcctttccgaaattccgggaaaactccgctccccgtactctcggattcttggccgattcttccttaatacgttcaaaggttccgtccttcgaaccatcactgataaataccagctcataatcgatcccgtgctgttccagcagttcccccagtacttttgaggtattggcaatattctgttcttcgttatatgccggtaaaacaatcgataataatgacatcctctaatcccttccgcagttctcggtcttgacatacaggattccatccacaaccctggtggaattcgctcccggaaaagtatccatgtcaatgtattcctgcgtcatataaatctcacccacagtatccggatccagaaaattcagggttgcgcccagatagttctgcataaatgcctgataatccgctcccttatagatcagatagtctccgctgagaccgatcataccgtccgtgacttttccggtaatatccgtagtggggaattcatcatacccgatgacacccaccaatgcaatgggaattccctgatagtacccttccgtctgctcgatcctgtccagcagacgtacacagtacgcataggtcttctcgtattttttctccagattggaatatccgatattatccgatactccataattgaataccaggattccggccgccagtaatgccacccactggatcccgatatctgttttcccgtcctccgacgcatatctgtccacaaatgccagcatcaggatcagatataatacccactgataccgcatcagcaaatgataggtcagattcggagaaatcaccagaatcacattggtcaaaagcggaagtcccgccgccaacagaattattataacgaaaaatgccggattcttccaccattttcttcgcagcatgcttctcaccagcagataagccaccagaagcaccagtgccgcacaggccgtaaaagagaaaatattgttcaccagcacatttccatgcaccgtaaatgccagaaaatcaacatacattccccggatcgttgcaaacagcccgagaccggaacctccctgctccatggaattgatcccctgataggtatccagcacctttccctgtaatttcaacagaatctgcaggatcacgtaatacaatgcagctccggcaactcccatgcccaggtaacgaagtacatagaacgctttcgtcttccagcccttctcttccataaaaaaaagcaggatcacatatacgcacagcagaatggcaaagggcagatatgcctgatagatccccatactgaacgcaagacataccgccccggccagccagccttttttctgttttttcgtaaaaagcactgccagaattgcgaggaacagtgccatcatataaccatccatggtaaacacataggcaaaagtggatgccagtgccggaaaagaaatcagcaatccgctcactgccatgattaccaacgggtctgcaagttccagcagttccgtcaatgccaccgccgccagcgccagccagagcagaccgatcagaccaatgatccacggaatggtaaaatacgaagaaaagccgcatgccacagacagaaaccatcgtccggaagtgatcatattctgatcaaaatacatactgctcaggccgtcatgattcggaatatccgaaagcatcaccggcagatggatcagaatccccggtacaaacgctgagagaaaggcgatcttccatgtattttttatttttgttctgctagattgaaaaaaatcccacggggtcttcatccgtctgtcactccttatttagtctttccgcgatcgtctgtgcaatcttctctctgccggcctcattgggatgcaggccgtcatcggtatagagatacagatcatcccaggtgtcatgtggataatagtcatgatagatgtctatgacttctacattcaaagcctcacacagtccgatctccgcattgacataatcctccagcacgccaccgcccagatcatattcctcacaggtcagttccggatctgtataccaggtatagggcggggtaatgaagataatgcgcagatccggataggcttcccgcagttccttcacaatactgcggatggctccacagtaggtatattcatcatacgggtctgctgtggattcgatgggagtgccggagtgataatcattcagtccggaaccgataaacaggatcttcacctgatcaaaatcgatctgtcccagatctcccaaagtatcctcaaaataatccgtggctgcttctcggatgtgtacggtcctctggacaccgaaatccttcaccacaaaggaacgtaccagacctgccgcagaaatggaatccttggtatatcccagccttctctccgcatccgctctgccaagaaccgttcctcccagcccaccgttgtagcattttaagcctgtcttctcctgaagctttgctgcgatggatgtctcatcacggcacagaccatatacactgtctcccagaaacactacatcataaggaatcctctgatattcccggtcccccggaaaaaacagtaccaaaagcagcacgaacaaaacagctgctgtcacactatataaaatttttttcttccagctgccgtttttcttcataaacctcagatattatccttctattcttctattcccgccgtctgcaggatctctgcgatccgggcagctccctgcccgtcgatcagaattctctccgcttcataggttctctgccgcagttccctgttctcacagacattccgacaccatctgccgatggctttccttgtctcttccggtgtgtaatgccattttccggcatatccagcaatttcctgctttcccagccattccgtcagcccttcctggttctctgcgtaagaaaaacagacaaaaggcactcccagaactgacaattcatagattgtcgttccaccggcagtcaccgccagctgacaggccgtcatcagtcccgccatgtctttcacatcgcaatgcagaaccacgttgttgtgctccgatgcatattgctccaatttttcccggttcggattaaaccttcccaccaccagatgataccttatattttttcccgccagactgtgctcacacagttcccgcaggatttctcccgcaatgttgtctttgtctccgccaccggtggtgatcaggatatccgttacatcatcctgcagaatatactgtgctgccgcctcacagaactgctgccgcaccggcacataagcagctccgagatactgtccggtactgcttccatacagttcccgatacttttcccgggaagcaaacagattgtaattgatcacgccgtccaccggaaatgcatgctgctgcatatcatccagcagatacaccctgccaaaccggtgcaatgcctgcaaataagcatccgtcaccgcatagctgtccaccagaaaaacatgcccgcttccacggatcagtccttccagcgtcgaaagctctccttccatgtcggcaggatccgtcccaaggatcttcaccggcatgttccagctctgcaacagttccgcagatgcctgctccgcgcacaaaaagcagagttcttccggatgctctattcttttttgtaattcctgtgccaccgtgaggcaacgcatcagatgccctgcccccgtaacagcactgccgtccgcacgaaaataatacatttccgctccttactgctgttccttctctgtgaaatccacaagagaccagtccataggggttcccagcctggcatctctggtgatccgtttgcccaacagttcctcataatatctggtatgcagtccgcaggaaggtctcacagaccgcagattctccggagtaaacacatccccggccttcatatcctgtgccacgaacagggaacgggaatgttctctgctctttttctgcttcggtgtcagatcgtaggtcacctttcctactgctttctcgatcatgcggatgtgatccaccatctctttgaattcttccggttccatggagaatgccgcatccgcaccgccgtctgctctgcgcagtgtcagatgtttctccaccaccttggctcccagcgccacgccggcaccggccacggcacagcccatggtatgatcagaaagacctaccacacagtcaaagacttccttcatggaaggaatcgtcttcagattaatatcctcatagggtgccggataagcggaggtacatttcaacaggatcacattcccgttgccctcttccttacaggtacgcagtgccagctcgatatccgccagataggcaattccggtagacatgataatcggcttgccggtacgggcgatcttgcggatgaaaggaatgtcgttaatctcgaaggatgccaccttgtataccggtacctccatctcttccagaaaatcaatgctggtcagatcaaagggagaagaaaagaataccagtcccatctcctctgcgatctttttcagctttggctgccactcccagggagtataggcggtctcatacaacttgtgcagtgtggttccgtcccagatggttccctgtgtgatctggaagcagggatcatcacagtccagtgtgatggtatccggggtgtaagtctgtattttaatggcatccgcaccggcatcctttgctgcctgcatgatagccactgctctgtcaaaatccatcagatgattcgcagacatctctgcaattacaaaagtgggagaatcttcactgattttatgattcccgatcatgatctctttgttcataatagtgcctccttaaggaaatacaatatgttcgtacttcttgctgtcccggatccctttccagtgttccgctgtcatgcgcatatatgtcacgtcataagcagctccgtttttcaccacgtgggcttttttctcttccacgacttcacagccgcagatcttatggagctggatgactccctgattcagggtaaatacatcactgtataccgcatttttcccaagatccagaaacgcatggtcatacatactcatctccagcgccagtgccgtctggatgctgcgcagttttttctcgcccacgtaataggcccatcccagatctcctgtgggattcgtcagccctgtgtaattgatgacgccggctgctgtaccgtcgatctcaatgatccagtagctcacatccggatcctgctgcactttggcaaaccatttcttctgcccttccagagtcagcttcggatccgtattcatatagcgggtaatctccggatccatgcgccagcgcatgatctgttccagatctccctctgtcacttttcttaatgtaacactcattcgcagcccgccttttccaacagttcacgcattccttttaactcaatggcttcgtctaagggaatgctgacaccaagctcttcctccaactgtccgatgatcatgacatgcgccagggaatcccactgctccacatcttcgatcatggtatcctcggtgatggttcccgccggaacctttaatacatcttcaatcagctttatgatcttctctttcatatggttatcctctgcttatcctcattttttctaacatttaccgctgtccggtcttccgtccggcagccgtcatccagccccaggtcaatcgtataaagtctccttcagccagtaggccctctccggtctctctgccagtgtgatctcatagcaggtaccgccctcctgtgtactttccgtcctgtggtaacccagcttttcatacagagcttccaccggcttattcttggctgtcgggatatatctgccgcggagtccggtatatccttcctcctgcatctgctcctcgatacggtcgatcaccgcattctcgatattccttcccatgacacggcagctcatgaccagatccgtgatctccggcagttctccgtcagtatccacgatggctgctgccacgattccgctgtctccaaacgcatccgtcacctgatacagaaatactctctttccggcatcttccacaatctgctgcatctgctctctggtgtagcgtctggtggtcaggttgaactggttcgttttattcaaaagctgtgtcagccggtccagatgttccttcggatccaccgggatcagacagatctccagctttttcacatagtcttcaaagctcaccgcctgctctgccatggcatttctgccggcattggcccggtactgtgcggtcttctcacggtcctctcttgtgatcactgcccgggcaaaatattcttcataaatctttgccatgcagggcgccagttcctccggtcttgccgggaaatcgggcacagtcacctccggcagcatctgtcgtaccatttcccgttccgcttcgctgtcatcaaaaaagacaaaggaatccgttcccagattcagttcttccgccatcttacggatattgtccggcttcgggtcccagttgatcctgcgggctgcgaaatcttccggcccaagcagcatatggggatgatgttccaagatctccatggcatcctcttcattatttttggatgctatggctaacagcacaccctgttcctgcatcagctttatgacccgttgcagatttttataagccagaccgctgtggtcttccgacaaaagcaccggtgtgtgatccgtctctccggccagaccgccccacagggtattgtccagatccaggaccagcacctttttaggggtgcgttcctccagttccgcctgctgtactattttttccgccagaagagactgggtctccatccccagcaatactttgcccatataccacattttcagggaaaacgccttctcctcgccctgatgctctatgatccggcgataaggaaatatccgcacattggaatgtttctccgtcagctgctgcagtgcagcactccacaaactctccagctgctgtttgcgttccggatccgccagcacagccagttccaccgcccacagatatgcatcggagacatagaacacaccatgctccggcagacagccttccagcgtctgaaaccagttttcgatccgctcttttgctgtctgcggatcatagtcatgttccagcagttctgccagatccatgatcagaaaggtaatgtccggctgaaacgcatgataagaggaagccgggttcagcaaagctcccagttcatttccatagccttccgcatcgtagacttccgcctgtttctgtaacatacggatcaccatattcatatttacattggacaatactgccagtctgcctgttgccatagcctcagattcctccgggattatttttcctccgtcatcagacggtatttcatctctgcgatcttccagtctgtcagattatcgatatcctgcacttccagttccgatacgatcaggggcagaatatttcccaccatcagcttcttattcactgcaaagcggtccgtacggaagacatagaactgtcccacatcatgataatggggctgcaggtcctgggatctgctgtccagatattcgggatatttaaataccaaccgttcctgctccactaccatggcccgctggggcgggtaggaaaagctgaccaccggaatcagagtgtccgcatcgcttgcttccagctgttctaccgctgctttcagtttttccgctgtcacaaaaggcgctgtgggatagatgcagcatgccacatcaaaatgcatgtcacgcttctcatattccgccaacacttccgccagcacatcattggtggtggcaaagtctccggaagtcgcctcactgcggaaaaacggcacctctgcaccgtactttttcgcaatctccgcaatctccgtatcgtccgtggataccatcacatggtcaaaaagtctgctggacaatgccgcctcgatggaatatgccagaatcggttttccacaaaaatctctgatatttttcttcggaatccgcttgctcccacctctggcggtgataatcgctaatctgctcattttcctaacctcatctttctcatgccccatggccgcccttcaggcccgtagcttccatacaaactgcctgatcctgtaatagagatagaaccgcagatcgctctttttctgcatggcgatgaatttgcgttcctccggcccggtatattccagataatatttgttcctgtcgaactccggaaaatgtcgttctgtcccctcccgtagttcttttacaaaagacagcttcggcttctccactcccgacagataggagaataaagtgatcacataatacagctccgtaaaacggtattcgatctgctcccggtattccgcaaggaaccctctgttctcgcattccgtgtacaaaagttctgctgctttcatacgatcacggcatttttcctccgtgatgtgatgtaccgtggacaccgcatgctggtaataataatacagcggttcctccactctctcaaaacgtcgaaagtacaggctccacaaggggcctgcacagttgtcttcgtagaaaatatgctccggaaaatccagatgattctcccggatcacactatgtttgtaaattttcagcaccatactgccgggacgcatgaacagtctctcatgcttttccttcgtcagatccccggtctgatccggtgtattgttgacgatgaccttcccgacctcaaaggtatgatgatccaccagactgtaatcgcagcccaccagatccgctccggttgcttccgcttttttcagaagcttctcgtaatagtccggtgacacccagtcatcactgtcgatgaaaccgatccattccccctgcgccacccgcagtccggcatttttggcaccgccctgtcttaagttcacagggttcggaatgacacagaccagctccggataacgcttctgataatccagcaggatctccagagaatcgtctgtagaagcatcatccacgcagaggatctcataatcgtacagtccccggatggtctgtcctaccaggctgtccagacaataattcagttttccctccgtcgccatattatagacgggcacgatgatgctcagttttttactcataggcgttacagatttccccgttctatttttgctctgccgtcttctacccgatagacaatgtcacatttttcaatggtctgcaatctgtgggcgataatgatcaaggtcttgcggccgtgcagtcggttgatagactccatgatggctgcttctgtatcattatccagtgcggaagtggcctcatccaggatcagtacctccggatcattatacagcgctctggcgataccgatacgctgtctctgtcctccggagagacggataccccgctcgccgatgccagtctccagaccttccggcagagtcttgataaattcatccagctgtgcctctttcaatacttcccacagtctgtcctcatcaatcttgtcctccggcacaccgaaggctacatttttacggatggtatcatccagcatgaagatcatctgggggatgtagccgatattcttcagccatttccggtaattgcccggttcctttacatccacgctgtctgcatagatatgtcccgtactgggctccagcagtcccaacagaatatccaccacggtactcttgcccgcgccggaagtacccacgatacctaccgatgcacccaccgggatcttcagatccgcatggtcgaagatcagacgctccgtattgggataggcataagtaatatctttcatctcgatgctttcttttacatccagcttttcatcttcatcggtagcaaaggacatgtcgatattctgtccgttgatctcatcctgtaaattatcgctgacacccatgaagaaaggttcaaaataggcgatggaattgatctggttgttgatacggttcacgcagggcaacagtaccagtgccgctgccgccagagttccgaacactgtcagcatattttctgtaggcacaccggtggccaccagaaagatcatgtatcctaccatagtggcaacgcaggctgtctcgatcagcagcttcggcacctgattgtacaggctgtaacgctgtacggcatccacgtagccttttccgcatttgcggtactcggatacgaaatactgctccttgccggaaatctttacttccttgataccctgtaccgtctgggagatccatttgaacagactgctgtaatagtcctgattgtccttaccggccttgtacatgatgggcttcagcactctcttgatcagccacatcaacagaagcaataccaccgccatcaggatcgtcatggtaccgctggaaataaagcagtaactgatgacaaacagggaaaccacgctgtcggataacagctgtaacagtgccaggatcagtgcatacatattgttgacatcggaagtgatactgcgctgcaccacagcggtatccgcattcagataaaattcataacctctgcgcaggtaattacgcatcatgcgctcggaagtgcggaactggttcgtatagacaaaggataaagtcagcttctgctgtacataagtaaacaggttcttcaccacaaataccagaatcagcaacaccatgacaataatggagaacgtacgatagctctccacacccatgatctcatagcaggcttccgccacccggctgtgttgtaccgcttcgggatcaatgacgatctgcatgacctccaccagcatccccacaccggcagtctgcaaaaaggcactgatcaccatgaggataatgagtcccaccatggttcttttctgttttttgtccagcaggacacgtaatttcttgatgatctgtatcattgacggtctccaaacttatatctgttcattctgtctgtggatcagtggatcctcataggcatccataaaatcaggtccgaggcgtaccgcctcacccgcaaaaggaagtccctttacctccgtaaatatggttaccacctttttaaaacgcagattcgggaaaaagttcagcatctccatgggcatggatgcatcgaactggggatattccgcaaaaagcttctggtaatccagcaggtctctgggatggggctttaaaaatatggtgccctctttttcatacattttgataatatcccggaaaatctgttctctcacatccagtgcgcatatcggatccgtgaggatcaatattttatctcccaccttattgctctcttcgatctggtgttccagttcgtctttatttctcacgaatgcctgcaggagcagctgcttatcctccgctgtcagccggtcttccagcggctttctgggaagttcgatatatcggggacagggatagcggatggcggaaatgtcatttacttccatatccatgcagtattttccgtagccgttctgaacaaagatcaggttcagatacatggacaggaatgccttgatcttaaaatgtccacggttgtcatatcgcgccgcgtcaaaattcttgagacagttcaggccgtcttccacggcatgatagcggatatggttctgattcaggtagtagccgatgggatcggaatcgcagtagacataaatgtccttgtaagtccgaagatctaccggcacataagaagcctcgagtctggcgtactccttcgtaaagcggatccggttcttcagattccccagaaagcttccggtgtcctcccggtatttttccagttccgggaagaaatcttcacgcttctcatcgaattccagtacctcttcgaacagtcccgtgctctccacccgggatttcaggttctcgaaattattggacattttggacagcactaaagtagcagcccctgctttcttcgcaggatctgcctccgcccttaatttcagttcttttaaaaaagtcacatatacatgatagtatgtgtgacagatatagattctgtctttcatatataatctctattattgcttattgccgtataatttagtaactattcactccccatccgcagaatcgctgcaatgcggattccatgaatagttacactatagcacacttttcgctttcagtaaaaaatcttatgaaattttaagaaagttggggcaacagttcagccataggatggcagaattggtgcgtgggtgcttgcacacaaggcaacgattctgtcattctatgagcggagctgttacagtcgatacacccagatcccccagtaagagtcttctgtttcaaagtatcccacaagttccatgcccatcctgtcggcatcgccgatctcagctccggagaacaggtactcacatcccagttcccgcaatgcctccatgtcaaattccaggccttcatagaccagtgtgtttcccttttgcaggcgcatgtaattgccggtaatgctgttgaacagataacagcggttcccccatgtatcaaagtatacccgcacttcttcgtttttctcaatctccggtgcaataacttcccggaatctgtgcttgtactccagaggataattattggaatatccgtccaccgtataaaaaccatgcatcagtgccggtgccgggctgatccccagatgcgccacacgataggtgctcttgtcccggccaatcgcatcatcgatctcctgcatcagatcctctgaaaaccagctttcccaggagatatatcccgtgattccggatccgttattgatctggttcacattgagatacattccggaattcactttcaacagctgaagcgtcggcaacagacacactgccaggatcaccagttttcccggcagcatcctgctgtcggtatgcggcactttcgttctccataatatcgctgccgccagtgcgaactccagataccagtccgcaggatacagccaatagaaccggtggatctgaaaatagtgtaaaaatcccgcgacgctgtttttgaaatcaacgaccaccgtcatatgacaaaatgcataaaacaatgcgatgccgatcaggaataaaaagttgataacagccgccttgtatatcattctgtccgtttcttcctttttgcaaaatgctcccagaagcaggaatatgacaatcggcaggatcagatatttatgtaaggacggtgcgtgttgtgcgctgttccggaagatgctccaaaaagtctcaaaaaagggagtcgcagaagacaccatctcttcccggtggctgacataacagctgtctcctaccagaatctccaggatcagtgaccagttgacaatgacataagtcgccagcaactctgcaaatcccagaaccggccatttattctttcttttctgaaagaaggcaacaaggagtgccaaaagccacaatcccagcaccacataaccggtatacaccaggtggctggtcaggccgaacagtaacgtacacatcaatgcgggaaggattcttttccgtttccacagacacagaaaggcatatgccaccaaaggaatgccgaattccgaaagaccgtagaccggatataagggcagcacacagaaacatgccccggctatcaccgccagaatactgctctccgtgctctcctttaccaacagatacattcccagaaacgccagcacaaagcagatcatgtattgtgtaagaaacgccaccctggcagaaaacagacaatacagcggcaggaataaaatggccgatggctgcataccgctggcattgactccgcccagcatctccggatataccgtactgccgtcccataaatgtctggcgggaagcatatagttcataatgctttcatccagctggtcgttgatctcaaagatgcagccatcccccagaataaaatagggggaaaaaaatacaaccacgatcaaaattccggtccaccagagagggatcctgtccagccacaggaggaaccggttgatctgtctgcctattgcaggtttttcatcagaagtgaacaataatatagtcccccttatctacaatatatccctcctgcggatattccggcagatccagagactcttcttccgctgccgcatagaggctgatgtcctccagagccaccagctgatgcccgtgcatttcaaaaaatttcaccagctccgcatcggaatcaaaggcatagcgtccccagtcgataacagacagtgccggtgtctgtgccacccacactcctctggatccacgattgtatttatccagcagatccgggtccaccagatccgccaatcgtttcatcttataataaacagggctgctgtagctcacataggcaccctgaactatgctatagggaatatcataatttcccgtgaagatcaccggttttgaagtatcaaagtcccgttccagatccattgcaatctgatccacggtcttcactgccgcatcatattttttcttgtcaatatagaaccatctggtcatatccatacactggttccagaggatcaccgccagcaccagaactgcaagtgccctcacaccagcagagatttttctgccagccgtattcttcgcttttggggacatagttcccgtcagctgccagatcccatacacaaaaagcagcgctccgtatccacagaagaccggcaggaactgtgccgaacggtacaatgtggcttttccttcaatgaacagaagagaaaatgctgccaaataagcggcaggcaacaacagaagtgcccacagatctctgccgcggatcacccgcaccagcgtcaccacaaggatcacagccgctgataatataaaaatccggatcggcagataagcataggcaaataccccatacagcacaaaggtcctcttgaggatcatggcaagctccccgaaagcccccggctgcagcatccagcccagcatttccgtcacggaacgctgtaccgcctctccccgcagatattccaggtgaaatgctttcgtcactaccacgatcatcacactacgcagcacaatggccacaagcgccgccaccgcaccggccaccagtgtggcaaatatgtccttctcctgacgtccccgtgcgatccgctccgtcagcagcaagagcatcagccccgccagccacaggatcataaaggactcgtaacatcccatggcgatccacaaaaagactgccgccgtcaggatctctgccactgccaggcatcccagtttctgccggataccggatcctttttgcattttccgggtactgctctgccattccctgacacagcacaggctgatgccacagcacagatagccgatggcgataccgttatgcaggaaataagtaaagacttcactgatcaggggactggagagaaagacggcaccgaagaaagcatagcctgccgtcggaaccttctctcccaatacagaataaaacaatgcagaccagacgaccgctgccagcaccagtatcacaactgccgcaaaatccgtcacgaagggaacaaactctgccagcgataccaccttattcagcaaaaacagaacccaccgccccacaatggcgatcagtccttcttcaaaataatataaggatggcgtatcatcgatgccgatggttgcatttgtcaccttatagccgtaggcacacaccgctgtcagtaacaggatccccatatacaggcggttctgctggaagtgtttcctgtagctcttccatttctgcatcactttttccatgcttttcatccattcctttttcttattcgtccattactgtgctactcttcctccagcttctccagtcgaaagattgcaaaatcataatacatataatgaaattccaatacctgttcatagctgtactcatcttccatttcattggggtagcccccctggaagcagatataccacagattatcataagcgtccagctgactgtaactgctcagtgcttccgtattcacaaaaggaagactgtacagcttatatgcgatcgtgtagtaatgcagttcaggatgatacacattcaaaaagatcgtatgcgtatacggtccgatgatcgcatcattctccgtcatgtattcctccacgaaattctcgtaggtttccagaccgtcatcatattccagcctgatctcggaggtatactgtaacaggaagcagagacctgccgttcccagaaggcctgcagcccatattttcctgcttttgccttttgtgttctccgtgatctgtgcaaatcccacggcataccacagcatgacaaagcccatgcccgggaatgcataacggcccataaaacagttattgaccgtagcggagatcacgcctcccacgatacccgtcagggcaaatgtgccaaacgcgatggccggtgcaatgttatgattgtgtctcacccagtccacggctccgtaactgagtaccagacataatgccattcccaacagtacgacaatgccgatgggagtctccaccgctgagaaccattccttacaataatccatcacggaatacagcgttgccagttccgcagtggaaccgtcatcgtagcgcatccgcaggacaaattgccggattgtcaccgccagccagggagaaaacaccagcgccaccgtaaatccggagataaaataccccttgatcagctccttcttatggcagatcaggatcaccgcgaaaaacagcagatagaataagaacgtctggatcaatgcaaaggtatgacaatataccgtgccgatactggcgatgcagaatacgatccattttttccgggtcggctctctgaaaatgtcataggaagacagtcccgtcaacgtcagaaagaacagggccaccgcatacattctcacatttcccgcctgtacactgaagatcggcatcagcagggaaaacagcataaaatacaccgaaatcttacgatcaaacaattttgccacataatattttcccagcagcatatatcccagcatgaacagcacggacatcagcttcagtgcccagaaatgggttcctccgccgcacagatgatagaagatttttaacaacacatagtaaaacggtgagtgatcatccgtggctgtaatatagatcagccgcttccagggcagggataccatggatgccgaataagcctcatcataccagaggctgttggtaatgcagaaagctccccagagaagcagtgccgccaccggcagtccatgccacagcagtgcccacatattgttctctgtgaaattatgctgttttcttctctgtgtctccattacgtccatagtttcttcccgttctgtctttttttatttcacatatcagatttcagatcttttatcagtatctctggtacagcaccatatccgcatccctgccgagctcttcataccctgccgtccggcacatttcatcgatggctccaccgctcaccgttgccagataacgactctgcagctctgtcagatgctccgtaatatattcccgttcacagcagctgatgccaaagcccttcggtgcactgtacaaaagctgccatttcagattctgatggccctccggggtctcatctccgaaggtccagatcactacattctcataattcggcacctgttctgtgtccatggccagtttttccgagaagatttcccgccagtactccacctgtgcctgccgttcctctgtcacatagggaatctgatagtcataaggctccactgctttgaagctgtacagatacaggaaagccgctcccagaagcaccgctttcttataatatctggtctccagcatactgacgatgaaaatgcctgctgcgataaaggtcaggaaatgtttgctgccttccaccattttgtacatgagcaaatgtgcgaacagcatggcgatgaggctcagggcaaaatgcacttcaataaccagctggttgtgcagtccccgttttctgtcctctgtcagtgtgtacggtccgaacaacgcctcccgtaccttcttatcctccggctccatcgcgatccgttccacccgcttcgcccggcgcagtgtgcggatgtccagaaaactctgcaccaacaggatcagcagtaccaacagataaccgtcaaaaaaggctccggaagccagaccattccgtcccccttcgatacaatgtctgtagaattccagtcctttccagtaaagtgttccgaaaaggttgcggaagcccgcgccgatcccatcagtgaaaaaggtagtgatccagtccgtataaaacagcggtgtaaaatattccgctcccagataatgtttgatcagggcataggtaattcccgttgccgccactatcagaatcgagccgatccaccctgcctttttattacggcagatccagaaatagcaggccagagccagaaacagcagcatataaggccgcatcagggtcagcagtaccgagatcacgaacatggcggtcagtttcccgcagctctcctttttcagatagctcatggccagtccgtagaacaggatcagcaagctgaagcagatcacctccggcataccggacagcatatatctgacaaacagggaatacaggctgaacaataccgtcaggatccccagctgtttccaggtgggcttcaccagccagacaaatacaaacatggtgattgtcagcagcacaatattgcagatcaccggagacagcagattccagccgaataacagtccccacaggatccagggaaataccagcaccggactccatgctgcaaaggacaactgcaacgcatgactttcgttaaaaccgaaatatccccggggaaaaccgtaatttacgattccctccacctgcttgaaatagaataattcgtcgttccattccgaagagggaagatacacctgtccgatgcttcttccttccgctgccgtccgtaccagacagcagagcaggggaagcagtgccatcagtaccgctttcagcagtgtcatataacgtttgtcctgtttccaccaatccacaaaacgttctttcttcatccgttttcctgttacccttctgttttatttcgatttaccggtcttcctcacccagatggatcttttcccggatcacatactggggagaattattcatgctgatgtaaatacgtcccacatattccccgatcagtcccagcatgatcatgatcatgccgccgaaaaataccacggctgccatcagggcactaaagcccatgggcacattaggattcaccagacgcttgataatggtatagattccatagaggaagcccataccggcacatcccacacccagtgtagtggcaatccgcagcggtttcaccgagaatgcggtaaatccgttgaaccataagcccagcagctttttcaatgtatatccggaactgccttcctctctttccctgtgacacaccgccacattggtaatgtttttggtggcccggagcaccagtccaatgacataggggtaggaattctcatagcggatcatatcctccaccacgaatctcttcactgcaaaatagctggaaatatacagatccgccggtttatccagcatcatccgggtcatcagctcattgaccttgcttcccatattccggaatgtggaatgctgtttatgttcgtagctggcgtaaacggcatcgaaaccctcttccagcttgcccaacagcttgtccacttcatccgccggtgtctgtccgtcatcatccagacacaccacgtaatcgccgtcggaatgacgaagtcccgccatcagtgccgcatgctgtccgaaattccgagcaaagccgattcccttgatattgtcatatttatcacacagatcccttatggttcccatggtattgtccggggaagcatcgttcaccagaaaaatatcgtattcatactgcgtgagttcctgcattttttcccggatctccttcaccacatggggtaaggtatgttccgagcgataacaggggattacaaaacttacttttttcataattgtgttctattcctcgttttcctgatcatttccggaattcactgccgccatccagacgatgtcccggtagtcgccttcaatacacacatcgtcccgcaacaggccctctctgcgaaatcccgctttttcatagctgcggaccgcctgcccgttctccgacagagcccgcagatacactctgtgcagctgttcttcctcgaagcagtaccggagcatcagctttgccgctgccgtaccgacacctctgcctctggcatcggcctctccgatgaaaataccgtattccgccttgttatgatgtctgtcaatatcccggatatagacggatcccagtggcttgtcgtttgccagatcacagatgatcatctgcaccacatcgccggtctccacatgggtccggatccagttctcatgggactctctggtaaaaagagcctgatagataaaatttttccgcacggcatcactgttgcgccatgccacgatccggtcggtatcctcacgggtcatcagccgtaaatagattcctgctccggtatcccgataaactccgggaatccgttccggcgctatccgcttttttatttctgtccgcatggtatcctgcataatattcactccttatgcctgtctgtaggcattgcacagatcgatcactctggcgatctcatcctcccgcatctccgggaacagcggcagggtcacgcagtgtgcggccagatattccgcattgggacagtctcccggctgatagcccagattagcataagccttctgtaaatggcagggtaccggataatgcatgttacattccacatcattttctgccatataccggataaagtcttcatgatccggcaccgtgatgacaaacagatggaagaccggagtggtgttctccggatgtctctgcatgatgatcaacggatttgtgatctccttcagataacgatgtccgatctcctgccgtctcttcgtccactccggcagatatttcaggctgacactcaacactgccccctgcagaccttccagccggtagttgtaaccgatctcatcatgataataccgcacatcacagccttgattcttcagacggtcgatatgcttataatatttttcttcctgacaggtaacactgccaccctcaccaaaggcgtagaggttcttgcccgggtagaagctgaagcaggccaggtctcccagcgttcccacatttctgtcctcaaactttgctccgtgagcctgggcacaatcctccactacaaacagtccgtgacggtctgcgatcttgcggactcccgcatagtcaaaaggctgaccgtagaggtgaacaccgataatgcctttcgtcttttccgtgatcttagcctccagtacagaaggatcgatctcccaggtatccggcgtacagtctgcgaacaccggtgtggctcccgtatagcttaccccccatgcagttgctatataagtattggccggaacgatcacttcatccccggggcctacacccaatgccaacattgccagatgcaaagcggaggtaccgttgttgacaccactggcaaatttgcttcccacataggcggcaaactctttgtcaaaggcatctgcatattttccgccggaaaaagcggtctctttacatacgttctcaatggctttccggtaggcttccgcatgcgcctccacatctcttgtcagatcgattcttttaatatgtgccatggtattatccttctttcttccgtttccggggcaaaagccctcaaccttgatgcctacggattgttccgtgctacgcacttatgagcgagttcatgtgggcttagacctttttcccctggcatcttatatatgcttcttaatataaaactcgttaaacaatcttgcaatctgtaccagataattacagatcgtcttaaataccttaacggtagtattgtaatcttcctgccactccaccgggtaatccaggatcttcacgccccgcttctccgcccgtaacaggaattcgatcatatagaaccagccgttatcctgactgcagccctcaatcagggaaagcgcagtctgtctgcgtacaaaggtaaagccgcagatggcatccgtggacttcatccgcaggaacagtttcaacagaatcagcagtccctgggacgtgatcctgcgataccattttcttccctttgtatcggattctctggcgaaacggctgccgttaatgtattcgatctgaggctgtgtttccaaaagatggattgcctctcccagatgtttgatattggtagacaggtcaatgtccatatatcccaccacggcaccgtggctcaattccacacctctgcggaaagccgcaccgacaccgcggacattgattctctcatatcttactttttcatatttctgacagagcatctccgcaatctgcggggtctcgtcctcggaaccgttatccacaataatgatctcataatcttcaaatgcgatcttgcgcagataatccaccgtccgtgtcacaccgctttccagccgcagacgctcatttaataccggaaaaattatcgtaaacatcattttgtcagtttttccactccttctattacataacgctgtctcttaaagctcatattcagaatgacggacaggtatttgaagatcaatgtcagcatcaccgacatcatgaaaaatccaaaagaaatcagagtcatcaggctcatccagccttccaccgggcgtaccgtgctgaagatggaataaacgatccacccgaacatgatcaccatgactgcaaacagaatactactgatcagcatggaaaatttctccagtacatccgtgaaaatgatcagcgtatccagagccagactgctgcgggtattccgctcttcccggttcctggttccctttgccatctctttattgtcatagactatggtctccgcccgcagtccgcagttcatatacatggccttgcggtaaggaatatacgcattcatctgattcacacggttcactgcccgtctggaaataatgcggaaacgttcctgacgcagcttatgggtattacggcttcccaaattgtacaccgcatagaaaagtctggaggtaaatgctacatcccgcttcggtgccgcagccaccacgtcatagccttccaatgccttatgatagatatccatgatcagggacggttcaaaatccagcagacaacggtcgaattcaaagagaaaatctccaacagccagatctcttccggcgttcatggccatttccaccccctgataaaagctcaggttgatcaggctcaccacatggcgggtattgctttcttccagataccggtggatctcctcaatggtatcatccatgcagcagtcattcacacagacgatctcatatttttcaaaattctgttccatggtcccgcagacagtcttcagaaactctctgatattttttccatcgttgtgcagatacagcacgcaggatacgaaatttttctctttattctgtattgcttctttctccataatgtttcctttttcttcgcgattaatctaaaaacggatccagatcatatacggtattgatcttgcccgataatacactgataaaaacaggatcttcggaaagagcccggattactgtgggtctcgaatcgtcgatctccgaagccttcagaatgggcttcatggaaaacaaagatttctcatagctgaacgcatactcttcccgcatatatttccgtgccagtgtggacatatactcccaggcgctctccggtctgccggggcaatcgttacagttccccagaaaacctccctgacagcagttgccattctctcccacacagggaaactgtggtgtcgcatcatagctggtcttatgaggagtaaaggttaccgaagtcagggaatgataaccggtctttccaaacggcataatggagaaaaagggaccatccattaccgtaaaaccgatattccggatcttatcgctggctttgcagagaatgatctcgcacagttcatatttcagtccgaaatcctgcgtctctgtgccctttactttcctcaggatctgattcacagaagcgtaggtggcattcaggacaaagggcgcccggtagacctcctgttttccttcgtgaagtgccgtcacctcatagcagtccgtctgcttttcgatctccgtgatcttccgtccgaaatgcagctttatgccgggatattttgcaatctcctccatgaggtaatcccgcaaaatatgggcatcgtacgtatattcctccgtcaggaacgctccatcacacaagccaggctgaaaatactcttccaccggaagaggtttgcaggggatccccgcatcctgacagaatttgcggaactcggttgcgtctgtccaggaaaaatggctggaagtcgcgtaaatctgctcaaacttcgtatgaatacagaaggaatagtcctccacaaaacgcttgaaataccccgctgatttcatagcggtggacagagatcttggataatggtagcccatgtgaactctggcctgattgatatatgtggctctggtaaaaggagcctgttcgatctccagtacctctacctgttgtcctctttttccacagtacagggccgcgtacaagccatacagtcccgcaccgatgatcagtttatccatttttcctcctgccggtgacaagcgccagtacataaggcagcgccagcatcaccggatatacatatcgcatctgtacggtgggcccgaacaacatggtcccgtaatagcctgccacaatggcaaggggcagacagaaccgcttcctgtctacgatcaccagcactgctgccagggccagatacagccacagatagcttcccggcacgaagagatatttcaataccggagtccgcagataactgttgttctctgcccagctctccagctgttcaaagagccacggccatttgctgtccttgtagatccctctgtcattcagcgtgtcttcttcccatctggtctgcacatagcttaatcctgctctgccctccacacgattcacatccgcatgggtcgtatcaaacggagacaggaacccggcattggtagccagtgccgcattgatcatatctcccggatactgcgtcagcaggtgcagatatacccggataaattcaccggaacggtagcgtgccacataagtgttggtatgtcttttgacaggatccgcaattccgggatcataatcccgatacgcctcatccagaataaaatcattgatcagtgctttgtccgccgcatccatggtattgtcatcctccgcaaggacgctgactcccccgtgatagatcatacagcgggataactgctggatcggcatgctcagcatctcccggcggtctccctgttccgcatgcgtggcggaaaataccgcagacagcacaaaaagccctacgcagaaagctgctccgcataccaccagcagtctcccccagagcttcctcgctttttttccgaaacaaaaggtcaggaatgtaaaagccaacaatacgatcattgcatattttccgttgttacggaataagatcatccccacggttcccagggcaaacagcagatcccggatcccgggccgccaggcattgcggtcttcccacagcagatctgcgagactgaccagctgcaacagcaaaaatgcactgaataccgtgtccttggtcatgctgacactcatataccagtgaaacgggaaaaacatccccagtaactgaatggccagctgccaccctgcggcagttttccggtgatgcagtaccagcattccataagccatgcttcccgaaagcaacagcatctgtactgccgtatagaatgccattccggcattcacactgccgaagatatgacttcccagccacagcatcccctgcagaaacagagtgtgcacaatggggtgatgatcgaaataataatgttccatgatctgtcccgtctgcaccggtgcatcataggcacagattccgggataatatgccagatataccggcagccaggccaacagcagaaacaacagacttccgaaaaatatctgcacaccggagcggcgctgcagccaggcggaaaggcgggcataccatgcagcctgctttttcccggtgtcttcggcggtctgtgcccggttccaaagtcgatgcaccacccaggttccaagaaatcccagaaggcaccccagcactaccgtccacagcaaagtacttccgatgtagcctgccgtccacaggatgtttcccgcagatgccaggtctttttctgtttttgcaaaaaatacaaacagacatcccagaacactcagcaatacaacgcctttgcgtctgggaagaattttcttttcctgcatattacaaccctttacgcacctgatgctccccatggacgcgattcaggcgatattcaaaatctttccggtccttggccgccatgacttccagcatcataccggcaaaaaacgactggatccccgccagcaggataaagccacaggcgatcagtgtcgggaatctgggcaccagaccggtattcagatattccaggaagaccggtacgaacaggatcgcggaaacagcgatcaataacagggccagcataccgaaaaagtgcagcggcttgtaatttttgtacagctgcatcattttacggatcacacggaagccatcgctgtaggtattcagcttggactcactgccctggggacgatcgcggtattccaccactacgttttccacctgcatgttgtagtttaccgcgtggatcgtcatctctgtctcgatctcgaatcccttggaaaataccgggaacgtctttacaaattcatagctgaaagcgcgataaccggtcatgatatccttaatgttggcatgaaaaaggctgttgatccccgcccgcatcagactgttgccgaaattgtggaacgggcgcttgttctccgtaaaataagtagaggaaagccggtctcccaccaccatatccgcctggtgctgcaataccctgtctaccatctcctgtgcgcaatccagcggatatgtgtcatctccgtcgatcatcaggtaacattccgcatcgatctcacggaacatccggcgtattacatttccctttccctgtgcatattcatagcgtacgattgctcctgcctccgtagccagctccacagtgcggtcggtggaattgttatcatatacataggtcactgcctggggcaggaactttttcacatccgacaccaccttggcgatggtcttttcctcgttatagcagggaatcaataccgcaattttatccattttccattcctcgtatttcattttatcattcagagcatcacataaatttgcaaaaccgcctgataaatcggtctttccttttgcatatataaaactattgtaccacgcttattgatttacagccactgtttttttatgctataatcaagcgtgaaaatgcagcgctcaaaagttccggaagacttcctgtctctcgccggtgcttgcgggcaagaaaggacttttcccatgcaaaagttttatcgtctgtctgtaaatatcgtaaagatcctgacactgctgctggcagtttttctgtttattggcagctttctcactacctgttatgccgaaaacatggagacccagcaggtgcttctgcgctttgacaatcccttgtggaatctgctggagcttgccggatacgggcttttatttgcctgttgtctgtctctgtccggcaaggccggtgcaaaattccgccgcgggctgcttgtttttactctggggctgatcctgcttctgggtgggatgctcatcgtcttcggccgcacagttcctgctgcggacgccttatctgtatacaatgctgccgctgaatggatccttggaaataaagatattatccaccccaccttctcttatctgtcctattatccacagcagatcggcctgatggcctttctggagctgctgctccgcctgtggaatctcaccgggctgagcgctcccgcctggcattttgtcaagctggtctatgtctgcctgctgtgcgtggccgttctgttccagtaccgttccctgcgctatctgtggccggatgattgggaaccggtctcctgctgttatctgattctggtatgctgtaacctgcctatgatcctgtacagttccttcgtctatggcgagattccttccttcgcaatgctttctgtgggactatttcttctgttaaggctgttggcagactgtattccggcacattccgtggagaccactttcccggacgacacccgcgtcgtgggtacttcccacgcattatccgcagttacggtctttaccgcccttggcagtatcctgttccttactttaagtgtgatgctgcgcaagaactccctgatcctcattattgctgtgctgctggtgctgttcttcgaagcgctgcgtccgggacgcagcggcagggcgtgcatcggcctgatggctatggcagtctgtcttaccattacctccgtgggagtcctgccgctggtgcagaagtgctacgagaaaaaagccggcaataccttaagttccggtgtcaccgccatgtcctattttgccatggggatgcaggaatcttcccggggatgcggctggtacaacggcttcaatatcgatacctatgatgctgccgggatgaattccgacgcagccaatgcaatcagccgggcggcgatcaacgagcgtattgcctatttccgggagcatcccggctatgccgtgaacttctatctccacaagcatctgtctcaatgggcagacggtacttatgccagccggcaggccactctggccacctacggtgggcgaagcgactttttgaaggaagtctatgaaggttctcttgcctctgcttatatcgaatggggcaatgcctggcagaatgtgttgtatctgggcatgctgttgttctgtattgctacagtcagaaagcgccgtcccggcaatggctccgcgaatgccgcagccaacgacgatttccgtttccgcaacctctgcctctacacctatacgggactgatcgccgtgctgggcggtttcctgttccacacgatctgggaagccaattcccgctatattttcgtgtacagcctgctgctgatgccttactgtgccgccgggatccatgatggactggtgcgtctggcagcatggcgcagcaacagaacgctgacacgtcactcaaattcataaaagcaaaaaactcccgtgaatcgaataaaataacattccattcggttcacgggagttctcgtttgtattttaaacctcaaaattcacaaataaaatacaaaaatatgttttttcaagcctaaaaaaattattattttcgttaataaaatattttgaacaaatttcgtacaaaaaatcctatcttaccatactttttgtacgagaatgcttataaacggcttatttacgaaaatcctacggaaacagtattttctaataatacatggcaccctgtaaaaagccccagaaataatacaatccacacaccagatgccacagataggccagccattgtatcgcaaccagtccctttttcttcttcgtatccgcctttccggtagcccgcagcaataccaacagtgctcccacaaatgcaaaaaagataccgtacatatatccccaggaaaagttaaaatccatctcccggaatcccttctcgtacaggcaaaacgccatcagaaaactcataccgtaaatctgccaggagaagcggtaaatgctgtctctgcacaactccttatagttcaacagaagcaccaggatcgggaaaccgacagccagaccgatagccagcggaagattactgcaatactgcagccacacatgtcccagcgtaaaaccgatgccgccttcctgtccctcctgcgggacgaacacaccgcggaactggtacaacagatccgcaaaagtaggaaggaagcatactcccagccaaatggtgggcatgaagttccggaatttgctgtggaacattctccacagcatcagaattcccgcggcccccaccagtacgatcgtaaagctcggcttcgccatcgttgccagtaacagataaacagaaaagaggatataatctcttccatactccttgtgggcattgtcctgttcatacagaggcatcagctctgcatacttgaaaaatgccaggattgcaaagggtcgtgccgccatataagtagcgttatggaaaggatttgccgtaaatactcccagatacttgtacttgatccccggcagatagattcccgttggcggatataccatggatacgaaaaacagggataccgctaccgttcctgtgagtacaccgggaagccaggctttcccgggcatggctttacgcaactccgcccccacgtgcctgtccagcattattttcagggcgatcatcgctgcgctgttcagcaacatcgctgccagcgccatggccagttccgttccggtgggcagactgcctgtgaccagatggatcactgccgccagcttgaagaggatcggatagggaaagctgtaaccgctgtccagtccctgcatttccagaatgtatgccttcatatcggaatgatacagtcccgtccccaacatactttccacgcactgccggtaaaacagccagagagtaaccgccgaagcaatccccaccagtacggcaaacacaacgatctctatgaaattttcgacattatttctttttcccgtactgttttctgctgttttctgtctcatgccgccttttcccgctatccgtccaggtttcacagtcggatcctatttcagcttcgtgtaatatgctaccacttttttcactgcatggatcacatcttccacgtcttcgtcggtcaatccgtagtacagaggaatactcatgacttcgttgtagtatttctccgcattcgggcacagccctttttcataacccagtttttcataataagagtgccagtataccggcagataatgtacctgcgggcaggtattctctgcatacagcgcgtcaaagaactgccgtctgtcgcagttcagattctccagattcagatgcagtacatacagatgccaggtcgtgtcagactccgggatctccttctgcaggatcagttccggcatgtctgcgaaggcttcgttgtagcgtttgcggatttcctttctacgtttctcaaaagcaggaagcttctttaactggctaagtaacaatgctgcctgaaaatccgtcatacgatagttaaagcccagttccacctgctcgttgtaccacagagcatctgtaggatgtaccatttcctccggatttctcgtaataccatgagttctcaatctcatcagatggcgatatagtttctcatcattcgttgtaattgctccgccttctccaccggttactgtcttcaccggatggaaactgaagcaggtcatatctgccaggcttcccaccggctgtcccttataggttgtcccaatggcatgcgccgcatcctcgatcaggagcaggttatgctctttgcagattttcctgatctcatccagttccacagcctgtccggtgaaatccactgcgacaattgccttggttctgggggtgatcagcttccgaatggatgccggatcaatattataagtctccgggttaatatccgcaaagaccggctttgcaccggcatataatacacagttggaagaagctgcaaatgtaatggagcttacgataacctcatccccttcgccaaaacccgctgccagagccgccagatgcagggctgcagttccgttgcatactactactgcatatttggcatgtgtcaattcacacaaatgttcttccagttcctttaccttaggtccacaggtaatgtagtcgctggtcattactgctgccactgcatctacatctgcctggtcaatatattgccgtccgtagaaaattttattctctcgtacaggttttcctccaaaaatagctaattcttccataggggcctcctttggtcactttttgcctatttactgactcatcttatcatattgaagaaagaaaaacaacaatggtgttggcatccatcgctttgctgcggtataataaaaccgttataaatccatacttactgttcacagaaaggatctcttcgccttatgagttcaaatacgaaaaagagaataaaatcatggaaactcttttccggtatcgttattgtagttctgctgcttgccgtaacagccgccggaattctctatgtgaaaatatatgaacccggaaaacgttccgccgatcttgggcgcctgcagcaggaatcctatcagggggtcttctgctccatgtatgcgccggaagctttcccggaagacatttactctacctatatgggttacgatgctgtcagctgttcccatcgcctgacttccttttccgatatctccgattatctggaaactgctttttcctccggaaatgaggtcactcacgtattgctcattttggaccccttactgctgtggaacagcaatttccataataacagtcgattttatgcctctttcgatgaggatcttttggcatatgtcgattcttattccggtgttgaatttaccatagtattctcctgtccttctctgaaatactggcaggcccacagcagtgacaccgaaacctacgaaaatctggtgcaggtcctggcagctcccctgtctgtccgggaaaatgtctctctgttcttccccggcggagaagaatggctgatctccaatcctgatgcctatgacactcctctggaattaaatgctgtcgctgcccgctccgtcatgctgctggtattgagcggcaccttgcaataccatggtatagatgctgataactccagtctgacacagtttgataccctggtgcaggcagccattaatgcccctgcttcctactccgatctgtccgattataacatcgtctttttcggtgacagcgtattcggaaactatcaggattttgcctccatccccggcgttatcggtgccctgacgaaagcctccgttcacaaccgtgccatcggaggttcctccgccacacaattgacccccgatgacaaatccttccccagtgccgtacagcgctttttatcggaagatactgccgaaatctccggggagaaaaaactttgtttcgtaatcaattacggattgaatgactattttacgggatatactgtggagcaataccgtgacggtctgcaagcaggggtgcaatctctgcaggatgcttacccggatgctgaaattctgatcgcttcctcgaatttcattacagcgttcgacaacggtaccgctttcaacaatgatctggatgaaactctgaacgattatgtgaccggtgccgaagaaaccgcggcggccatgaacgttttctttctcaataccaacgaagcactgcaatggaatccccaaaatgctgcctgctatctggtggatgccgttcatcccaacgaagagggacgtttcctgtttggcacagcaattataaaggctttagaggaggatattttttcttatcctgtacactgatatcttttcccagctgtacttcgatcacctggagctccgtgtctgccagaagcatatgccggcatcccgccggcatccgcagcacatcaccggtctttactctacgttcctcaccatctatcactgcccggccttctccgtagatcaccgtccatacctcatcccggaattcatggctgtgataattcatcttatgtccgggattcaatgtcactttgatcgtcagactttccttttccacatccatgatccggaagcttccccaggatttttctgcgaacatgacctgctgggtaaaactgctcacatatggtttgatatagctggactgctctttgtccgataccagaatcccctcggggctggccgccacgacaatatcctgcaatcccatgcacagcaccggcatatccagctcattcaccacatggacattccggcaggtctcattgagcactgcctccccgacgcatgcactgtccatggcttccgtcagggtgttccaggtacccagatccttccaggttccggcaaaacgcatgacctcgatctcaggttccttctccactaccgcatagtcgaaactgatcttctgtagggtttcatattttcccagcaaatcttcataatcggtaaactctataagttcatgagctttctgcaacacgtaattcaggcggaaggcaaacactccgccgttccacagcgctccctgtctgatatattccgctgcctgctccttgtccggtttctccttaaacatttccaccgggctgatattttccgctgttttcggaatgatatagccatatttttcgctgggatacgtcggttccatacccatcagcaccagatgggccgcactctgtgccgcacgctcctccagctgctgcaaagcttcgaaataatccttttccacgtacggatccaccggacatacgatcaccggctcttctcccgtcactccctgcacatcctgcagatatgccaccgccagtgcaatcgccgggaaggtgtctcttctgcagggctccatgctgataccgacattttctcccagctggttgtggatggaagagatctgtgccttggatgtggcaatcgtgatctttgcctccggatccgcctcccggatctgccggtacacccgctgcaccatggactccaggccgccgtcttccgtatggaatattttgataaactgcttggaacggatctcgttggacaggggccaaagccgctgtccggaaccgcccgataaaagtatgatattcataagcgtcctctcttaattctgtacggtaagcagcagataatctcctaccgtatccactacatcataggaaaaatcaatgtattgcagatctccctgatacaataccagcaggccgtctcccaccatctacaccagttctgctgcctgttgctctggatagatgtagtgataccggtccgcataagccggaagctctcttccgttggagacattactcttcccctgataatactgtgcgtctatcttacagacatactgggtcaggatctccgtggcatcccggttgaactgccagcccagattgccggtgatgtacagactttcgtattcctccagagaatccgcttccgccaccgcctccatgaaatctttgttatagtactgtctgctttcttccgcataggtagtaaaataaatcccaaagaacagaatactgctgattccataggcagctgcgaccaccggccacagctttttccattttcgaaccgtcagaccgattccgtaggcacataacaggatgatcggatagaaaataatattcacacggttaatgttgacttcgtaagtgatcaggccgacccagatcccggtgaccaggaagccccataatgccagcatctgtgtctgtttttcaatatttttctcccggaagagctgtatggtaaatacaatgatccccacaaagacaaacgggatcgacacatgatacaacgggccaaaagccggaatcgaattgaagaaaatatccggcagctgcaggaatacatggctgaacagagcccaggcatttttccccagctgtgcaaaggaaaagttcaaaagcagaatatctgcgcttctcacactgtccgggaaatacggcatggtaaaaagcggagtacttatggttctgccaaagtgtaccgcgttgattcccagaactatgacttccggcagggccactaccgtaaagatcagtgcgcacagcaatccttcccggaatttcagccggcgcttccacaggcaccatatgaagaatacaaaaagaaatgcagttacggaataggcagcgataccgtaacagtaaaatgtcagtccgaaaaagcccatggacaagtataaatagcgtcgtttttccaatccaagaagcagtaaataaaatcccagcaggaaaatatgcgggaagagattgcaatccagcgaccagcggctctgcataaactgccagggattcacagcggtcagcagcattgccaccagggcgatccgttcagagaataatttcctgcccacaagatataccaatgccaccgcgccagaggagatcagtaccatcggcagacgcaccgttaccgtgttgaatccgaacagtttgataaaggggaccatgcaataagcaaggagaacgctcatctgactgtatctccagccagtaaaatgaaccggcagaaaagtaccatatctgtcggttccgtattttgataatgcccaggcatccaccgctcccatggcctcgtcctagttgataccgtccggcactgtggcaaaacggatacaacgcaggatcatggcaagcgcgaggatgctccagaagaaaatttttctgtttttactgttccaaagaccggtggaagtatcctgtgtcatagtattcataatcgtacgatacctttcgatgttctctttcaggcttcctgcgtcattttttccgccgcatatggcctgtcactatcacatcataccacagaatgttgcatttgtccctagtcttccgtataccggtccagcattttgagatatttcaaaaccgctttcttcttatcctccggaagattacgatatgtatgcaatatcaattcttcctcctgtgcatgtacttccaccatttcccgctcatcgaagatatctgtgatcgagattcccagctgattgcaaagaatcatcatggtatcgattctgggaactgtcttgccggtcagaaaacagcttaccgtagaggatgacagtcccgaatgccttgcaatcttataaggtgtcgtgcctctttcggcacagagctgtttgaatttttccgcaagttccctgcatttttctttggtgtcgtacatattgttttaccgcctttgtcatttatttagatctctataaagtacatgacaagaatcgacggattcttacaaattttttttgtgcgctgtgtgcgttccgcagaaaggaagcaaaaagacctgcctgtcggcagatcttttaagtattataatattttctgttttacatcatcagcaggctttcatgatttatttcatcataaataaattccgcccattcctcaacagtatcatggtcgacaaaatccttgtccattgccagtgccttggataaataagaatcacgaacggcacgaactgcttccacttcattcaaatgatacttcctgaccaaggtatcccgtacataactcttaaattccctgatttccgcatttgtcataccattcaccttcttccccttgcgttcaaatatttcttcttgttatttatcatatcacaagataatacttttatgcaagatatcgcttttaaagtatgaaaggaatactgttgcggatatacctctccattatctttcaaaaactccttataattaatgtcttccggtatgacttggcctccgttaaccttatacgctatattaattatattgccatccgcaatttctccacagcaaatatcgtattttctatcctgattgtgctctagtatattgtatgcagacagcatctgtggtttcaatcgattattcaggacaaattttccccatctttccgaatgtcgtggataggaacctattactaaatccattgcacttatcggtttataatctacttctacaatgtatggttcctcgtttttattatttttcgcattatatttctgagtagttcttattgctgccagcgctgcatgatcatagcttggcgttgtataaaaacccgggccaaaatccagatagggtttactatatttcagattgattccatgattaactatatttattgctgaactataattggttccatgatataatttcatcttacgtttactttctttcacagtatttttacttcaatatgtttccctaatgcactggcatatttttccaaaaccaccaatgtaggaattcccgagccattctccagtctggcaatattagacgctttcatccctgtacgatccgcgatatcactctgtgtcaaaccctgtcgatgtctctctgccaccaattccttgacaacttcatccgtatgactcgacacttttttctgtattgcttccacatatgcctgcaatctttttagctgatcttttttccgctcctcgtcatctcgcaaaatttcaaattttatgccattcatatcttctcttatatcgttttctttcataattcatacccttcttctatgttactgattactttgttatttcatattatatcattgatgatagtatctttcaagatatgttgcaaggaatatttattcatacataaagtgccggaattctgaagtcccctcgatttatcgaaatccctttagccgtcaaaaactttactccctcattagataatgttatactttttataaaacatcccgaaaggagcctgatcttaaatgcggaaatttattatggataaatataatctgattgcatttgccatcggattgattcccaccattctactttacctgtttcctccggatgctgctgtccccttttgggcattttctattgttttattctttctgttaattgccatctggatgtgtgcaaagctatggttagaatccaaaaacgataaggctgttcccacgatatccatcatcgaatgcagtcacaatgtctgtatttgtaaaacacatgattttatcacatacaactcgattgttacattttataagaaggatgggaatttcgaaaaattaattggattcggattagtagaaactataaacagcggcggaaaaaccgcacagattcggatcgttcccggtgacatgcggaacaagaaccaagtctccgcttcggaaatttccgattttgtctcttatattaatgacaataaaaataacattattgtgcgccctactataacaagcgatatcgtgccttatatctataaaatattaaatcaggaggtttccaatgagtaaacagattaagatcgtacatgtatccgatgataattgtgatgtttctcttaatgttggttctattaatggggtgcaggaaggggacaaatttctggtatattctctttccgaccacgagatcgtggatccggataccggggaatccttaggatatctggaattcgtgaagggtaccggggaggtcgtccatgtccaggataagatgtgtaccatcacatccgtcacatatcggaaaccggtagccaaaaagacaatccgtaagacaacaccgtccatgactatgtggagcggcagtaccgtggaagaaattgtgcaggatgataacaaagaacagattccctttgacaatccccatgtgggagatcttgcaaaacctatttaaatactcctttcaaaaacgccaaagcttttagaagctctggcgttttattatactcgcatacataaacactacctattttgttccatcttgattatgctttatttatattggatattgcttcaatcgctctataaattctccacatgtactcaccacatcttcgccatcaagatactgcagatacatttcctgctggtgtctgctcctcgcatcccactttactttccatataattcttctaactggaatagcaagtgggaaatggataggaaatgtcattccaccagccgactttgtaaccgtttctaactctattccatgctttacaccattattagcatatttaaatgcatccagcctgtccttatccaggtcgttacactgaatacgttctgcataatccagcattgcatgaagacatgttcctacagcatagaatattccgttctcatcctcagttgtgtaatcgcttttctgcaatattcgatctacttctgttttcattgccgaatatgaatgttccattgcatacataaaattattcatagagtacttctccaaacaatacaaccctgttattccagtttcaacaatcccttactgtttgcaatcatattaattatcatttctcttgtctttttaccgcttctacactcttccagtaattttagcagaactgctgtttcaattatcaagcttccatttcttttcgccaaatttatctgtgtgtcttttaccggttctctttcctcaggcgctttattattttgatgattcataatcagcagcgcctttacactattaggatccttttcttcatgctcatccagatagccctgaaaatgaacatccagctgtgatatattttcattttttacattatgcctaacaccctttatttcaccaataaagacattatcatctatttcaaagagaaaatcttcctttttattatctacaaatcccgagagatcacaccccattagttcctctaaaatttcaaaaacgacttcaaccaatctgtctccggatgtgtataatattgatttcagccgcatgttatctgctaatttattttgggaacattctatatcattctctattttctccacctcgttttgccattctgaaatttttgtttcctgttcaatatcatcaaacatttttatttccgaaatccactccggagcagcttcctctttctctaatattccaattccgtcaaagaagttcatcaaaccatccgtatcaactatcttaagtgtagtcatataagtcctattctttcgcattacggttggctttttgctcttaatggaacttataacaaaaccaatttcccaaaaagcatttccctcaaagtagaaagctgcctcatactccatattgcctacattagatctcgtattttcatatgtaagcgatatgccggtaaagggatcaaatagtctcgacaaaatatcattttgtaatgaatatagtatgtctttcaactctgtactatacaaatactctttgtcgtatttatcataataaagtacttcattttgaggcaatataatcaccacatatgcattccgactattattaatcatgcttattacactttttaaatctttacttacatttatactattcacagttccgccatcggaataccaaatatgcgggctcgacaaatcaataacatcaatttcgtattcatctaaggagcgtatatcatgtaaagagtactgatctatcttatcaccgtcatatcttgtatctttaccatcataggtcacaacctgtatcataatgaatttcctccctgttttttgcatcatgcttttacaatatgctgttcccgtcttcttttatatttcactatttatataatatcacaagcttcccatcatgataattcgatttatcgaaatattttacatttcaagctttctgtctttatcctgcctaagcaactaaattcgtaagcgccaaataatcccgcggctagccaacaaccgcctctaacttcataatcgtagttagactattttactacaacaactacaattatggaggacaacatcatggcaaacaccagaaaatctcgagttccaaaggaagaacagttgaaacttatcaatgaatgccggaccagtggcatgacagacattgactggtgccgcgagcacggcattgctgtcagcaccttttactactgggtaaagcagcttcgaaaagaagctgcccagataccggcacctgcctatggtcattctgagaatccccgccccaaacaggacgtggttcccattgacatagtaccggaacgcttcccggtacagcatactccgtaccttgacaatcctcatacattagagatcattctaggatctgcaacgatacgcgttaccaatgaaacggatccccagctgctttccagaacgcttcagattctgaaaggttctttatgttaggcgatatttcagggttggaacggatctacattgtctgcggttacaccgatatgcgcaaatctattgacggactttgtgcagtcgtggaagaacagctgaagctggatcctgcatccagttctctgtttctgttctgtggcagacgccgggaccggatcaaggccttgtaccgcgatgcagatggttttgtactgatctataaaaagctgacagtgcatggcggataccagtggccgaggaaacactctgaggtcagaaatctgacctggagagagtttgactggctcatgtccggtatcgatatcgaccagcccaaagccctgaaacaggaataaaaacatgcacagaaaaatgcctgcaaaccgcatattttcggcatttttcaagagtgattttcctttaggaagactgctttttctggtataataaaggtatcaaaaccaaggagaaaaagcgtggcttccagtgcaaaagacattcagctgcgagagctgaaggataccatttcacaactgaatacgataatgtccgagcagacagaactgatccgttccctcagaacgatcattgaggaaaagactgcccatgagatggtgcttcaggaacaggtggactatctgacgaaaaaacttttcggctcttccagcgaaaagacaccggctgatattcccggacagttgaatctgtttaatgaagctgaagtttaccaggatccggaacttccggaagaagactgcagccgggagccacgtccacggaagaaaaaagctacccatgcggaactttttaaaggtctcaaggttcataaggaagtaataccgctggatgaagaagataaagtctgtccggtatgcggtagcccgatggaacgtatcggagaagaatacgtccgcagggaactcgtttttactcctgccaaatgtgaagtttatgaatactacacggaaagctatggttgccctgactgtaaggaaggaaagggcgatacggaaaagtctgtgatcgtcaaatccaaagtaccgcccgcacttattggcaagggtccggcttcttcttccacggttgcatggacaatctatcagaagtatgcaaacggcatgcctctctatcgtcaggaaaaggactggaaagagtatggtgccgctgtcagcaggacaacccttgcgaactggatcatctacagtgctgggcattatttccggccactgtatgattactttcaccgccagcttctgctgagggaatttctcatggcagatgagacccgggtacaggtgctgaaagaacccggacgcagtgcagaaagccagtccttcatgtggctgtaccgcaccggggaagatggtcttccggtcatcctgctgtatggatataccccgacgaggagcggagacaatgcagcagactttctggacggctttcagggatatctggaaaccgacggttaccaggggtataacaaggtatccggcatcaaacggtgctcctgctgggcacatatccgccgatactttgtggatgcgatcccgaaaggaaagcagctggattacaaccagccggcagtacagggagtgcattactgcgaccgcctggcaagactggaaagcagcatttccggtaagtgcggaacggattatgaaaaaaggaaacaaatgcgtctcgagaaggaaaaaccggttctcgaggccttttggacgtgggttgacagccagaagccagtccgcaacacccgcctggataaagcactgacctatgtgaagaaccgcagggaaacatccatgacctatctggaggacgggcgctgcagcttcaccaataaccttagtgagaatgccatccgaccttttacagtaggacgtaagaactggctgttcagtgattccgtagaaggtgcagaagccagtgcgattgcctacacgatggtagagatggcgaaggcacacaacctgaacatttatcaatacctcagctacgttctggaacaaaggccgaatgaaaactggagtgatgaacagcttgcagagttggcaccctggagtgaaaaactccaaactctaaaaatgtgagaatgaatttgtagcaaaatactccaaccgaaaataggttggggtaaatttataggtaccgccggattatttggcgcttacctaaattcaactgcaaataggaaaaagatttttccaccaatgataaaaactttcatccagatatacgaatcataatcaccatgcttctcggcgacaacgtttttaagcccccacagaaaagtatctactttttgtgggggctcacatttatcttacgccataccatgtacttttttccattaccatccttaaaatgtcatcaaagccgttaataccgagacagcaatacccatgattcctattgctattgatatcatattcagtttgttattctttttgttttctatggataatcttaagaattcttcctctgttctatttattacattccggaccagtatctcattgtccggcgtttttagtttatccatatcacccaaaatttcctgctggtatttctcacatttattatagggatttctcttctctaacacgtctcttgtacgtttcaaaataccaatatagtcttttaatattgctgctcgtttgtatccacaatctattctaaatataacagcatccatccagacaaccacatttgcaaagcgttttttaatctgtggctcttcctgtacatattcattatagaatctatttatctcatctgccagataatccacatcatctatagaagactcgtttatgctcttatagcatataaattttatggcattataggactctcttaaatactgtcctttattatttccgagcacaactatttctgccattactataacgaatactaatactatatatgatgtcaaaaaagttactccatccatatgcttcctttgtaatctcccccttattttctatgtattttacttcttccattccacgattttcgcaaatgcaggttatatacctgatccacatgctgattgtcaccaatggaactttacttctctacgccttataatccagcagtctaaggattttgtatatgtcctactatattgtttctgcaaacacctcgttatacaaaaaaacattctccgggaaacctatccattggtagaaaaaggattccgggaaataattcccctgacttagaacatcatcaaatttaccttccattccttcttcacgaagcatttctttgataacttctatagtatcaccatatattgtcggcccatgcagtctttttacactcctgtgcatcgcaaaatccatcattcgtgtttctccgttactattatttccccatagccattggaaaaatttcggtgactccgccgtcatttcatgaattgcattggtcgcaactactccgccccaggcttctgacaatgttttatattgattacttcccttctgggcttccgatatataggtataaagacgattaagtaaaatcatatttcttcttgcatcaatcggaataaaggtactcaaaacagcctctgcccccacgcgcttaaacatatctgcaacatttacggttccgctcccccgtgggctgacatgacatgcacttagaataacaaccggcggaactctataattattgtcatttgccatccaaaactcattgccgatcattaatcctgccatattggttcttctatcatagtgtccatgagccgatatgtgcaaaatatctgcatccgaattttccaaaagaaactgcttcaaatctgataccgttaatgtctcacgatatactacctgcattcttggattatccttactcagcctttgtaaggaatttacaagcccctccgaacactttcgaattccacaattctgctcatcattaagaatgcattccgcaaatgcaattttacattgatgtccatgatatatttgtgaatgcttgaccatttcatcctgaaaacatctcgtcaaagggcttaacggtctatatgatatttccttatagcactgtaatgatgcatctgcttttcctacaattgccaatcccaaagggaaatcagaaaaaattgtaatatgttgtgctctgtttacagcccataactgctcttgagtaaacttgctttccaacatttttccaatatcgcgcagtgctttatgcacatatttgttattggttttatgtttacattttatctctaattcattaagtttctcaaagagttctttttctaccggcggtaattcgattagcagtgctccttttgcaatcgcacgatggatacccagtaatttaataacctttttttcgttctccggtaatatcttctctaatccaccatagtttatttgattttgcggtactccgggcattgttataacaatatttatttttgattttttctcggcttcttccaagccttctacatacagctttctaaaacgttcctgctcttctccttcaaaatccttacagtgcatcagggcattatggtgtaccgtctgattccataacaattttgcacaagtttcaaagatatccaacgaattaaatacctttccatacacttcgtctgctttcccatactgcctggctgtaaatagtaacggcaatgccatttgtttttcttccgtcagtaagtattgcttatcaatatcctccaattttgtttcatttctaaaatttctattttcaaacagcttgttccactgctccacaagcagactttgagataactcttctatggataccgcacctaattcgcagctgctgtttcgtgctttttgttttacctcttctctacagctctcagaatatataatgcatgtaaacgatgagcctatatcaactgaagggaacctactatccggcataataaatatatcctgcggaacatcatacgccttatccaacacttcggtatctgtatcataggtatccaattctgttctaggcatatgaaaacaatattctaccgccggcaatatagcgtttaatgcatcatcaaacaaatgcattctgccttcgttcattgcttttaatttattcatatctgatatatgtaaaatagggtctgcatcctgtacatcttcattaaataagattaaatacctatagtatttgggatcattatcattcatagcaatatcctccgttttttaaccttccattgattcctgtcgtctacatatgctgaaatgcttttctctttatataatatcatatattttcgtttatattgtttcgatttattcacactcatcattcgttttatcgaaatattgccatttattcagccccttttatttaaacaaaaataagcgattcatcggtatttacaggatctgcaagaatagcgaaatgcatgatgtttacagataaaatagaatactaaaagagccagccatgagaggctggctccaattatacatttcttcctaaaagaaaaaggccatttttcaatgacctaatctaatgctatcagttcctgtacatcgcaatacatatccaacaaatccaatattctcttccaattctgcagcagcataaccgaataggcttcttcatccctgtcaatcatgtttttttatttccgatagtatcaatgcaccttcgaattattctcatacgctcttttgccttacgaagatactcttcatcttgctttatcataaaaaaacatcatgtactgcaatgttgtattaaaataaatccacattattctgttttcggaataatagatatttagttttttataataattttcacccatctcttctacagcacttcatccgtccatccgatatcctcaccgtctccgctatctgaggagtcatcgcccgaacttccgctatcggagcttccgctgtccgaatcaccggagctgccactatctgagcttccgctatcggaagaatcatcatcgtcatcatcgttggatgaattatcattacttaccggctgctgcgttggagcaggggttgctgccggagtcgttaccgccagaggattattgccggttgtctgcggttttgctgtctgagcagctgtcttattgacagcactctgtacctgggacgcagatgccagcgttgcccctgccaatataccctgctttgccatcaaaggtgaaatctgctctgcgccagcggttccattctgtactgcctcacgattctgtgtgatcagttcctgcatcttatttcttcctgccaataccggatctgcctgctgcagatccgctacaggtgccacatccacccactgttcgttttcatcctgttgctgaagtatgccgttcataacacgaaccgcctgcatattgtgtgcacctgcaagttgttgccggctctgattcgtttctgcggttatcgtattggtctgcccctctgcaagctgtacccgcacagcttccagagtactgtgggaacgatacaatgccattgccaacactactgttgtcaatgcaaaaatgcatgtgaatactatccacactgtgtttttcttatttttacttttcatccagaatagctcctatctttacttttcaacgctgtctacaatatttttcaaaaatttatatccggatgttcccggtttaaaatctccgcggttcaggatctgtttgcagacagtatacatactacgggacatttccggtccatagatcaccacactgctgccatccttttccatcaccgcataggcccggaagatgtacgacgtgttatagcgttccggaggaagttttgtcagaacgtttgcgaactggtctctcccattcactctccggatcactttatcactgaatttgccgtttattacaccgtatgtttttccgcctcccaatttgttgcttccatagaccatcggatattgtgcatgaagatcagggcgcatgatcagcgttcccatctccgtgatacgataccctgccaagccggagccgctgatcaattgtgactttttcgccgtatcaataccgaaggtacaccgtaaaccggtatttcctgtataacgtacggaaaatccatggtaggaaaacagattctcgaactccgggacttctgttgccgtataacagcttccgttataggaaagtctccagacatacatgtctgtagggataccggatgcattatattgatatgcggctgcggtctttgccgttgttcccggctggacaatgctgtttattgccaccagccgcctggcttcgtcattctgccatgctgtgctggcagcctccactccatcaatataaatcttagcactactgtcataacctgccggaagagccaggacaacattaccatttcccacttcaggctcggtcacaggcggatccgggattccttccaccgtcttcattgtcttcacagaagcaataccattggttgtagctccgacagcatacaacgtattgtctccgccaaaaatgtcaaagccattgatatctgtccctatagtggacgcaagcttctgccagctgtcatccttcagatatgctgcctgcagtgtcttctcatttcctgacgtccagaagacatatggtatcctgtcctttaccacaagtcttacaacatccttgctctgaatatccgtcagtatattttcattccattgctgtccatcatatgtaagcattgctgtcgcggcattgctattgttcgctgctgccagatacaatttgccacctgctacacatgcatcgacagagctggcttttccgagttggtccatcgtataaagcttctgccagtatccatcctgcagcacagcaatacaaccattaccgcctgtgccctgtgcaaaatagtcacaataaaccgcataccacttattgtcataaaagaaatgtttggttccggagatgctgatccccgacactgtcaatggcggaagtgagctctccggatgccatacatttatcatctgtaacgtatttactgctgcatagctgatccacaggctgtcctgctcatacagcaattccattctcggaggatagattgctgtctgagagcggtatatctgctgcacattttctgcagagacctgcagcacacacagataacccgaagcatccgtataagccacatagaccttgccagccacactcagaatatccacctgggatcccccgtcagcatctgctgcagcctgcattactttccagctgctgtcggaagcctccaaagaatatattttcaactgattttttccattttcattcacaatgccagccagatacaggctgtttcctgtcgtatccccggtaattgccggagaagagagcccattgatgctctcccccttcggcagccagtaactgtcggccgaaagtaccggaaactctacatcaaaggatacgctgccgtcttccttagtaacaacattgtcaatcacaattccactgttgctgccatcagaataaaaaatagtatccgatgtataatgagcattcagatcgctgcttcccagtgaactgcgatactgtccacccactgtagccttagatgcatcctcttgtgccttagccggatccgttgtgtccttgcggaacacataaatatagttatttccttctttatttgtatgataatcgaccgcattgttcacccgatagacgatcaatccgctctctggaatatagtaatcatagtcctgcctgttttcgttttccggctttttccggtattccactacaaaaaactctgaatcgctgcgggatgtcttcagaatatacgcacggttaccggatactccttccgccggccacaaggtatatgtcccactttcttttaacgtttcgatctgcatccacccaagctcactgcgcatatacgccaatggataacttgcagtaaagttggctcctgccatcagatcccaccagcgtcctaccgggtatccattctctcccgcagtacgatacagatccggtgctcccagcgtatgcaaaaattcgtgcgaagccaaggcatatccctgatcaaaatcagatcccaagcgaagcatattggtcggaagaacattataagcacccacatgccagccatgcaacagtgtctggttatatccccagtctgcttttcgggaaccaaacgctccactggtattgttctcgtctacctggacaataatcgtcagattatcgatataaccgtcaccacgcatactgtccagcttcgacgggaaagacagttcactcatattttgtgccgctgtaatcacctgctggacaaattgctcaccagcggatgcatccggatagtccgatgccgacccttgaatggtgaccggcaggaatacattattcaccacctgtgggaaataggtatttactgtcacctgtccatccgatatggttgaaatatatttactcaaggaccggttcggttctgattccggaccggtgtacatttcctgatatctgctaaaattagtctggaaggtattatcaccatccttgctgaaattcaccataagtaccagattatcaacctgtgttgctgcctccgcctgaacaggcttccacagcagcaggccgcatacaaataatgctatactcaataaactttttttcatatgtgtcataaataactcctgttgaaaaacatatccctgtgcctattcccagatattgcagattcccatccggaccggtgcaaatgcatcattgccatcttctgcagtcatagtcaggtaatagatatttttcccttcctgcctggaagcatatgccatctgtccttctttactcagatattccggggttgctgtctcgggccttccttccgcagtaaaatctccgtcgtagctgactgcctgagcgctacggttacggaaagcatctactgctccgctactcaggtctgcggtgcccatatgtaccgtaaatgctccctccggacggttattcgaagacaaagttccctcgtatcctacgtaagtgccatccgtcagattcagactttcactgacaaaagagcctgtccgctctgccgcgcatacataataccgaatttccggatccgttacctgcacatagaattgtctgccatccgcaagcggatattcaattgctgtgcaatgctgtcccagttcatccgccagaatcgtcattctccactcaccgttgtccgctgctcctgtatagtttctctgcccgatcagaagatctgacagcattactgtataccagtcttccgtcagaatactgtctactgctgtctctgcgtcacctccagccatggcttccaacagtacctgcgccttactctgtacttcttctgcatcctgtgtcagatccaccgtgatctcagccagctgcgcctgtctctcagaactgtagtccagacgctgctcccactccagagcatccctctgcgccagggggctttcggtgtctgccgccacttccgtatttgtgtccgtttcccggg

SEQ ID NO: 5558 - DNA, 2940 bp, Unknown
  gut microbiota DNA sequence
agagggattgtggaagttactttcatgatttttttattattcatattgattttctctttctgtattttatgtgtaattgttatatatggaggatttccgatcacataagaatatttcttcatttgtgccttcagataatctctattacgtatattccgtcttactccatcaatatcgtattctcttaaaacagcatttagtctttccttgcatatttctattttttctttgtctgtttcataggcttcaatatctctttcccatataaacccttttgataccccgcataatccagcatcgtcttaacatactttgtactgcaattcgccgttcgccactcatgcaagcatattggctcacttgcgctcattataacataagcccagtcaaacaaatgtctgctttgcagccacttgtttttccttgaggctcattatatcagaaaacacaaatgattgcgaacatagatttcggagtgaccacaaaaggatcacactcgatgtgatccttttccgttcccaattttttattccaccgtaacactcttcgccagattcctgggcttatctacatccagtccctttgcgacactgacataatatcccagcagctgcagcggtatcaccgcaaggctggccatgaaatgctcgtccaccttcggcacatagacagcgaagttcacctgatcttcgatttcgtagttgccataagtagtcatgcccataaggtatgcaccacggctcttgcactccagcatattgcttatggtcttctcgtataactcgttctgggtcagaacaccgatcaccagcgttccctgttcgatcagactgatggttccgtgcttcagttccccggccgcatatgcttcggaatgaatgtagctgatttccttcagtttgaggcttccttccagacaaacggcatagtctataccacgtcctacgaagaatacatccgacgcattggcatactttgcggcaaaccattgcaggcgctccttgtcttccagaattttctgtatcttctccggaatcgtcagcagttcggcaatataataaccatactgctcttctgtgatcttaccacgaactttggcaaactgcactgccaggcagtacattgctgcaagctgcgcactataggccttcgtggttgccaccgaaatctccgggcctgccagtgtgtaaaatactttgtctgcttctctggcaatactgctgcctaccacattgacaatggccatagtggtaatgcccttttcttttgcaagtcttaatgcagccaaagtatccgctgtctcaccggactggctgaccacgatcatcagtgccttcgggttcagggacattttccggtatctgaattctgatgcaagttccacacgcaccgaaatatctgccatgtcttccagaacatactgtgccgccatgcctacatgccatgcagaaccacaggctacaatataaatctgttcaaagcccttgatctcatcttcggtaattcccactgcttcgaaatctatcctgccatctttgatcacagaattcagtgtatcctgaactgctttcggctgctcatggatctctttcatcatgaaatgttcaaaaccggccttttctgccgcttctgcatcccatttgatttccgtagtctgcttctcgatttcatccccgtccaggttataaaaatgagcttctcccggagtcagctttgcaaactcaaggttacctatataatacacatttctggtatatttcaagatagccgggacatcagatgccacataggtctccccatccgcaataccaatgatcatcgggctgtccttacgggctacccagatctcaccgggatagtcacggaacatcagctccaacgcataggatccgcgaatacgcaccatggttttcgcaatggcatcaatgggaccgagtttatacttcttgtagtaataatccaccagcttgatcgctacctctgtatcggtctggctgtaaaatgtataaccatgcttcagcagtttttctttcagttccgtgtaattttcaatgataccattatgtacgcctaccacttccgattctaccgcaccggaaccggatctgctgcagttgccggagacatggggatgggcattgatctgactgggttcgccatgggttgcccaacgggtatgtccaataccacaggttcctttcaacgcatttccattgtccgttttctcgaccagattcgaaagacggcccttcgcctttactacctgtgccagggcatcgccatcgcggactgccagtcctgcagagtcataccctctatattccaattttgacagtccgtccagaaggatcggtgctgcctgtctatttcctgtaaatcctacaattccacacatatgctaatacttccttatcattctaccgtgattccaccaagtacgggaatctccagtcgtttcagtaactctaattctgcaacaatctcattatacaaggtcgatcctgccttttctaccagaaccgctccctgggctgcacttactttctccatagcttcggcatcatacagcacgttattcagtattgtaacgctaaggccttccttttccagagcagccttaagtccttcacataccttgtccgctccggcccccagattgcatcccatcagacagatactgttctgtccgttcttggcagctgctatctttatcgctgcgaacaccagctccatggactgctctgcagtaaattcgcgcttgccgtaatgtcgtaaaccgttaacccatctatccaggaacagctttttcttggaatcttttaccaccacgccaatctgaggaataccatatagatcctgcaatccatcgtttacacgaattcgactgttaaaaatataccccatacacaggaccgcagcatatataaaggcgaacaggac

SEQ ID NO: 5559 - DNA, 676 bp, Unknown
  gut microbiota DNA sequence
atccagatcgccatatttggtggatgccacccatttcatatccttgcagatacgatagcggcggatataatcggaatctctgctcaatttataataatagtcggtagctgcctcaggagatacctgctcgtacagctcatggaaatgacggatcacttcactgggtctgggcatcagcagtcccatgatcttcgtatcgaacagatcgcggtataccacactgttctccttgagaatgcctttttcataagcgtaatccagcatgcccttcagaacctcttccagttcatcctcacgcatggtcacattgtcacggtcttccagctcatccagttcaaacagctccaacagacggttggtggtatagatcacatcttcctccggaaccagtcctgtctgtactccgtaggataccaatttacgaattaatacctgaatatccattttttctccattctgcaataccggatttctccggcatcgcactctctattctcgtcggatcttaatttcttacagtgtctgggggccgtcaccgatctctactacatagaaatcagctgcataaccgatcttctccttatatgccttgcctacctgatcgataaaggtgtcaatagcctcatcctttacaatgcttacggtacatccgccaaagccggcaccggtcatacgg

SEQ ID NO: 5560 - DNA, 29715 bp, Unknown
  gut microbiota DNA sequence
gggaagaccaccatggtactggaaagcctgatccccgggctggaagcaaaattaaacggcgaacatttcccagcacatgtaaaaagcattaccgcagagggcatcgcccatgtgaagctgatcgatgcttcccccatcggcatcaatgtgcggtccacggtggctacctatgccaatgtgcatgatgaactgcggaagatctatgccaagactgcggatgcaaaaaacaggaaatacaaggcgggagatttttcttataataccggaaaattaagatgcccggtctgcgacggcaccggacagatcagtctggacgtgcagtttctgccggatgtggatgtgccctgcccggagtgcggtggttcccgctatgccagagaagcatgggacatctgctatgagaacaaacgggggaaacgttattctctgccgcagatgatggagatggatgtaacgacggcattgcaggcgacagaggattggaaagtcgtgcatcagcggctggaagtcctgaaaaatctgggactgggatatttaacattaggcgaagagacaccaagcctctccggtggagaggcccagcggctgaagctggccagtgaactgggcagaggacaatcagattccgtatttgtattcgacgaaccgacgatcggactgcatccgttagatgtacagaccctgttgcaggtatttcagacgctggtagacaatggggcaacggtacttgtcattgaacatgatctggatgtgatccgcaatgccgattacatcattgatatgggacccggtggcggagaagatggcggcagagtcgttgccgtgggaactccggagcagatcaaggcagatgccgacagcattacgggaaaatatctgtaaaaaatcaaaaacccggatacggcagaggcatccgctcaccgtacctgggtttaaaaaactgatttttacagaatcacctgctccagcttctcacggaagtctgcttcggacatggcaccgacgaagttggccacgggttgtccgtctctgaagatcacaaaattcggaatgcttgccacgcggtacttctgggcgatggtcatgttctcatccacattgatcttgccgacctttacttttccctcgtaagcttctgccagctttgccacggtaggagccatcatcttgcagggattgcaccagtctgcgtagaaatctaccagaacgggcagaggggagttcagaacttcttcctcaaaattagcaacggtaaacgtatattccataagtatctttcctttctgttatctgttgttgatagtatctcaaaaataagattctatattcggggccttatctgtaaataatatatttgcagatgggattgccaacggaggaaaacttttcctcgtattcggtcatgacgttcccctccatcagcgcggcatcgttatgcagatcgtaggtgatcacctgcgctttccatccggcgggctccagttcctctactgcaaaatcaaacaacgggcggttgtccgtcttgaattccagcgtaccctcttttttcaggatcacatcatagcgggccagaaactgtctcgaaggaagtcttctcttcgcatgacggtccttgggccagggatcggagaaattcagataaatgcggtccacttcaccttttccgaataccttatcgatgtcttctgcatccatacggatgaatttcaggttgggaagctcgtcctcttccattttctggatcgcgcggagcaatacgctggaatatttttcaattcccacataattaatctgcggattctgctttgcaagggtatgtaggaaacgtccttttcccataccgatctcaatatggatcggatgatcgtttccgaaaatctcatgccaggttccggggcatgcttccagggtatcttccggtacgacatagggactttccgcaataacttcccgggaaccggtaatatttcgtaacctcatggtaatctcagcctttcttatagtaatctgtattgtcaatgtactttatctgagaaagcttgtcaagtcacaggccgggggattatactggcagtaggaggagaaaatttatgaaatggatgattgcatcggatattcacggatcggcatattactgtcgaaaactgttggaagcatatacggaggaaggggccgacaggctgcttttactgggggatattttataccacggccccagaaatgatctgcccagagattatgcgcccaaggaagtgatcgctttattgaacgagcggaaaaatgatatctactgtgtacgcggtaattgcgatacggaggtggatcagatggtgctggaatttccggtgctgagtgattattgtgtacttgcggaggggacgcaggcaatctatgccacccatggacatatctataatgagcagaaactgccgccattgcattccggagatattttactgcacggtcatactcatgtgccgaaatgcgttgttcatgagacagagcagtatatctgcatgaatccggggtccgtgtcgattcccaaggaagaaagctggcacggatacatgatctgggaaggcaaaaattttgtgtggaaagacttcgacggacaggaacatttacggtattccgtatagagaatgacagcgttcgcagaaggtcttaaaaagaattaaaaaatagagataagactttggtttttaggtaaaatggtgtatgataaagaatgcgcattatcatacaccattttattttgaagatatcaggaaggatttatacatgcagtttttcaggcatttttcatatagaagttttttaaccagggcagtgatgggaatcagcgctctctgcctttttgcatctcaggggcttagtgtctctgctgcaacgatcaaagaagagaacatcgcccgcaatcaggcactggccattcagtccaatgaagtggcaaactggcctacgggaccggtagtcagcgcaggatccgccattttgatggatgcggataccggagcgatcctttatgccaaaaatatccatcagcaggaataccctgccagtaccaccaaaattctgacaacattgatcgcatccgagcgctgcagcatggatgagatcgtggatttctcctatgatgcggtacacgatattgatcccggaagcaaccatatcgctattgaccccggcgagcagctgaccatggaggaatgtctgaatgccattctgatccgctccgccaatgaagtttctttcgcggtagcagagcatatttccggaacgacctggcaggactttgcaccgatcatgaatgaaagagccaaggaactggggtgtgttgattccaatttcgtcaatcccaacggacttcccaatgaggatcattacaccagtgcctatgacctggcgatgatcggaagagctttttttgccaacgaagcgctgtgtaaaatgacaatgacacatatgctgcacattttgccgtcggaacgccagccggatgatattatggaagtcaacaagatggaactgatccccggcggtaaatatgcatatccgtatctggtaggctgtaagaccggttacaccgatgttgcccgcagtacactggtgtcctgtgcggaaaaagacggcatgaagctgatctgtgtggtcatgaaagacgaaaatccgaattactatgaagatacaatcactctgtttgattatggtttcagcaattttcagagagtgaacatttctcagacagagaccaagtataatatcgagaatgcaggatctttttacagtgggaatgatattttcggcaactccaaaccgattctggaactgaaccagacggacagcatcactttgccgaacaccatcacctttcaggatgcggtgtccagtatttcctatgataatacagaaccaggacaggtggctgtgatcacttatacttacaatgatgtggtactgggaacggcatccctggactttacggcagcggaaaagggcagtagtgtcttccgggaaaatacggcagagaccacggagtctgcagaggaaagcggtgcaaccgatgaaacgcagtcaggcacaacgaccacagaggcagacaatacagagacaaccgaaacagcaggagataacaccggaaacaatggtggaattccaacggctgcacaggagacatccccggaggaggaaaacagcacttccggcggtcctgcggttattttcattaatgtggtaaaagtatttttctgtatcgtgggaattgcggtattgatcttccttgcactgttattacgtacgtttttcaagaattatcattttgcccaccgcagtacccgcctgacctggagatttaaccgcagaagaaatcgttccagatcccggtatcgttcggtggatcaggaccttcgtaacagacgcaaagaagcaatccgacaggcgaaaaaacgtcaaaagcccaagaagtcatcccactttcgtgggtagtattccgaaggggagatttccacacattttgcccagtttgattttgacatatcaatgggtactatggtacactgaataagaaaaaagtggggtagtgtacccggggaaatgagaagcttaggataagaaaaggttaagggagcgaaataccttggataagagtgaatataaattaagagcggaagaaatcaaagacttgatcagccgtggggagtatgcgcaggctgcggagattgcggataccattgactggcgcagagtcaaaagtgttatgatgctgtgcactatcagtgacctttacaagatcaatcgaagatacgaggatgccagagatatgctgcttctggcatatgaacgccgcccgggaggaaggacgatctgctattctctgtgcgaactttccattaaaatggaagagtatgtacaggctatcgagtattacaaagagtttgtgcaggtagcgccaaaggatcccggcagatatattttgcagtacaaattatatgaggcgcaggatgtcagtctggaagagcgcattgctgttctggaagaactgaaaaagagagattacagagaaaaatgggcatatgagttggcttatctatatcacagagtaggacttgctgccagatgtgtagaggaatgtgatgagctgatcctttggtttggcgagggcaaatacgttatcaaggcaatggagctgaaaatgctccatcagccgctaacaccggaacagcaggaaaaatacgatcatcgttttgacgcgcccggtacgcaacagtattctcagaattatgcgcaggatcccggttatggacagaacgaaacttatgatccgaatcagggctatgtgcaagacggaagttacgacccgaatcagggctatgcacagggcggaagttatgacccgaaccagggctatgcacaggatggaagttatgacccgaatcagggttatgtacaggacggaggctatgagccgaatcagggttatgtacaggaggaaacctacgagcaggtgaccggtgacaccagagtctatgaaccggtgcagccggtacagccccagcaggcacccgcgcagccggcggaagatgatttcgacattcatgtgaagaccatggatgtgggacaatataatacgatcaatctacaggcagaactggcagcaggcctgcgggaggtactgagtgaggaccatgcgaaggagacttcggattctattacccgttctatcgtggcacccatgatcgatccaggggattccgatacggagtctctggactatccggagatcgcagatgtcagtgaagacgatctggagccggagacggagcagatggagagctcggaagtattctttggggagaccggagaaatcggcgatctgtcacaggtgccccaggtagagacggaagagattctgccggaagagcctgttgttgcaagaagaaccgatgtagtaccggagctatccgaagtacagaagacaccggaagtacaggaaatcgtgaaggaaccggaagcacagaaagtaccggaagcttcccgaacgcaggagattcatgaagttacggcatcggcgccggcagctcctgtagcaccggtaaccccggcagctcccgtagagccgcccaaggaactggccgatgtgctggcacaggaatccgacggtcagatcagcctggtaatgccggaggcagagagcattgagaaacagatcaccggccagatgaatatcgaggatattctggcagagtgggaacgcaagaagaaggagaacctggagaagagagaagaagaggttcgccaacatgtattacagcagaccggagccatgttcacggagtttgagcaggcggtaagagatggattgctggaaaaactggaaaaagaaaaagctgcggacacggcagataccgtggcagaagatacaacagataccgatgaggtagaagagctggaagagatcacggaagagcctgccacagaggaacccgtggaagaactgacggaggctgctcctgcagaggaagcggaacaagagcctgtagaagagcttccggaagaggatactgtagaagaactcgcggaagaacctgcatatgagccggaagcagaagaatttgaggaacctgcggaaccggaagcagaaatctatgagcaggaagaaatcatagacgaggaacaggcagaaccggaagaagcaatggatgacgagcctgtagaggagcccacggcggaagcagtagaatcggtagatgaggaaacagccagcgaagagatagaactgacggctgaggaaacgccggaagccggggaagcaccggaacagccggagcgccccgcagtagagcgagacaaagcaaaggttcgtgcgcttaccagagaagagagagagctgtacgcaccctttatccagagcagatctgccagagagcagttagtcaaggccattgataatatcagtctggcagcctacaccggcaacgtgatcatcactggagaagagggtatggataccttatctctggcgaagaacatggttcgcgaaattcaggcaaccgacagcaatttctccggaaaagtggcaaagatctctggacatgcattgaataaaaaggatactgcagataccttatccaagctgaaaaacggcgcgctgatcatttgcaaggcatccgaaatgaacgatgctacggcaaatgtacttcacaaggcattgcagcaggagagtcagggaatcgtaattattctggaagatacgaagagggatattgataaattcctcgagaaacatgaaaaattgagagagtgctttaccgcacgaatggatgtggaagccctcagcaataacacactggtggcattcggcaaacagtatgcacgggagatggaatactctattgacgaactcggagagctggcattacataccagaatcgaagatatgcagacgatagatcatgtggttacagtagtggatgtgaagcagattgtggatgaagcaatcaatcatgcaaataaaaagacattgaagcatttctttgatgtactgttcgccaagagatatgacgatgaggatatgatcatcctcaccgagaaagactttgtatagcgggaggcgcggtcatgacgaaggagaaggtatttatttccgaagcagatcagtatctttttgcccaggggacccattatgatatttacaaaaaactgggtgcacatctgtcggtggaagacggcgtgcagggagtctatttcggagtatgggcaccaaatgcagcacaggtgaatgtcattggcacattcaatgaatggaatgaggaatcccatcccatgcagaagctgggagaaggcggtatctgggggctgttcattcccggtgtggaagagggaacgatgtataagttcctgatctatgcaaaggatggcagaaagctctacaaagccgatccttttgccaattatgcggagtaccggccgggcactgcatctatcgttaccgatattacaggctttgactggagagattccaagtggatggaagcccgggacaaaaaggatatgaataaagagcctatggcgatctacgaatgccatatcggttcttttatgaagcatcctaacaacggtaccgccgaaggattctacaattaccgggagtttgcggatcggatcatagaatatctgaaggagatgaagtatacacatgtagaactgatgggtattgcagagcatccgtttgacggttcctggggatatcaggtgaccggctactatgcaccgacttcccgttacggaacgccgaaagatttcatgtacctgatcaacgaactgcacaaggccggagtcggcgtgattctggactgggtacctgcgcattttgcaactgatgcccatggcttggctgaatttgacggtcagtgcatttttgaacatcccgatccccgtctgggagagcatcccgaatggggaaccaaaatcttcaattacggcaaaaatgaagtaaagaacttcctggtagccaatgccttgttctggctcagagagttccatgtggacggcatccgtgtagatgcggtggcatccatgctatatctggattatggtaaaaaagaaggtgagtggctgccgaataaattcggtggcaacaagaatctggaggccattgagttcttccaccatctgaattctgtcatccgtggaacgtatcccggatttgtgacaattgccgaggaatccacggcgtggccgaatgtgaccagcgatatcggaggcgagggattaggcttctcctttaaatggaatatgggctggatgcatgatttctgtgaatacatgaagctggatcctttgtatcgtaagggcaatcattacgctatgacctttgccatgagctacaatgacagtgagaactacattctgcccctgtctcatgacgaagtggtacatctgaagtgttccatggtaaataagatgccaggttatactgcggataaatacgcaaatctgcgtgtgggctatacctacatgttcggacattccggcaaaaagctgttgttcatgggacaggatttcggacaggagcgtgagtggagtgaagaacgcgaactggactggtatctgttaggcgagaagctgaatcagggtgtgcatacctatgtaaaggaactgttggaactgtaccgcaagtatcctgcaatgtatgagatcgacaatacctgggacggtttcgagtggatgaatgcggatgatgcagaacacagcacctattgtttcgtgagaaaaggttccagcggcaaaaacaatctgctgtttgtattgaatatgactccgatgaaatgggagaattataccgtacccgtgccgaaaaagaagaaatataagctactgctcaacagtgatgaggaacgtttcggcggctggggcaatgagattcccgcagagatcatggcagagaaaaagccttaccattacaaggattattctatcagctttgatctgcccccttacggagctgctgtatttctgttctaagtccggttaagaaatcataaaaaacgaccgaaataaaagatgagtgtgaccaaaaggtgcactcatcttttttcttaactattcagagatatgtaaatatcactaaggcctctttgaatgcttgcattcgtaagaggatttagtgatatttatagggcgatatagcctcaatgggcaaaaggaaagctctgaaagagcgattttgcgaatgagtctctgaatagttatttcaagagttattaccaggaaggacgacaagcgtgaagataacatttcagaatcagacggtaactgatacagaaaatagaacagaaagtatccagacggagaaaaatacctggggcagagataaaatacagcgcaataaaaaaagtgtgaatgcaaatacttttggagccgtatacgagagtgggcagatcccaatgcctgtgggaaatgaagagaataataagggaaaatccctgattgaactgcagcaggatgccgggaacaccaatgtggcattacagcaggattacatgacactactgtcacatactatgtcccaggaggattatgcgaaggcttgtgaggacggatttgaccccagagaactggatcaggataccgcagttaccatcgtggacaggatcaaagcagaactggtgcgttccggacagaacattgccggatacacggacgacatagatctggacaccctggcggcagctgtgggcagcgatacactggcacaaagtattgaagaacagttccgggcaacggatatacctctgactcctgaaaatgtagatgaattaaaaaccgcctgggagctggcatcttctctgcagcagccccaggaaggcgaggtcgggtatcttgtagataatggattggagccggagatctggaacttgtatgtggcagagaacagcggtgcgaaagtacagcagaataccgtaccgcaggaattgcaggaccagatggataaggtgatcacggatgccggcctgccggtcaatgatgagaatcgccagaaagcgcagtggctggtgggagcaggtttgccactgacaacggataccctgcagcagctggcagaactggatacgattgactatcccgtcagtgaggatgcttttgcacaggcagcggcatcggcactcgcggaggggaaatcccctgttcatgcgaatctggcacggcaggaaaatatatacgagaaagccacagaaatggtacaggactggttctcggatgcaaaatgggatgtcacggcggagaatctggcggccagaaaacaactggaagagatccggctgcgcatgacagcggaagtgaatgtgaaactcttacagagtgatttttccattgatacggcccctatggagcagctgatcgaagcactgcgtagagcggaggcagaagttgcggataagtatttccccaacgatgcggatgccgtggcaaaatatgagacctatacacagaccgtacaggtgacaaacgaactgccgggactgccggtcagcgtgttgggaccctatagcctggaacagaaagtttctcaggagaccgtggcagaatttcacagcgaaggtaaggcgttgcagacggcctatacagaagcaaatgaacgttatgagacactgatgacagcccccagaagagatctgggggacagcatccgcaaggcattttccaatgtagatgacattctgacagatatgtcattggataaaacactggagaaccagcgggcggtccgcatcctcgcgtataaccggatggagattactgcagaaaatatcgagagagtcaaagaagcagacaaacaggtcactgcagtgattgagaaactgacaccgaagaatgtattacagatgatccgggacggcgtaaatccgttggagaagacttttggggaactggagtcctattttgccgaaaatcctcagagttatgaggaagaggcggaggactacagccgtttcctgtatcagctggaacaaaagaaagatatcacggagaatgagcggaaagcttatatcggtatctatcgtatggtacaccagattgagagagaagatggtgccgcagtaggcgcggtggtaaatatcggcgcagaattgcaattttccacactcctggcagcttccaggagcagaagaacctcccatatggactggaaagtgtcggatgataccggactgacacaggaagtacgtttatcggagaacaatatttcagagcagatttctgtagggatggcaaaagaaatattgacagatgtgtcagaagacgctgagagcagagacgcatattatcaggaatgtctgcagcagatgcgggaagcggtagagaccgaaccgggagcagcacaaatgttggaaaggggagaggtaaataccagtacttctaacctgctggcagctcaggctctgctggaggatccggcggaactgttcagcgacctgcaacgctatcgtaagaaatacaacaaagagaaagaaatacctgtggcggcaaccggaggggagcctgccggaacagaagcctccggattgtgggaacagctggatcagccgaattttgcagatgattaccggaccatgcttcaggatgctttacaggagacagagacgatcagtctggaacaggcagagagccatctggatgtgaaacagttacaactggtacacaaacagctgcgccttgcaggaaatcttcagaacaggcaggagtatttcctgccgatgtatctgggagaccagctggcaggagtgcatcttaccctacagcagggagccggagagacctcggctgtggatatccgggtagatgcgggagacgaacagctggaagcgcatttacaggtcaacggagaacacatcgaaggttatctcgtaggaaataccccggaagaggttacgaaactggaaaagacctccgatatattccttgaatggattcagacagatacctctgcagactggaaagcggaaaagctttctgttgtcagctcccgggatatgacaaggatggctgccggtgagacgcaaaatgcagaaacaatagagagccgggcagatgcggcgcaactgtaccgcctggcaaaaggattcctgcaggctgtcgcagacagcagcggaaagtaaggagtaacaacacatgagaattaattacaatgtatcggcaatgttatccaacaatgccttatctaccaatgatgacctgctgtccaaatcattagagagactttcttccggattaaagatcaatcatgcaaaggataatccggcaggactggcaatgtccaaacgtatgaatgcccagatcgagggcctgtccgtggcaaaccagaatgctagcgacggcgtatccattatcgagattgcagatggcgccatgaccgagatcagtgagatgctgcagcgaatcaatgagctctccgtcaaggctgccaacggtataatgacggatgatgaccgagctaccgtacaggatgaagtaaagcaactgaaagaggaaatcaccagaatttctgacgtaacagagttcaacggacagaaactgctgaatggggagtacgatctgaagggatataccaacaagcaggaagttaaggtgaactactattctaccgacgtgccggtaaaagaatataccataaagtctataccgctgacaaaggatgcggacggcaatattgtgctggacggagatgtgacgttcggagatggtttcccggatgcgaagacactgaagactgaactgaaggatgatcttttgaccatcaccggagaaaacggatttgagatgcgccttgatgtgagcggaactttgaatggagcacagacaggaacaacggttcaggatctgaagatcaatgccacaggtatcggcgctatgcgcttacagatcggagctaatgaacatcaggtgctggaagtaaatattcctgcggtttctttacagaatatgggaatcgagaatgttgatgtcagtactgcagaaggtgcggacgatgccattgatcgcgtagacggcgccatcaaatatgtatcttccgttcgaggcagactgggtgcattccagaaccgtctggaatctacgatcaacagtctggatattaccagcgaaaatatgacttccgcatattcccgtatcatggatgtagatatggcggaagaaatgacttcttatacgacttatcagatcctggcacaggcaggaacctccatgctggcacaggccaacgagagaccgtctcaggtactgcagctgttacagtaggaaagttctgaataagaggacatggcagaatgacaaaagaatgcaaacaacaatttacacttcggatcacacaggcgaattccacgcagttgatcgtgatcctgtatgaaatgaccttacaatatctggcagacggagagcaggcagcagatgatgccggactggcggaagctgttcatagagccaggggatgtatcaaagagctcctgaactctctgcacagagaatacagcccggcaggagagctttccagactgtacctgttctgccttcgcagacttgctgtatgtgaagtccgcagagaccgcacaatattggaagagattcgcaaagtgatcgcacctctctgcgatgcgtacaggcagatccaggatcaggatacttccggcccggtgatgaacaattctcagacagtatatgccggactgacttacggcaggaaccagttaaccgaaaacatggctgaccagggcacgaatcggggaatgttggtatagatttttttcctgatccgccggctgcagagcggccagctctgtgagatgctgataccttttttgtaacgcattgatttcataaatataactgtcaatgagatcactttccaaagcattatcgaaacccgcataggcgatttccaacgcctggcgggtttttcttatggattctttcagatctatgggagagaaatcctcttcaatgatttccggggaggcatctgcctgactaaaaaagattttcataacattaaccgtcctttctgctaacagtataggaacaaaaaaggaaaaatatacctgacatggaggaaaacggaagacatttttacacggaaagaggaatagattaggataaagaattgtcgggaatgcgagaacaacagtggaacatccggaaaatttattatggctgatagcagtggcggcattattgctgctcataagctttttggggaaaaaggcagagtggctcctcaattttgcattgcggggcattatgggaaccattgccatttattttattaatatgggtgtgactttccttggatttacttcagtggttggaatcaatgcagtaagtattttgacaacgggaatccttggaattccgggcattgtgatgctgtacgggctaagtatttatgaaatattataaaaaggtgttttgacatacggaaagcgtgtaaaatagcgtatttcaggatgactgaaaatatgaaaaacaattctgtttgttaaaatgtactaaagtttatctttttacgaaaaaggtattgccagacggaaagtgagcatttataattcatcttacaaccaatcgcgatggttgttcagagcatcttataagatcttttagaatttctattttgggatagattcatcccgcattaccagaagactgattttgaatagttgggaggaaggtgacgacaggactatacgcaggaaaataatgtgaaatcaggagaaggagatgagatatttggggtattatgtatacttttggcaatagcttgctgttttgattacaaaacgcacaggatacccaattggctgatcgtatgctgcatgtttgcaggcctggggtatcggttgatcagcggcgggcacaaaggcgttttggaatatctggcaagtgcattactgacaacgatattactttattttgttttttggatcggagccataggagccggtgatgttaagatgttgggagtctgtgccggtttttttccctggaataaagtactttattttctgtttttcgcgctcatgattgcagcagtaattgcacttttcaaaatgtatctggaacgcaatatgaaagaccgtttgtactatttgggagagtacttatgggacgtattccggtgtggaagatggaaactttattttgccggagaacgggaaggtgccggagcagggatttgcatggcgggaccggtgttctgcagtgcattgatgtatatgggaggaatgtattgatggaacaaaaggaaccggttctggttctgtatgaccgggaggaagaatacgcgcggcttttttcagaatacctgaagaggcaaaaggaattgccctggcagatccatacttataccagggcggaagaactgttggcgggagagaaaagcggggaggtaacaatgctggtggtggcggaatcctcctgtgaggaggcattgaacacattacagccgacatgtcaggcaattttaaatgagagcggaactctccgctttcatcagtttcccaatattaacaaatatcaggaagcgggacaggtgtggaaggaactgttggcgttgtatgtagagacgacggggatacggatgccgctgttatgtgcggaatataagacccgttttatcggaatgtactctccggttcacagatgccttcaaagtacgttcgcattgactttcgcacagctgatggcagaaaaacatcccacgctgtatctgaatttcgaacattatgtggggatcatagaattgcttccggagagacagaaccgggatctggcagatctgctctattttttagcaggagatgaaggaaaatttcctcttcgcatgcagacggtcattcagagaaaaggcaatctggattatattccacccatgcggaacggacagaacctgttggggatcacctgggaagaatggagaagtctgttccaaaggatcgaggagctggggaaatacgaatatgtcattctggatctgagtgaaagcatacaggggctgttggatgttctgcagatgtgtatcaaagtatttacgctgaccagagaggacaagatgtcacagtgtaaactggatcaatatgaacagctattgtcactatgcgagaaagaggaagtaaaggggaagaccagaaagctgaatttgccatactttcagcgacttcccgtggaaatggaacagtataccagaggggaactggcagattatgtgagaaaagaaatagagacattggaagagtagaataggagaaggacaaatggattatttagagcagagaagaaaacttcgtcagatggtacaggaaagactggattatggaagagattatacggatgaagaagtggaggatacgatcgatgaagtactgatggagcaggaaagtctggagttatgcccggtagaattgcggagacgtctgcgtaaggaattgtttgattccctgagaagactggatattctgcagatttttgtggaggacagctctgttacagagatcatgatcaacggcatggatcacatttttgtagaacaggatggacaactgcgggaactggatcgagcctttgattccgtggaaaaattacaggatgtcattcagcagattgtggcggggtgtaatcgagtggtcaatgaagcgtcacccatcgtagatgcccggttgaataatggctccagagtaaatattgtcatgaatcccattgctctgaatggtccgatcgtcacgatccggagattcccggacaagcctgtcaccatgcagaagctgatcggtctggaaaccatttcgctggaggcagcccagttcctggagacactggtgaaggcgggctacaacatttttgtcagtggaggaacgggaagcggcaagacaacattcctaaatgttctgtccggctatatttcggcggaagagcgggtgatcaccatagaagacagtgcggaactacagttgcagggtcttccgaatctggttcgtttagagactcgtaacggcaataccgaaggatgcagagaaatcggaatccgggaactgatccgttcgtctctgcgaatgcggccggaccggatcattgtaggagaggtccggggaccggaggctatcgatatgctgcaatgcatgaacaccggccatgatgggagtatgtccaccgggcatgccaacagtgccacggatatgctggcaagactggaaaatatggtcctgatgggaatggatcttccgctgacggctattcgcaaccagatcgcctcgggagtggatgttattgtacatctggggcggatccgtgataagagtagacgtgtcctggagatcacggaggtagtaggttgtgagaatggagaaatacgcctgaatcctttgtatcagtttgaagagctgggggaaaacagtgaaggaaaagtggtcggcaggctgcggagaaaaggagaattacttcatgaaggaaagcttaaggcagcaggattatcataaggtttttcagaagcggggagattgcatacggctgctggcacagacatcaggggtagttatattttttgcctggtttttctatcgttctatctgggcggttccgctattgttccctctggggattctctattttcgcaggtgcgtcaacagacagtgtcggaagaacagacaggaactgaccatgcaattcaaggaatgcatcttgtctgtggcaaattctctgagaagcggatatgcgttggaaaatgcttttctggaaagccgggaggatatacgaatgttgtatggtgagcattccgccatgtaccgggaactggaactgatccgcagaggaatgatactgaatatcacgctggaagagttgatcagtgatctggcagaccggagtggcattgaggaaattgagcaattttccgctattttgaacattgccaagagaggcggtggaaatgtcacgcagatcatacggactacagcagaggtgatcagtaataaagtggaaaccatgcaggagatgctgaccatgttacaggggagaagactggaacagaacgtgatggagatcatgccgtttggaatttctctctatatcgcagccgcttatccgggatattttggaacgctctaccataatggaatgggtatcatagtgatgacactctgccttgcagtctatgcaggagcatatctgctgggtgagaagatactggatcggatcgaggaggaactgtagaaagagatgatgggtaagaaaggcatcctgcgttttttctataaggtgatgatggtctgctataaaaagctacatttgtggagaattccgatacctggaagagataaggtgcaagcggatctgaatcgtatgcatccgggagaaaatccgcaggagtgtgtgacagactattatgtgacaaagctgacactttctgcagtcatactgatcgcagggataatgcttgccattacaatgcattacagcagtcgggaaagtcatgtcctgcagaatcaatgggtgtatcggggatctggggaagagggcagtcgggaatacagcatcactggacaggtggaggacggcgagagatattctttccagatggaagtgatgcctcgcaagtatagccaaagcgaattggaaaatttgtacgagcagtttgggagagaactgcctcagttgatcctggagaaaaatgattctcccgatgagatcagagagaatctggatttatcggaaacgtatgaaggatacccgtttatggtgaactggaaaagcaattctacggaagccgttgaagagaatggacagatacatcccgggcaggaggatgtgcctgtattgttgagagcggagatacaatacggggaatttgtcagagagacaacggttaaggtaacagtcgtaaaaaggaatgagaccccacaggaaagagagaaaagcaagttgtcggaattactgcagcgggcgcaggaggaagatccggaaagtgaaaaaatccagctgcccacagaaattgagggcagaaaaatttcctgggaagaagatattccggagactggatggaagattctggcgggggctctgttgttggcggcggcagtctttttcttccaggacaaagacctgcatgatctggtggagaagaaaaagcgggaggaacgtagaagctatccggaaatcctgcaaaagctgacactgtatctggaagcgggattgacggtccggtctgcgttttgccgggttgcagaagattatgagaaggaaagaaagcgagggggacgttgccgggaagcttacgaggaaatgctgatagcaacccgggagatacatatgggagtgccggaaggggcagcatatgagaactttgggaaaaggacaggagtcagggaatatgtccgtttaagcacattcctgacgcaaaatctgaaaaagggcagttctacgcttttacagcaattaaaggaagagtctgtccaggcggaagaactgcggatacagaatgccagaaaactcagtgaggaagcgacgacaaaactgctcctgcctatggtgatgctgctggtggtagtaatggtaatgatcatggtgcctgcattttcgaatgcgggaatataagaaaaggaaggtatggttatgggaaacaacaaattaaaatcatttcgacagtttctgacagaagaagacggaatgggtacagtggaagtaatactaatcattgtggtactggtagggctggtcattatttttaaagagaagatcacggaagttgtcaattccattttcacaaagattacaaatcagaccaaaaagatataaggaaaatacgttatgacatccgtgaaaaaggtaaccccgggtggttatatgacggtatatctggcactgacggtgacagtgatcatggccctgtgtcttgctttgatcgagggctgtcggtatcggggaatctcactggaaacagaatgcgtcatggatatcggaatggatagtatcctggctgaatatcatagagaactgcagaaacagtacaatctgtttgccatagactgctcttacgggacagaaagtgcttcgacaaagctgacggagagtcatttgctggagtatatgaaccgtaatttttctctggaggatgtgtttctcgaaaaactgttgtaccgggatttttttgctgttcaggcagaagaagcacaggctgtgaaagcggcatttctgacggatggcgaaggagaagtctttcggcgggttgctgtcgatgccatagaggatacggtgggaatcggactcttacagcaactgacggactggctgcaggtcatagaatcccgtggactggagcaacaggatattgcgggacaaaaacagcagatcgatgtacagattcaggaatatgacgggaaggagaccacggaaggaaaaaccgttcatatagagaatcctaccgcagccctggaagagaaaagaaataaaggtctgttaaagctggtaacagaggaagacaatatctcctcccgcaggatagaaacagagtcactattggagacgcggatggagcgaggagaaataaaccgcggaaatctggtgccggggaccgcagaaaattatgaagaatgggaagcgttaaaacaaaaagtttttttccatgagtatctgttgcggtatcttgggcggtatggccaggagaaacaggacagccccctatggtatcagacagaatatgtcattgtaggcaaggataatgatactgacaatctgaagggaatagtgaaccgaatattcgttatcagagaagctgcaaataccatgtatctgaccggtagtgaggaaaaacgggcaatagcggagctattgggagaggcacttgcagcggcaatgatggttccggagattggagagttgcttgcggcgacactgatcctgggatgggcttttgcagaaagtgtttatgatgtaaaggaacttcttgccggggaaaagattcccctgttaaaaacagatgctacctggcattacggactttcttccgcattacagggagaattgtccgggacttccgaagaggatgtctccggttccgattcaccgggaatgggatatgaagattatctgagaatatttttgctgctctgtgaggaacagtctgttacctgccgggctatggacgtggtggaaatggatattcgaaatactccgggaaacagagcattccgactggatacctgcattgtggaaattgcaatgaatgtgaaagtaaaaagcaaatatggctattcttttgagatcgagagacagaaatcttatataggatctttagaggcaatagaaaatactggtaattaggaagacgagccgggaagggaggtgagcagcgatgtcctctttatgcaagtacagctttacaactattaacaagaatgattcaagtcctactccgactttaagaaaaactcttaacccatgtaacgatttactccccgtaaaattcctacagacagcaaacttcataaagaggatatcactgcttatactcccgcgaacaccggtgaaggcaagtatgacggtggaaacagcactggttttgccgttgttttgcttttttatgatccatatgggaagcgctatagaaatgatgcgtttgcatggaaacctggaagtagcattgtgggatgccggcagacaggtgggaatctatggcggaatactgaatgcaggagatgccggagagaaagaggataacgatgacaggttgggaacagtggctgtttcctatacctatgttaaaaatcagatctgcaatcagctgggagaagaatatctggagcagtcgccattagaacagggggcagacagcctgcaatttctggagagcagcacaaagaatgatatctgtgagattgtagtcacctatgggatcaatccgctcacggaggttttgggatttcgaaaattccgtatggcgaaccgatactatgggcatttgtggaacggctatgcgattccggggactgagaatgatgaagaatatgtctatgtaacggaagattcagaagtatatcatagaagcagagaatgtacacatctgagattgtcggttcgacgggtggaagcagcggaaattcctaagggttatcatccctgtgagaagtgtatggtacagaaaaaagatgccgctgccccggaagagaatggctactatatttgctcggagggtgaatgttatcacagaaggcgggactgccccgggcttaagagaaccgtatattgcattgccaggaaagatgtggacgggtacagagaatgcagtagatgcggaagaatataaaacgggagaatggtgaagatggagctgtgggaaaatgtgatactgaccggctatctgctatggggcagctggtatgatatccggaagagagcggttccggtgggggtattgttcctgggcggagtactggctgttatggttattgtctggaaaggctttgaatgcagcaggcttgtcgcactacttcccggaattctgctgttgcttttgtcaaaggcaacaaaggaaatcggtgaggcggatggtatcgtactggcgctgaccggttttataagcagagataaaaatattcttcttatcttaggcataagccttctgtatatctttctttatgcaatgttcctgttttgcagaaagcggaatcgcagcctgcagatcccatatcttccctttttactggcagcatatataacggcatggatgacaggatgattggagggagcaatcgtatgcaacgaaagaattataaagcgtattttaccgtggaggcggcagttctgtatcctatagtgttgggagtgatagtgttgatgacgtatttactgttttttcaatatgatcgctgccttttggaacaggatatgggaagggcggcagtgagaagcggcagtagatggatgcagaaaaaagaggaactgaatcgacagctgcaggagaaagatatgttttttgacacggagaaatatattgcctgggagagtgaattgccggtctggaaactggaaaagaatcaggtaaccgtggaacagacgggaagaatgccttatccgttttccgaaatagcggaagtacccaggtattggagcgcaaaagccgcatttcaggtgaagaggaacaatccggtggagattctgcgaaacagtcagaggtatcgtgggaagacggaagaaacaacagagagtgataacaaggaaaatacaagtggtgcggtacagtgagaaaggatggaagaatagttgctaaatacagaatatatcagaagcttaaatgcgaattatgagagactattattagaacggaaaccggaggaaaagaaatatcagtattgtatgatcagccggggagggatcaaaggattgctgccctgcagtttgagatacatagacggagaggcctatctctattatgatattacttccagacagaatattgcacagctttttgagaagaagcctattacaagacaatggatcatggactttttgtggagtatgcgcagagtgcggcaggaaatgtcccgtttccttttggaagagagtaacatcgtgtggtttccgcaacatgtctatcaggatctggagaagaaagaattttattttatatatgtcccgtattgcacggaaaatacaggatttgatgagctgatggaatacctggtggaacatgtggattatcaggatgaaagcctggtggaatatgtctataaagcctacgagcaatatgaatcggcaggagaggtctatttgcaggccaaaatttttgaggatgcagagtgcctgagaatccctgaaaaaatggatgccgtagaggaggaaacaactgttgtcgtgggacaagatcaggagaaggatgcgataagggaagaagagaaggaaatgccggtgggagaagttacagtaataaaggaaaagaaaggcctgtttaatctgtgggaaaaccggaaaaagaaagagaagcaggaacgggataattatacccggagtctgcaactgaccatgacgggatatgcggtggcggaggagacctcttatgaggaagaagatatgggaaggactgtgtatatggaggaaagaccggcccccagagagagtacacaccgcctgttgtcggaagaagggaagctgcttgcaacattagaacaaccaatctacacgatcggaaaaaaacggggagaaacggatctggtattgaatgatcagtcgatcagtcgtctgcatgcaaggatcataaaggaaacagatgggtattatcttgaagatatgaattccacaaacggtacatttaagaacggattacaactgcagccttatgagaggcgaaagttggaagaaggagatgagattacattgggtaagatcacggtaatctaccggtaggcagtgtgcagccccctttttgttgacggagtgatataaacagtggtacatttgaaatacaataccggatggagagaacattgagaggagcaatgaaggtgaaaaggcttcgtaatgtaccctgggtaagcggaatgcttgtggtgatcaatgtaattgtgttcctgatgtgtactttttcgggaaatgtgttatataataaaggcgaactggatgtagtcagtgtattggccggtaaacagtacggcaggcttttgtgggcaatgtttttgcacgcgggcatagagcatatttttaataatatggtcctcctgttttttctgggggccatgattgagaaggtgacaggtcatgtcacgtttctggtgctttattttctgtccggaatcggagggaatttatgctcactgctggtaaagcttctgcagatggattattcggcatctgtaggtgccagcggagccatctttggactggacggagtactgcttgcctggattttgctggatcggcaatctatgccggatgtgacacccaaacgggtgattctgatgatagcattatctctgtacagtggttttactgcacaaaatattgacaatgcggcacatgtgggcggactggtgaccggattcctggcgggacttttgttttgtgcgctcaggaaacacagaagacagaagaaaacgaaagaggtgtggacttgaatatcaacatttactatggcggacgaggaatcattgatgatcctacgatctatgtgatcaataagatgcaggaagtgctggaagagttgcgggtgcatgtggagagatacaatctttatgatggaaagaccaatattacgacattgccacagacgctgaaagaggcagacggaattattctggcaacgacagtggagtggtacggtatcggtggctatatgcagcagtttctggatgcctgctggctgtatggggataaagagacgatcgcgggaatttatatgtgtccggtcgtgatgtctaccacctacggagagagagaaggcaagctcagtcttgcggcggcctgggagattctgggaggattgccctgcagcggcatatgcggatatatagagaatacagtaacgttggagatgaacggacagtacggccagatcattgagaaaaaggctgagaacatgtaccgtactatcaaccagaagattgccagtttcccggccagcaataaagtgatgcgtcagaaagtaacgatccccaaggcaatcaacctgacaccgcaggagacagaacagttgtcggaatatgtatcggatgatacgtttgtacagcgacagaaggaagatattcaggaattgacttccatgttccgggatatgttggataacagcggaacggataatgaacaggaatatctggaagagttccgaaaagtttttgtaccgcagcctggttttgaagcaagatatgttattaatatagaagaaaagaagaatcctctgtggatcgctattggcagtggcgcactggaatgcggatacggtgagacggagaagccggatgtggagatgcagatgaatcgtgctgccatggaagatattgtgaacggacgaatgaccttccagagggcgtttatgtcaggcattatgaagcgaatgaagggagatttccgaattctcagaacactggatcagatgtttccctttgaagaaaataatagataggagcaaaacgatgaaaaaggaagattgtattttctgtaaaattgcaaacggagagatcccttccaagacattatacgaagacggggatttcagagtaatcttggatctgggaccggctaccagaggacatgcgctgatcctgcccagggagcatgcggataatctctatgaactgccggaggatacagcggcaaaagtatttgttcttgcaaaaaagatggcaacaaagatgacagagaaattacattgcgatggtctcaatatcgtacagaataatggagaggctgccggacagaccgttcgccattttcatatgcatttgattccccgttatgagaatgatggacagcatattttatggaatcccggggaaagtacaccggaagaactggaagagattcgcaaaaccattaccgaataacagggagaaaccatgagaacagcagatgtagctactttaacgcaaaatatcaaagaaatgtgcatagaggccaatcatttcttatctgaggacatgaagacggcatttacaaaagcggaacagcaggaaaaagcacctttggggaagcagatcctgcaacagttgcagcagaatatggatattgcaggcaaggacatgattcccatctgtcaggataccggaatggcggttgtatttctggaagtgggtcaggatgtgcatctgacagggggcaatgtggaagatgccgtcaacgaaggtgtcagacagggatatgtggacggttatctgcgaaaatctgtggtgaaggatcccatttaccgggagaatacgaaggataatacacccgcgatcattcattatagtattgttccgggggatcgtgtcaggataaccgtggcaccgaagggatttggcagtgagaatatgagcagagtatttatgctcaagccagcagacggaatagaaggcgtgaagaacgcaatcctgacggcggtcaaggatgcaggaccgaatgcgtgccctcctatggtggtcggagtgggcattggcggtacttttgaaaaatgtgcattgatggcgaagaaagcattgacacgtccggtggatgaacattcggagataccctatgtgagggaactggaagaagagctgctggagaagattaataaaacaggcatcggaccgggaggactgggcggatcaaccacagcactggcggtcaatattaatacatatcccacacatatagcgggattgccggtagctgtaaacatctgttgccatgtcaataggcatgcagttagagagatctgaagtaaagatgtccggatattataataattggagtgtaagcgacatggataaatatgtaaaagtacctctcagcgatgaagatgcccgctctctgaaatcaggagattatgtatatctgacagggaccatctatacagcccgggatgcggcgcacaagagaatgcaggaagttctggacaggggagaaacacttcctataggaatgaaaaataacgtaatctactatatgggaccgtctccggcgagagaaggccgtcctatagggtctgcaggcccgacaacagccagcagaatggataaatatgcaccgggattattggatctgggactgaaggggatgatcggaaaaggaaaaaggtcacaggcagtccgggatgccattgtaagaaacggagcggtatactttgcagccgtaggtggtgcaggagcacttttgtcccgcgcaattacctcttctgaggtcattgcatatgatgatcttggaacagaagctatccgtaaactgaccgtaaaggactttcctgcgattgtagtaattgacgcagaaggtaataacctgtatgaaacggcggtaaaagaatacaacgaagagtagactggggcggactatgtatagaatcatactgatggtggtaagactgttctataaggtgccgtattatctgattcggatatggtggctgggaaccagaaagaattttgacctggaaaagaactatgcatttatcaaaaaggtaacaaaagcggcaaaccgtgccggaagagtaaccatagagagctatggtgtggaaaatattccgaaagaaaacgggtttatctttttcccaaatcatcagggaatgtttgatgcacttgtgtttctggagtcctgcccggttcctttctctgtagtctataagaaagaagtaagcaatgtaatcctgttaaaacaagtatttcgggcattgcacgcgattgccatagacagagaagacattaagcaatcacttcaggtgatcaatcagatgacagaagaagtaaagcagggcagaaactttctgatcttcccggaaggaaccagaagccgtatgggaaatcaactgcttccatttaagggaggaacattcaaaagcgcagtcagagcaaagtgtcccattgtaccctgtgctctgattgattcttacaaaccgtttgatgagaagtccatagctccggtaacggtaaagctgatttatttaccgccaatctgttatgaagagtataaacagttgaaaacaccggagattgcggacattgtaaaagcgaagattgaagaagctattcggcaatattcataaacaatatctacaattaggaaaataataaaaaaagcgattgacaaaagcatagagcttatgtataataatttttgcgtcacgaaatgacgccaataacatattggtagagacgatgttcagatcatggagaaatactcaagaggctgaagaggcgcccctgctaagggtgtaggtcgggcaaccggcgcgagggttcaaatccctctttctccgtttactaccaataggaagtaaaagaagaatcttaagagattgagatttctttttttgcgccatttccaccattatgtaaatgctttgaaaaataaatgtaaaaagttgttgacaaagcacagagtaatgtggtagtatgaaactccaccgcgaaaatgaaagttttccggttgagaaaaagatttgaaaaaatcgaaaaaagttgttgacaaacgaaagcggttatgataagatatcagagttgccgctgagaacaacagcaa

SEQ ID NO: 5561 - DNA, 15607 bp, Unknown
  gut microbiota DNA sequence
gatagtttttgccccttatcccaaccgtgtggcgcactccagtgcatcatcaatatgcgcacacacattctctctgccgaccttgtccaggaaaccgctcttctccatgacgtgcatgggctgttcccctacatgggacagaatgatctggatatttttcttcttgcagtctgtatatagctgttccagattatgcatagctgtggcatcgatagcgctcacgctgcgcatacgcagtaccagacaattcatcttctcatccagtgtgatcttcaggatcttgtccgctgcaccgaagaacagagggccgctgacctcataaaccatagtgttgtgcggtacgactcttaaggacaggctgtccgcatcatcctcatcgtccacatatttccagccttccacttccgtcacatcgctcatacgtttcatgaacagaatggctgccagcaggatacctacctcaatggctaccaccagatcaaacacaacggtcagtacaaacgtggtcaccagaacgatgatatcgctcttgggtgcagtcctgcagagtcctacgaacttccgccagtcacacatattgtatgccaccatgaacaggatcgctgcgatggtaggcatggggatcagtgccgcataaggcatcagcaccaccagtattaacagcagtgtcacagaatgtaccatacctgcaatgggggtacggccgccgtttttcacgttggctgcggttctggcaatggctccggtagccggaattcctccgaacaatgcggaagtaatgttgccggcaccctgggcgatcaattccatgttggagcggtgtctactattcaccatgctgtctgccaccacacaggaaagcagagactcgatagccgccagaatagcgatggtgaaagcatccggcaggacattctgtacggtcttcaggctgaaggacggcagagaaattgtcgggagcttattggagatctcatacagatctccgatggtgtttacattcatattaagcagtgctaccatggcacttcccaccagtactgcaatcagtgaagggggaatcttcttgcagaagcccggcagatactgccatacgatcaggatcagcagactgatcacacccaccagaagggcctgcagattggtggtggatataaactgaaataccgcttttaatttgtccatggtctcgatcagcggctcttcactgacaatggtcagtcccaggaagtccttgatctgtccgatcagaattgtcacggcaatacccgaggtaaagcccgtggtaatggtataggggatgaacttgatcagattacccagtcggaataatcccatcagaatcaggatcacaccggctaacagtgtcgcaatgatcagtccgtccataccgttcttcgccacaataccggctacgatagtggcaaatgccgcagtaggcccggcaatctgcacacggctgccacccaggaaagagatcacaaagcctgcggtgattgctgtatagatacccttttccggtgttactccggaagccagtgccagtgcaatggataagggcagggcaatgatcgccacaatgatacctgcgatcacatcttttacaaactgttctttcgtgtagcttttcatcacggagaaaagcttcggtttcaatttttccataacattctcctcaatataatctcctcagtaaaaagacccaggtgaaattataaaatttttataaaatcacacgggtcttatcatagctctattttttaagctttgcaagcattttttattattttaaaactattccacaatacggtttttaccgttatttttagcaatatataatttccggtccacagaagtaaacaatagatccagctgtttatcagcctcataacgttccattccaccgctgatggtaatatccgtctgtctggtattctgggaatatctccttaagccttcctggatattccggaatgaatttaacacctgatcccgatcatcctgttcaaacaccagcataaactcctcgccgccgaaccgggctgcgattccttttcccatcatttcttccagcatcagtctgccggcttcccgcagtacatcatcaccgtatccatgcccataggtatcattgactgccttgaattcatctacatccatcaatacgatccagaagctcttctccggcttgcatatccattcattcacctgatttacaagatagcgccgattatacagtctggtcagaggatcatggttcgctgcaaagttcagatcctcactcagactcagcaattgctttcgttgttcctcgtaacttctgagcaattcaaatatcatggcaaatacagacactcccacaataacaaaggacccaagcgtagttcctattttacctgccgcatccatatttctccatacggaaggccgttcaaagctgctcatcataatcaccagatattccagcagtgtaactgcaaaagaaacgatcaccacatttctcggaaaaaatatcgcaagtccaacaacccccaggatcagatatacgatagatgcatcaccgtagcaataatacaaataaggaaattcaaaccatacaagtattaatatgatcaaggccgccggtacttgcacctttttcgtagtccatccagcaatgccgatggtcacgatcatcagcaggcatatcccgcagagtatggtcggtagtttcgtaccgtgaatgcagaaattgcagattgttccgatcagatttgcagtacacgccgttatcgtcaggatctgatacattttccaggacatgtcctgttccagttctattctctttttcttctcttgttctcccatttcgattcccttttacaatttattcgtctgtcataatcatgactgaaccatatgtcccatataataaaatccatggcattcatccagcgaaacattcacaagttttcccaccagcgatgcatctcccggaaaatgtaccagcgtattatttgacattcttccggtcactaaagaattgtcattttcattgatctcttctaccagcacatcgcaggtctgtccctgatacctggatacctgttccctggctgtctcctgcacagtcttaagcacccggtcaaactgctcctttaccagttcttccggcacctgttccatggctgccgccggtgttcctgttcgtttggaatagataaaggtaaaggcattgtcgtattttacgcgacggatcacatcgatggtctcgtctacgtcttcctttgtctccccggggaatcctacgataatatctgtagtgatcgccatatcaggaatctccttacggatcttctccgccagctccagatactgctccttggtataacgacggttcattgcttttaatatcttcgtggaccccgactgcaaaggaagatggaggtgcctgcagatcttcttggaatgcttcatcacctcgatcagctcatccgacagatccttggggtgggaggtcatgaaacggatcctctccaatccctcgactctttctacttcctgcaaaagctgtgcaaaggtaatgggctcttccagattcttaccgtaggaatttacattctgtcccagcagcatgatctccacaacgccgtctgccaccagtccctcgatctcccggatgatatccttcggattacggcttcgctccctgccgcggacataggggacaatacaatagctgcagaaattattgcagccgaacataatattgatacctgatttgaaagaatattttctctctaccggcagatcttccacgatcttgtccgtatccttccagatatcaatgaccattccctcattttcaaacagggagcataacagctctgcaaatttgaaaatattatgcgttccgaagatcagatccacgaagcggtaactgtttttaatcttctcgatcacggtgggttcctgcatcatacagccgcacaatgcgatcttcatatgaggatttttccttttatagccgtttaatactcccagtcttccatagacacgctggttggcgttatctctcaccgtacaggtattatagatcgcaaagtccgcattctcatcttcaatgatctcatagccgactttttccaggattcccaccagtttttccgaatccctggcattcatctgacatccaaaagtagtcacacagcaggtaggccttctgcccagttcttctccaagctttgccacatgaccggaggctttctccataaaataatactgtctgtcggtttcgttcatttgtgttacatttatcatataaaaaatattgcctttctaaatatcggtatctattatctgtctgcgtattttgctgcaatggcgatcaatagtccggttgttttttccatggactgtacacaggcatactcatatctgccgtgataattttctccgccggtgcacaggttcgggcagggcagccccatgaaggacagtctggcgccgtcggtaccgccgcggatgggcgataccttgggctcgattcccagctcttccatggcagctttcgcattgtcgatcagatgcatatgctgctccatgatctcccgcatgttataataagaatctttcatatccactatagcggtaccttccccatacttccggttcaggaaatccgcacaggacaagaacaactcttttttctgttcaaacagctgtctgttatgatcacggataatatagtccgcagtaacttcctccacattgccgcttatagcatccagatggaagaagccctcatagccttcggtatacattggattctgctctaccggcagcagcttctggaactcctgcgcgatgagaatggcatttttcattttgcctttggcggaaccgggatgcacacttctgccatatacatgaagctttgccccggcggcattaaaattctcatattccagttcacccagcgcaccaccgtctacggtatacgcataatctgcaccgaacagttttacgtcaaaatgatccgctccggcaccgacttcctcatccggggtgaaaccaatgcggatcttgccgtgctttttctcaggatgttttaacaagtcttctgccatagtcatgatctcagccactcctgccttgtcatccgcgccaagcagagtcgtcccatcggtcacgatcagatctttccccacataatttaacagttccggaaaatccgctgtcttcataacgatattctctgctgtattcagtacgatatcttttccgtcataatgctctacgatccggggcttcacattggtatccgtcaccgcaggcgatgtatccatatgggcgataaatccaagtaccggtgcattctcgtagcctgcggatgcaggaacggtagcatagacatagcagtgctccttatcataagtgatctctgtggcgcccatagcttccagctcactgacaagcagacctgccaggtcatgctgcttcatggtgctgggggtcgtggtgctctcttcactggactgggtatcgatcttcacatatcgcaaaaaattctctatcgtcttagtcataatctcactcctaacgtttctacacaaatacaacttatccgggcatgttctactctcaaattcgaatagccatattttattcatcatatcatggtggccgcatcgcttcaatatttaattttatttaaaaggtaatttcggtgtgatcgttcagagcttataggttcttatttcccggcagattcccttcgacagcatcactaccgccagtagattcggcaccgccatcagaccgttacagatatccgagaaatcccataccgcttccagcgaacagaccgcccccaaaaaggcaaacattccatagcacagacgataccaccctgtccggcgactatttccagccagatattcaaaggctttctctccctgatattcccaggcaataattgtagcaaacgcaaacaatgcgatagatagtgcaagcatccattcccccgccctgccaaatgtggcggaaaatacagcgatcataagcgctgttccgttcaaaagctccccctgcgcatccctctgccccagcataccactggatgctatggcaagccctgtcagggaacagatcacaatggtatcgataaaaactcccgtcatgctgatatagccttgccgcaccgcatccggtgtatctgcacaagccgcactgattccggctgctccgagtcccgcttcgttggaaaatactccacgggagacaccatagcgcatggcctgcctgccggaacataagaatccaatgctccctcctgccatagctttcgggcagaaagcaccgcataaaatctgcagaattcctgccggtagattatgtaaatgcgtaaagatcaccatgcctgttccgaacagataaaatactgccatgcagggcaccagatattccgtgacccttgctattttatcgattcctccaaggatcaccagaattgtaaagataccaatcaccagtcctgtcactgtccggtcgactccaaaagtcactgccagtgcctccgcaatagaattcccctgcgtcatattccccatgccaaaggaggctagtactgcgaatatggcaaacagtaccgcaaggatccgccccatacgtctatacggaaatgcattttgaagaacatacatgggaccacccaccggttttcctttgtgatctcttacacgatatctgacacacagcgtactttccaccagtttggtcgacagcccaatgatcccggacaaaagcatccagaacaatgctcccggtcctcccagcaccatggcagtagccacgcctacgatatttcccgtgcctattgttgccgccagttctgtagtcagagctgaaaaaggagaaaccccttccccatctgtgcctttccggctcttaggatgaaacaccagcccaagtgccgccaacagatttctcagaggaagaaagaacagacttatcatcagatagcagccacagcctaataataaaaaaataagccagggtccccatacgatccggtctgtctgctgtaaaaagcctgttacctctgtgatcataaaaagtctgtctccccgacttattttctaaaatatattctttatttttctattttataccgttgctatcactgtccggctgcttttccggattcctgtattttccggaatgtatttactggatatccggcagaaaacccggtatcttttctgcgatctcacggatcccgaacagatatccgatgcctttctccagttgtccttcggaagcattgagcagtgttgcggtcagatgcagcttatgctctccgtattccagctcacacgtatacttaccgttgtcgtttcccatggttgtctgctccttcgcttctatttcagcctttttatcccacatgatctgtgcattggtatcataaggcgcctctccttcgatttcaatataggtcccggaatcataatcatgcagataagactgcatataatcggtgataaaataataaggggcatccgcaccgatatcatcccaggtgacaggttctgtctcatcttccagcacaaccttcatagcatagagtgttccggtctcggaatccacgacacactctatactgactcccgtaacctcctcttccttcatgcgcatacagatgtcataggccatgatcgcgactccgtccgacagcttttcatcatacaaaatatatcgtttgatggaaatatgatctgtatccatatttttgaaaaaataatcctccgggatcacacccatatcctgaaaagtgtaattccattccgtatttaaaatatattcatcgatcagactatatatttcaccatccgttgcagcttcataatcctgttcagagatatagtactgttttcccaaagcgataccgtctgccagattttgaagtctgcgcacagtgtctgtctcatactcttccttccagacggtataatccgttcctgtatttgatatactgactgacctggtcagcctgcttttatcctgcaatcgtaacagcccttccggtcctgcgaatgcaaatacgatcagcacaaacagtccacccatacatagtaggaaattgcgccggttcttattctcctgttttttcatattccgccttttgctcccctgttgcttttattttttacagcctgcattttcccgggaaaatataaccgtattaccgtgccttctccaagcttgctgtcgattttaagttccccctgatgcagggtaatgattttctggcagagagccattccgattccggcgccgccttctttgcgggacctggacttatctaccatatagaaagcttccgtgatccgtgcgatctcttcctgcggaattcctcttccgttgtccacaacttttatttcatacccttgtggaagttttcttcccttcataagaataaatccgccctcttccactgccttcacggcattgtccaacagattatataacagtgacagtaacagatcccggtctccccagatcactcctttttccagattgatcttcccacgaattcctttccgctcaaaaggaatccgcatagtatcccggatattttcttccagatccctggtaagtattcttttaaattccatctcctgtctgtccattcctaccagctccagtaatttatgggacagactctccagacgtttcccctgactgaaaatataatacgtggcctccccccgttcctgttccgtcagttcataagaattcaacatatctgcatagccgatgatggaggtcagcggtgtcttcagttcatgggcaaatgccgctgtaaagtcctccttctgtttcgcttccagctctttttcttccatctggtgcatcaggcggtccgtcatccggttaaagctgcgggataactctccgatctcatctgtgccctgatagacagctctcttctcaaaatcccctcctgcaatccttcccgcagtgcggtttaactgctctatggggctggtcagatatctggacagcaaaaaagctgccagaccaccgatcaccaacagacctgccagcgcaataccatattgccgcatcatactactccgttcttcataaatgccgctcagatccttcaggatccctagatataccgtatctgccgaatccgtcgcctgatctgtgatgatgctgagcagataataacacgttcctaccttgcggacaccgtagacctgatctgcaccgggatccatagtccggatcatttcttccgcaagagtcctgatctcatcctgcggcagcttcaggctgccctccaaggtgatcgtgccatccgtttcaagtatcatacattccataccgttctgatccgtcatccgttctgttgcggaatttcctgcctgtatcccagcaaattccgctccgtatttttccatgttctgatacaccatatcataaatggtctgaaagagaaggttctctcgttttccctgctccgtctcccgttctaacatgcggttaaaataggaaaacagcataaagcttccaaacagcatgaaggctgccgtaaggagtgctgtgatggaaaaaaataatttatacgtgaacttcattcaaacgataccccaccttatataccgctataataatattttcccaatgtagctttttcttcagccgctgtacatgcaggtccaccgtgcggctctgtcccatatattcaccgccccatacggtctcgtatatagtctcccggtacaaagccctgtttttatttcttgcaaacaataacagaagatcaaattccttcggtgtcagatagatttcttctccatccagtgtcactctgtgggatgccgtatctatagttacattgttgacctgtatcatcgtctccgtcttatgatatctgcgcagcactgcctctactctggccagaagctccacgatctcgaaaggcttcggcagataatcatctgcgcccatgcgaagcccttttactttatgttccgtagaacccaaggctgtcagaaagatcaccggaagctcacaggctttcgcataatccatcagttcataaccattgattcccggcagcatgatatccaaaagtgccagatcgaatttctcccgctccataagatccgctgcggtctgtccgtccggtgcccaggtgcactggtacccggctctcgtcagattgatccggatcagattggcaatgggctcctcatcttctgcaattaatattctaagcatttccctgtccctcgaccacatttcataagctcacgaattcgtgctatcgcactctgcatcctgcttcgcagccgcttgttttataatacgatttctccgtgctatcgcactctcgaaatcgtaacagacattcacaatccgctgtccttcgaccacgcttcccaagctcacgaattcgtgctatcgcactctgcattctgcttcgcaggatattcgttcgctaatagtgcaagaaaaacaaatgtctgcttcgcagccgcttgtttttcttttgcacatatttatattatagcatatctcatctttgtatccaatttgtatcatctatttatttggcactattttttcgtccgatcataccatatattaaatgaattattggaaaggattgctatgaaagactattcttttgaagaacattttgaaaaatatccactggccatggcctatgttccctggcagcatttcaccaaaatgtatgagaatctggaaaaaggctaccaggcgggtaccatttttccggagcttgacaaaccttttaccggaaggagatgcgtaaaatgaacagtgaagaaaaaatgctgcacgacatcggcattgccgacttcgttctgacggatctgatgctgtatctggacactcaccccacagaccggaatgccatggagtatttcaaccattatgccagaatcaagacacagatggagcgggaattctccagagaatattaccccctgcggaaagatctggcagaaagtaacaaggagtggcgctggggcaacgctcccttaccctgggaaggaggatgtaactgatgtggagttatgagaaaagattacagttccctgtaaatatcaaggaacccaatgccaaactggcccaggtcatcatctcccagtacggtggccccgacggggaaatgggtgccagcatgcgttatctgtcccagcgttattccatgccctttaaggaagtggcaggactgttgacggatatcggaactgaagagcttggacatttggaaatggttgccaccatcgttcaccagctgacccgtgacctctccatggaagagatcgagaaaagcggatttgccaattattatgtggatcacaccattggtgtctggcctcaggcagcaggcggtgtgcccttcaatgcctgtgaatttcaggtaaaaggagacatcatcacagatctgcacgaaagtatggctgcggaacagaaagcccgctccacctacgacaacattctgcgcctgatcaaggatccggatgtctgtgaacccatcaagttcctcagagcccgggagatcgtccactaccagcgcttcggtgaagccttgcgcattgcccaggatcacctgaactccaggaacttctatgcattcaatcccggatttgaccgctgtgattcctgcgagacctgataacttttttaccatgcacgcttccagaatccaattttgtatcaaaacaatttagaaaaggctgccggttccgaatcctataatttccgcttcgaaactggcagccttttttcaattttcagaattatctcttttcgccaggtattatctctcttcgcccatgaagaacaatgccagtgttccggggccggaatgagaaccaatggtggggcccacatagttgatgaggaagctgtccatgccaaaacgcgcctttaccaagtctctcaccagttccgccgcaggcagatcatcaccgtggctgatgaaaacaatatcgttctggtcacggtaggatcccatcttctcctccatgtaatccaccagtgcatgcagagatttcttacgtcctcttaccttaccgatgacaatcagatgtccatcgttatctacatgaagcttgggtttgataccggccagtgttcctacaaacgccgtagccttgctgacacgtccgccgcggtagaggtgatacagatcatccacggtaaatacatgtaccagatgcagacgattattcttcacccactctgccacttcttccatggatttgccctgatctctcaaagtcactgccttgtggaccagcagtccctctcccagagaagcgcacagactgtcgatcacgatgatcttgcaatcgggctgttcctccatgatctcatccgccgcgatccgcatgctgttgtaagtaccgctcagtccggaggaaaaagcgatacagaggatctctttattttctttcagatattccgtaaaatgagcctttgcctcctcagggttgacctgggatgtagtcggcatcttgccctgtctcatcaatgcatagaattctttttcgggaagttcctgtccttgtccataagtcacaccatccatgatatagctaaggttcatgcatccaagatcatgttccttcagatactctaccggcagatcagcagtactgtctgtaacgattttaaacattggttaccctcctgatgctatcaatttttcctaagcatacatcaaaagggcacccatttcaattttcgctgacaaaagtgatacattttgtcacatttttctggttcctggcattcttccacggaagaaacgatttctcatttttgctctgtcaaaaggaatcagcggatacagatagctttgtccggagattgtcttattcgtaaggagcgccagcgcaaatataatcagtccggcaatataacccaatattccgaaaagctgtgtcaaaatcagattgaggatccgcataaatttcaaggcataacccaattcataattagcctgcgtgtaattagcaatggccacaaatgccatggcaagcataacctcactggagaaccacccactctccaccgaaaattctcccagcaccagcgccgccatgacactcaagggagtactcagcatattcggtgtgttgaccgccgccagccgcagtccgtcaatggccagctccaacagtaaaaactgcaggatcagaggcacattgggatcctctttcagaataataaattccagattctctgggatccacatccgatgattcataaggagcagatatgtgggtgtcacgaaatacgtgagcagtgcgatcaggaaacgggtcagacgcagatacgttccggtgaccggcggaaagtaataatcatccgcctcttccaccacatcaaagatcgtggtgggcaggatcatggcagaaggggaattgtccaccaggatcaccagattgccttccagcacctgggctgccgccgtatccggccgctccgtgtatttgaacttcggaaacggattgtaccacttccgctggtacagacattccgccaggctttcctgattcatggccagagcatccacctgaatggaacggatccgttcccggatctgcgtaagaagtttcggatccacacggctctccatataacacagtacgatatctgttctggaattctccccggcattaagcatttccatatgaagatccgtactacggatcctgcggcggatcaatgctgtattgaataccactgtctccacgaagccgtccttggatccccggagtaccttgtccttgtccggctcctccacccctctggcgggataggttctggcatcgatcaacaccgccttttcataaccgtccaataacaggacaaagacgccggacagcaaagctcccagtattttctcccaggtatcgtccagatccacctccacgtagggaatcgcgattttggacatctcatgggcatcctttgggaagtcctccgccttcagatccatcagatactgtaatattttctgcatcagttcgtccttgcagaaaccatcgatcagatacatgcaggcatcggtgtcaccgagacgaatcacccggtgaataatatcgaaattggtttccagtcccatcagttcatccacatactgcatattctgctgaagcttttccgatattctgacgagctttggttgtttgttctgtggcataaaaaatcccccttgggtctatgatctaaatttcatcatgtcccattcgggggattttattctgctattttgttgttttacctgttacttcgtggtgcttccgaagccgccgttacggattccttccgcatcatcatcttccgtgatgccatactgcataaagattccctgtgcaaatccggttcccgcaggaacctccacggtcttgccttcattggaatcattggtaatcttcatgaagatatgtccttcattatctgaaaagaaatagtcactgtcaatgatgcccacggtattgttcatctgcaaacggtatttaaagcccagtccgcttctcggataaatctgtaatacccagtcctccttcatttcagcacgaatgccggtaggaatcttgatggtctctcccggggccagggtaaaggcaaacggtgcgaagaaatcatagcctgcgcttcctttcgtggctctcctgggaagttttaaattttcatacatttccctgatctgtgcttccgtatactgaggatatccctcctgcatggcagtcaaaaactgccccggacttacaaaatgaaattttgctattctgtgcattgtctgttctttcctttttcttcttacattaccggctgaaaccagccgcttcctatgcgtaatccccgcagtgcaataccggcacccgtctatggtcactggccagggtcttcttcacatcgatcacccgctggttcttactgcccttccacaggagctttacatctttttcctccacatggaattcaccgtctactaccacatccacatactgcatcaccggcagatcacagatgtcttcccagctgtccccggtgtacatccagatcgttttcgtgggatacttttcccggatttcactcatgagttctctgacatccgcccggttcacgggatgcatcggatctccgccggaaaaggtaataccggaaatgtacggcttttccagctgttcgaagatctcctgttttgcgctttcgtcaaataagagtcctccgtcaggatcccaggtaataggattctggcattccttgcagcaatggttgcagcctgccacccacagtacgacccgcagaccatcgccgttcagcatatcgtccttggttatattatgatatctcatttatctgtccatcctgtctctacatacttttccgctctgcgatctccgccatcttggcatcgttcagtcttgtatctccatgtactctggagtaagacagatagccgttcatgcggtcgatcttggtcagattccggctgccgcagacaggacatacatccatttccagttcctgatgtccacagtcgtcgcagtaagccagagac

SEQ ID NO: 5562 - DNA, 7214 bp, Unknown
  gut microbiota DNA sequence
agtgtcttgatggcttcggtattgtaatcaatgggatattttacatactggatcttaccgccgttgctcagatcccagaaacggttctccagatcctgtttctggatcggcgtaatatcctctgtcacatggcaatggaagctgttgctgacatattctcggtcggataccccctcgataataccgtatttttcacggaactgcttgacctgaagaccgcacagattctctgctggggttccgtagatggcatacagattgccgtcctcttccttgtactcggagatcttctggttgatatgctccagaacttctaccgcaaatgcaccgtcttccaccagtgatttgccgttgtacagttcctgcagttcatttaatgccgtaatgccgaagctggccgtagcggatttcagtaacggtttgatcttgtctgccagcttcagatgtccacccaggaaaccgccctcgcaatatgccagaggattcgtggacgcacgcatttctcccagataagcataggtccggatatgcagctgacggatcagttccagataataatccagcacttcataaaagtctttgctttcttttcttgccttggccagaatcataggcagatgcagggataccgcaccgatgttgaaacgtcccacaaataccggctggtccttgtcatctgcaggatgcatgccgcctctctcataccatggagacagaaatgctctgcatcccatgggagatacgatcttgccatactgcttgtacatgcttgccacatagcccttgccggtaagactcagccagtcgggatacatggtcttggcagagcattccacacctgcctcgaaaacatcctccaacggctttccggggccgtgcagattctcatcatataagaatacgatcttagggaacaatacaggcttcttgtgatcctttttgccctgtccctttctgcggacatccagcatggtaatagtcgccatctttgcaaatttaccggtgccggttcctgcggtcacggtaataaacggataatcaccacggctgctggccacagtattgaacttgtactcccacccctggaagccctgttcaaattctttctggacatctgccagtgcctctgcttccgccacatctgcggcaatacccagacgctcatattttgccagcgctctgttataagacttctcagcatacggttccaggatcagatccacgctgggtacggtgaatccgccgtactgctggctggctgcacttaaaacgatatcgccgataacatcaaacgccacatccagtgtcttcggctcattgtaccagatattgcccatctcaaatccgccggtcagtacactctgcacgtcgaacagacaacaattcatggtatctcttctggcggacatgtcatggacataaatataaccgtcccggcaggcctggatctcttccgtggtcaggaagaacttctggtacagttccttgttcagctgattaaagatcaggctgcgcttggtggataccagtgcggaatccgtgttggcattttccttgtctccgatgtacatgatggactggctctttttgtagacatcatccagcatccgtacaaaatcctgcttatagttgcgataatcgcggtagctttttgcaacgaccggttttacctgctctaaggcactttccacaatattgtgcataatgggaatgggtacttcatccacttccagttcatttactttttctaccacatagcggcagatctgctctttttcttctctggtgaattttgtcagggcacggtacgcactcttgcctacagcgctgatcaccttctgtacattaaaaagctctttgctcccgtcctttttaacgacgtagatctctctgtccggtctgaactttttgccataatcttcattttcttcatgggcatgttcaaaattactgctcatctttctcttcccttcatccgataatccccggctgttgcccggatttactgtattcccctcacttacgataacgtttgtagataccatatatggtatctgtagtcatcaaaaagcaatatattgtgggtgttatgtatcagtataaaaaagaatccctggcttgtcaacgagggatcccttagaaaactatacaaaaaaaattttcaaattttgggtaactttttattccgcctcctgtgactgttcccgtaaaatatctgaaagccactgtacatagcgcttttgtaccgcttccggcgctacgatacgggccccctgtccgataccggccagccatccgaagaactgtccgctgaccgccacctttgcccggatccggaacacttcctccgacatgggacggatatccgtctcccttccgaagcggtccagtaccacgccggtcaggcgcaccggaaactccatggtcaccacgctctcctctccggcaaacatgccgaaggtctggttcgtataggaggtcacatcgatctgtgaaaactgttccactccttctctgggcagatccgtcacttccgcctgtcccatcttgtccacacggtaatgcttgatcactctgtcttcactgtcgtaggcggccagataataattttcctcccgccagatcagggcccagggactgacgcatttgttgccgtttggtctgggcaccagctgctttttaagattccagtccaggtagacgaaagagatctgcttattttcctgaatagcccggtggatcgcatcaatgctgtaataaatgctctcattctccgtcttgactcttccggccacatagacctgtcgctgcagtttaccggcatcgtttttcccggcgatctgctccagcttccggatcagttctctggattttttcgtggtgataaaccgggaagactgtaccgcgtccaccagcagctttaattccggaagttcaaactcccggctgcccagataatatccgcctcccagtctgctctgcacctgcaccacatcatagccgaaatccgcaagacattccatatcgttgtagatactcttgcgctctgcatggattccctgattttccagatatttgatgatatccggtgtgctcattggatggttttcatccgtgttctcccgcagcatcttgatcagatataaaagttttaatttctgtcccgaagattttgccatggattattcttctgtctgtttcttttcctctgctgcattctttttcttgcgcagagtgattcccaacgtaatggccactgcacctacaaccgcaatgactaccagtactaccagataagataaaaatgaattcaaaaagcttactgccataatgtcttctccttttcccgatatctttgtatcccgaaactattgcatgtattagaagtataccaacgaaatccccgtatcgtcaagtggtcccttcggatatggccgccggtgtatttatccattttcctgtcttaagaaaattttccgcctgtccggaagccttctttatgatctgttcctcataccccatcatctgaagcagacggatcgcatttctggtggatgcttttcccggcagcagctgataggggaacaggatatcaccgtcccggatcacttcctcaaaatgatagttgtcatagtattccttcaaaagctccgtcatttcaatatcatgggtagcggcaaaaccaagcgttccgctctccgccagacggatcaggatctgcgttgccgcggcgatccgctccaccgtattggttccccgaagcacctcatccacaaaacaaagcaccggagttctccgttccccggccgcatccaggattcgtttcaatgaccggatctccacaatataataactctccccgttttccatgctgtcccgcagggccatggaggaaaatatctgaaatatcggtgcatgataactttccgccgcgcaggtatggatcgtctgtgccagaacggcattcaccgccaccatttttaagaacgtggatttaccggaggcattggaccccgtaagcagaattcctctgtccgcccggatactgtttttcactggctgtgacaacagcggatgccagcccttcttcatatgcagaaaagctttctccgtatcttcttccagtttcggaatacagtacccttccagagatttccgaaatccgcctacggatatggccatatccaggtacccggtgattgcaagcatgttttccacctgtccggtctttttccgcagcttttccagcatccggttaaactgaaagatatccagatgcaatatcatccgcagataatccgcaaggatatccagaggatttccaccaatctttccctgatttccagccatgacccaataggctccccgcctcaactcccgcaggctcttcagtgcctcccgaagttcatccaattctctcctgtataccggtattttctgcttctccagttcttcacatacatcgatcagccgtaatacataagcgaagctgataatatacggttcgatcacttttttctcccgaaaatatgtcatgatatgccagagcatacacaagacgattcctatggtacccatcgcaggctgtacgaacaataacaggagaaatggaaggtacagcagatttcccagcacaatcttacggttggaacgctcccccagataatccaggttgtccagataatcgtagagagaatattttcccagatgtcccagccgtttcatcaacagctggatccttacttttatattctcctgctcctgcagccagttaaccacttcttccagatgttccagtgcctctctcccgcaggaaatattccggagcgtatagtacagatattcctctcccgccgcagaataggtccggtcgatccggcgaaagacctcgtccattcccagatcgttccatgtgatatcatccagctgcttctcttccttatgccgttccagatagctgcccagtcttgcaaaccgctccagtgaatattccttcggtggttcttttccgtaattttcacgaagatacttcttgaaaagtttttcctgatttttcgtctgtatcagctcctgcactatcataaatataaaaagcaaaagcaatacgcccgcaaatacaacaaattccatattttttctcacttttccggatataagaaggcaggcaccgccctgtgcagtgcccgcccccatattctgatctgttttttatatttcttatttgtaaaactctttatgcgacaataaagaactttaacaggaagatcaaggataatacataggtaagtacggatacgtccttagctttaccggtaaataccttgataacggtataggtgatcagaccgataccgatggcatgtccgatagatccggagatcggcatggcgatcatcatcagagccacgggaagcgcctggcagatgtcatcaaaatctacattcttaagacctgctaccataaggacacccacatagatcaatgcggaagaagtagctgccgcaggaatgataccggcgatgggtgcgatgaagatacatgcaaggaacataataccggtggtcagtgcggtcagaccggtgcgtccgcctgcttccacaccggaggcagactctacgaaggtggtaacggtggaagtaccggttacggaacctgccagagtgcctactgcatcagacaaaagtgcctgcttcatgttaggcatttttccatccttatccagcattcccgcacggcttgcggttcctaccagagtaccgatagtatcaaacatatcaatgatacagaatgtaacgatcagagtaattgcagtaaaccagccaatctgtgcaaatccctggaagttaaacttaaacagtgtagtggacgccatatctccgaaggccggtacgaaggatgcagttgccagagaagcaaagggatttgttcccaggaaaatggcctctcctgcccagtagatgatgctggcgatcagcatccccagtaaaacagcacccttgacacctctctgtgccagaacaacaatggcaaacagacctacgaacatggtaacaaccgacaacaccattgcggaatatccggatcccatattggtcttagccagtgaaggagtcagtgcaccgaagaagtctctcatagcatagaaaggtcctccgttctcggaatagattcctgcattggaaccgacgccgatgtttaacagcataagaccgatggccggtgcgataccgagacgtacgcccaaaggaatggcatccacgatcttctcacggatattcagcacggagaggatcaggaatacaataccttccaccagaacaatacacagggcagcctggaaggatgccacataggtcatgccggtcagggctacgatattggttactacgactgcaaaaaagctgttcagtcccatgccgggtgccatggcaaaaggcttgtttgccagaaatgccattacgatggtaccgatggcggatgcaatgcaggttgccaggaaaacaccgttccacagctccggcatggtatccttgccaaaaccggtcagcaggttcggattcagggctatgatataagccatggtcatgaacgtggtcagtccggcaatgatctctgtccttgcggtggtgttgttttccttcagtttgaagattttttctaacatcttttccctcctaagtattctgggagccacgcgggagctccgttctatgtcttctgagttatttttcttactcagtcaacagtctctttacgatcttctcgcattttgtgtaaatacgttccggattctctcccacattaaattctccgttacgatacaaaatcttgccgccgatcatggtcatgcagacattggacttgctgccgctgtaaaccagattcttggggatgttgtgaatgggctgcatattgggctggtgcagatcgatcataataagatctgcatattttccctttgcaagaacatctgcgcggttcaggcgcattgccttggcaccgttcaccgttgccatcttcagtacctccacggcatccatgctggacgcatccttctctaacagtttgcttaagccggtgactaagaacatctcccggaacatgtccagacagttattgctggccggtccatcggttccaatggctaccgggatcttgtgccgcacataatcagcaatgggtgcaatgccactggccagtttcgtgttggagcc

SEQ ID NO: 5563 - DNA, 54769 bp, Unknown
  gut microbiota DNA sequence
agcgtgccgcgtttcttataccctgccaagggctacggggatttgatagcatttctttactaactttctatttacagctttgtggtccactgggacagatcccagacctgggtagccaggccatcgtagaattccggctcatggcagaccatgagaatacttcccttgtattctttcagtgcccgtttcagctcgtctttggcatccacatccagatggttcgttggctcgtccagtaacagaacgttcgtggcacggttcatgagcttgcagagtcttacctttgcctgctcaccaccgctgagtacctttacgcggctctcaatatgctttgtggtcagaccgcatctggccagcgcagaacggacctcatactgggtaaacgcgggaaattcctgccagatctcttcgatacagctgttgtcaccggaaccggacatttcctgctcgaaataaccgatctccagataatccccctgctccacttcgccggacagaggcgggatcagtcccagaatgctcttcaacagtgtggtcttaccgataccgttggcaccgatcagcgctaccttctcgccacgttccatggacagattcaggggcttggacagtggctcgtcataaccgatgatcagatcctttgtctcgaaaatgatacgaccagtggtgcggccctccttgaaagagaattcaggcttcggcttctccgcagccagctcgatgacatccatcttatccagcttcttctggcgggacatggccatgttacgggtggatacacgagccttgtttcttgctacgaaatccctcaaatcggcgatctccttctgctgacgattatatgcggcctccagctgggacttcttcatggcatagacttcctggaacttgtcgtaatcgcccacatagcgggtcagctcctgattgtccatgtgatagatcaggttgatgacactgttcaggaagggaatgtcatggctgatcaggataaatgcgttctcatattcattcagataacgcttgagccattcgatatgttccgcatccagatagttggtcggctcatccagcagcagaatatcgggcttttccaatagaagtttgcctagcagaactttggtacgctgaccacctgacaactctgtcacatcacggtccaggccgatatccatcagtcccagagctcttgccacttcctccactttggcatcgatcatatagaaatcatgcatagtcagcagatcctggattgttcccaggtcttccatgtactgttccagttcttccgaggtggcatctcccattttgtcacagatttcattcatctgtgcttccatatcgtataagaaatcaaaagcggaagccagtacctgacggatcgtcataccgggggtcagcactgtatgctggtccagatagccgacgcggacattcttcgcccattccactttgccctcatccggcatcagtttaccggtgataatattcataaaggtagattttccctcgccgttggcaccgatgagaccgatatgttcccccttcagcaggcgaaacgatacatcgttaaaaatagcacggtctccaaatccgtgggtcaggtgttctacgtttaatatgctcatatttcctcacattctgctgctttgcagcgtcgtttccatcaatagtcctttgcaagtatagcgtactgtccgtagttttgtaaagaaagaaagcaaaaagggtggaaaacaataattttttgttgtgaaaaagagcacatatgtgctatgatgtacgcggttttgcgaatggggttctgaatagttactatttcctgattaaatacagaaagaaggcagcgtatgcttttacttcaacaaatggtgatttttttcctgatcatgctgatcgggtacatctgcagaaaggtcggagtattcggggaaaataccggcaagatgatctccggtatcgtcattaatatcggcaatccggcgctgatcattgcctccggcatgaatcctgaaacattggaaaataaggcggcattgttggttacgctggctgtggcgctgatcttttttgctatcatgtttgtgattgcagagctgattccgagactgcttcgggcagacagagaagattatggttcttatcaggtcatgacgatcttcgccaatattggctttatgggctatcctctgctggatgccatgtacggcggtgaagcagtgatccatgctgcaatttttaatctgctttacagtgtgctgatctatacctatggcattaacaggatgaagacctccggacagcgggaaaagctgaactggaagcagctgatgaatgtgggggtgatctcctgcctcattgcagtgaccctgtatatcagtaatcttccggttccgatggtcttcaaagatactgccacccggatcggagctgtcaccggaccattaagtatgctggtaatcggtgattcgctggcacagatccggttaaaggatctgtttacggatgtgcggctgctgctcttttctgttgtgaagctgctgcttatgccggcactgcttctgtggggactgcgttttttcattacagaccccatgtttctgggtgtctgtctggtcatgacggccacacctgtcggcagcatgacagtcatgctggcgcagcaatatgacggtgattaccggctgacctctaagggcgtggcgctgaccactgtgctgtccgtagctacaatgccgtttctgttctggctgttgaaaatttaatgaaactttttctaccggattgtcgtctgatagaatagggatccccaaaaaggggatactgcaactgaacatgggaaatatccctgcaaaacaaggagagattttatgaaaaagaaattagcatgtatgttacttatgagtgctctggcactttctatgaccgcctgcggaggcaaggataataacggtgctgcatcagacaaccagcagtccaccatggagagcaccgcagcgggacaggagaccggcgaggccggtagtacaaccgctgcacagaatccgaaggacgctgcgaaagcgttacagagtgcaaaaaaggcagttacggatgcactgggagacaattactggccggattccgagatacccggggaaatgctgaacgagacctacggtgtcagtgcggagctctatgatgcctacctgggagaggcacccatgatcagcgtcaatgtagatactttattgattattcatgcaaaagatggtaaggtagaagaggtagaaagtgcattgaacgcctaccgtgacagtctggtgaatgacacgatgcagtatcccatgaatctgggcaagattcaggcatcccgagtggaacggataggcgattatgtatgctttgtacagttgggtgcggacacttcctctgtggaagaacagggcgatgaggccgtgatcacttactgtcaggagcagaatgaacttgccctggaggctatcagacagactctggagtaaatacggagtagagtgaatggtattcagcagtgtattgtttctttttcggtttttgccgatttttatgatctgctatttcctggttccccggaagatgaagaatctggttctcttcctggggagcctggtcttttatgcctggggagagcccgtctatattttcctcatgcttttttctaccatatccgattatgtgtggggaaggctgatcgaagaatacagagggaaggatcgctccaggatctttttgctatgttccattgtcatcaatctttttatcctgggattttttaaatatgccgatttcctgatgcagacggtgaatgcggtcttcggaacgtcgattccgtttctgaatcttccgttacccatcggaatttccttttacaccttccagaccatgtcttatgtgatcgatgtgtaccggggggatacaaaagcgcagcgtaatattctgcagttcggtgtctacgtgaccatgttcccacagctgatcgccgggcctattttaaagtatcatcaggtggaacggtatctgcaggacagacggaccgacctggatgccatcagctatggtgcgaagcgttttgtgacgggactggcgaaaaaggtattgctggccaataatctgggattattatggaaacaggtaacggagctgggaacggatcagatgagtgttctcatggcatggctgggaattgccgcctttgcattgcagatctactttgatttttcaggctattccgacatggcgatcggactgggggcagtcttaggcttccatttcccggagaacttcaattatccatacgttgccacttcggtcaaagatttctggcacagatggcatatttccctaagtacctggttcaaggagtatgtgtatattccgctgggtggcaatcgcaagggcttgccgagacagctgtttaatattctggtggtatggatgctgaccggtatctggcacggtgcgggatggaacttcctgttctgggggctgtggtttgcgcttttcctgattctggaaaaactgtttctgggagaagttctggagagtgtgcccaaagtgttcggcagggtttatacgctggcggtggtattgatcagctgggtattttttgcactggaaagtcccggtgagattctggcttatctgcaggctatgtttggaatgaacggggtagggcccgtgaattcactggccatgtttttgagcaatgagtatctggtgcttctggtcatcgcattggtggcatgtcttccgctaggcagcagactggtgcatgctttgaaaagcagtaagacaggccccgccatggcactgtaccggttgggagaaaaggtgattccggcagtactgctgcttctgtcggtggcgtatattgtggatgcgtcgtataatccctttttgtattttcgattctgaccgggaaggaggaaccgcatatggatgataaaagaaattcgctgttgaccatcggactggtctgtgcggtacttctggttctgggagtggcagatctgtggaacagtgacagagtatattcggaagcggagaaccgggtactggcttcccgccctgccttttcctgggagagtcttttcacgggagaatacggggatgcttatgaggaatacatgtccgaccagtttgtaggacgggataaatgggtaggacttaagaccggggcagatatccgtttccggaaaaaagagatcaatggggtctatctgggagcggatcattatcttattggagtgaacgatcccgatgagtatacggagcagatggaaaattcccgtgtcgcatcgttaacaaagctggtgaaccactgggatgccaaagtcatgctggtaccgacggcggacaacattctcacggataagctgccggcatttgcaccttattatgacgaagaacggctgcttacgaaggtaaggaattctattggagaagagcattatatagatgtgtatcacgctttgcaggagcatgcacaggagcccatctattatcgcacggatcatcattggaccagtctgggggcatattacggttttctggcctgggcggacagtgtgggacgtttcccctacccgtatgacgtaaacggcatgaagacggtgtcggagaattttcagggaaccttgcagtcccgtatcaatgtggactggacgaaggatagcatacagtatttcccggagacggagaaaaaagcagtatcggtgacgtatgattttgcggacacggctgattctctgtatgcaccggattatctggataccaagaaccagtatggatttttcctgaatgacaatcatgcatttattgagattcatacgggatacaatcccggtaagacgctgtttgtcatcaaggattcttatgccaacagcctgattccgctgctcacggcccattatgagaatatctacgtggtggatctgcggtattttaacgggaaactgttccaactgatggagcagtatgaaccggaacagggaatggatgtgctggtgttgtatgattgtattcattttttagaggattttaagtattattaaggaggcttattatggcttatttgggcattccccagaataccattgcggtactgcagaagtaccatttcaattttcaaaaaaaattcggacagaactttcttatagacacgacggttctggaccggattatttcttctgcggagatcacgaagggggactgcgtgctggagatcgggccgggcatcggtaccatgacccaatatcttgcggagcacgcgggcagcgtggtggccgtggagatcgacaaggcactgatccctattctggaagagacattacaggattatgataacgtcacggtcatcaatgacgatatcctgaaagtggacattaaccggctggtggaagagaaaaacggaggacgccccatcaaggtggtggcaaacctgccctattacataacgacaccgatcatcatgggcttattcgagagccgtgtgccgctgaagagcatcaccatcatggtgcagaaggaagtggcggaccgtatgcaggtaggccccggcacgaaggattacggcgccctgtctctggcggtgcagtattatgcaaagccggaaatcgtggcgaatgtaccgcccaactgcttcatcccgagaccgaatgtgggcagcgcggtcatccgcctgacccgctacgaagaaccgccggtacaggtgaaggatgagaagaagatgttcgccctgatccgggcttccttcaaccagcgccgtaagaccctggtgaacggtctgggaaatgcgggcctcccaggcatcaccaaggaatccgcggcagcagccctggcacagatgggcctgtcccctaccgtaagaggcgaagcattgacactggagcagttcgcaagactgagtgatctgttgtagagcggcttatcatgaagcagacaaggagtatacgttcagacagctgcagattcataggtcactccgtctccgaccgataataattccggtattttaacggtgtcatattccggtattttttaaacacccgttcaaaataagtaatattttcatagcccaactgttccgcaatggaagtgatgctgtcatccgtttccagaaggagccggtgggcttttttgatgcggttgacattcaggtaatcattgatggtaaaactggtgacttctttgaaaatacggctcaggtaaaatttgttgatatagaaccgcccagcgagatcctccagagagatccgctcagtacaatgttctacaatatagtgcgccacttcatcgaccttttgatacttcgggttcgaatgtctggccggggatgagacaacgggaccctcgggctgcaagcgcagcacggcaatgaaaaattctgccagcttcgtcatggcggccagaagatagccgggctttttgtggatcagctcagaggcaatgtcctgcaacagagactggatataggggcgcatttcttctggcagtgtcagaatactgccctgctccgtgaaaaaactctgcagctgcaatcctccgaaagatgccagaaaggtagaaaagggctcttccatgattcctaaaacgatccggtcgtgatgtggtccggcggaagccataccggtgcggtggatctgctccttgtcaatgaagaccagcgttcccggggtgaccagataggtctgctggttgataaaataataccgttccccctctaaaagataataaatctcgtattcttcgtgaatgtgacggatatccatggaataattatagtcccgtacaacacggtcgatgtggaatccgtctgcaagctcattatagagccagtgatcctgaggtgtcgaagcaacagcattgcccgcaacgcctgattccggtggagccggtgtctgaaaatcccctgtttcaaacataatagtgatctcctttttcctatgctatattagtgctatattagactgcattctgagaaacagtatgcgcaggctatattacaaatctatgggcttgtataaaaacaaaagtcaatatagtacgaaaatggaaaaaaatacgcaaataatagcaagattattatacagccataggctataatgtgcaatatagagaaggcagtacgggccgatggagcagaggatcccaaggaccggaaacacataaggaggatacaaaaatggagtatgcagacggaaaggtaaaagatttacagatcgcctatattggcggtggttccagaggatgggcatggacatttatgacggatctggccatggatgaagaactgtccggaaccatccgcctgtatgatattgatgcggaggcggcaaaacacaatgagatcatcggcaacagactttctgcaagagaggatgtggtgggcaaatggaactatactgtttctgacagcttacagtccgcattgaccggtgcggatttcatcgtgatctctattctgccgggaacttttgatgagatggctgtggatgtacatatgccggaacgactgggaatctatcagtctgtaggagataccgcaggccctggcggtgccatgagagcactgcgtacgattcccatgtatgtggaaatcgcacaggccatcagggcatatgcaccgaaagcctgggtcatcaattacaccaaccccatgtccctgtgcgtgaagactttgtactacgtttttccggagatcaaagcttttggatgctgccatgaagtattcggtacccagaaagtgttaaagggtattctggaagagaccatggggcttaaggatgtgaaacgtgaggatattcaggtcaatgtactgggtatcaaccatttcacctggttcgactatgcttcctataaaggaatcgatctgttccccatttaccggaaatataccgaggagcataaggaagacggctacaaagaagcagataaaaactgggcgaactctactttcgagtgtgcccatattgtgaaatttgatctgttccgcaaatatggtctgatcgcagcagcaggcgacaggcatctggtggaattcatgcccggtgtgggtgacagttacctgaaagatcccgagacggtaaagagatggaaattcggtctgactaccgtagactggagaaagaaggatctgcaggaacgtctggcaaagagcgcgagactggcagccggtgaggaagagatcgagttgaagcctaccggggaggaaggtatccagctgatcaaggcactctgcggactgacccgcaagatcagcaatgtcaatattcccaataccggacatcagattgccaatctgccggaaagtgcggttgtagagaccaatgcggtattcgagagagatgccatccgcccgttgtatgccggagagcttccggagcagatcaaggagctggtggatccccatgtggcaaaccatgagcggattctgaaagcagctattctgtgtgattttgatctggtggtggaagcattcctggaggatccgcaggtcaaaggaagagcttccagagaacaggtggaagagctggtaagggatatgctccgcagcacggcaaaatatctgccggaaggctggaaaaagtatctgtaaaaataaaatagaaaaaagaacccgggaggtgctgcagaaggatgaggcggcacctctttttgtgtatacgatgagccaggtacagatttgtgcttgcacaagaatctgtacctggcgaatgtacatcatcgagcttttaagcgagatggtgtacaaagtataaaaatcgagtaggaaacagtccgctcgaggggttaattatttgaaaaaagaatataagcggcagaagaattataaagtcattgtgaaaatgcacaaaactgcgagaagtattttgataacaatatacaaacttccagggatttacagaaaagcacttgcaaccagttcgtgaatgtgctattttctaattacagcaacggaaacgttaccgggaacaataccgaaaccgtttccgacaacctgacgggagtatggcaagaattatgaagggttcccgttctaacaaaaaaggagaggtaagattatgaagaagaaactggcaagtgttttactttgtgcagtaatggcagcttccatgctgaccggttgcggaaatgctgacaatgcaacagcaaccacccctgctaccgacaataagacggacgcagcagcaactaccgaggcggcagagaagaccgcagaggcagcaggctctgtatactatctgaacttcaaacctgaagttgacgaagtatggcagaagctggctaaggaatataccgaggagaccggtgttcctgtaaaggttgtaactgcagcaagcggtacctacgagcagacactgatgtctgagatcgctaacaaggaagcacctaccctgttccagatcaacggacctatcggttatcagaactggaaagactactgcgcagacttaaaggatacagacctgtacagctggttaatggataagagcctggcaatcaccggcgaagacggtggtgtatacggaatcccttacgtagtagagggttatggtatcatttataacgacgctatcatgcagaagtacttcgcactggacggcgctaaggcagcaagcatggatgagatcaacaacttcgctaagttaaaagaggttgtagaagatatgcaggctaagaaagatgagctgggtattgaaggcgtattcgcttccacatccctgactcccggtgaagactggagatggcagactcatctggctaacatccctgtatactacgagttcaaggacaagggtatcaccgataccgacactctggagttcacttactccgataacttcaagaacatttttgatctgtacatcaacaactcctgcacagcacccggtctgctgggaagcaagtctgtagacgactccatggctgagttcgctctgggtcaggcagcaatggtacagaacggtaactggggttggagccagatcaatggcgtagacggtaacaccgttaaggctgaggatgttaagttccttcctatctatacaggagttgaaggtgaagagaaccagggactttgcaccggtactgagaacttcttctgcatcaacaaggaagcttctgctgaggatcaggcagcatctatcgcattcgttgaatggctgttctcttctgagaccggtaaggcagcagtaaccaacgaccttggattcatcgctcctttcgataccttcagcgatgatgaaaagcccaccgatcctctggcacaggaagttcttcgttacatggcagatacctccaagacatctgtatcctggaacttcacttccttccccagccagcagttcaaggatgacttcggtgcagctcttctggagtatgcttccggttccatcgactgggacgctgtaaagacaaaagtagttgacgaatgggcaactgaaaaggccgcaaccgcagctaactaattgatctcaacttataactattctgaatcgttatccatcttatataacttcagacacagggggcggtggtggtaccacggcccccgtgtttgtaaaacccggaatatcatgtaaaaaggaattaataggagaaggcttatgcaaaagacattaaaacgatattttcccatttttgtactgcctacattgatcgcattttcctttgcatttatcataccgtttgttatgggcgtatatctgtccttttgcaaatttaagacgattacaaatgcacaatttgtaggcctggaaaattatatcaaaatttttgcggacaaagattttgtcaacgcattcggttttaccttaaagttttctgttgtatctatcattaccattaacgtgtttgcgttcattctggcactggcactgaccagaaagatcaaaggaaccaacctgttccgtaccgtattcttcatgccgaacctgatcggtggtatcatcctgggttatatctggcagcagatgatcaatgcggtattgttgaaatatgagaccacactggtagctaatcccacctatggtttctggggattggtcatcctgatgaactggcagatgatcggttatatgatgatcatttatgtagccggactacagaatgtacctacagacctgatcgaagcagcacagattgacggagctacttcgttacagactttattcaaagtgaaaattccgatggttatgccatctattactatatgtttgttccttactgtatccaacagtttcaagctctttgaccagaacctggcgctgactgccggtgctcccagcaaaaagaccgcaatgctggctctggatatttacaatactttctacggcagaaacggttacgaaggtgtcggtcaggcaaaagcagtactgttcttcatcgttgtggcagtcatagccctgggacagctggtacttaccagacgtaaggaggtagaacaataatgactaagaaaaaaacttccaatgtgatcatattttgtatcctgtgtctgctggtagttgcatttttaacacctattttcttcgtgctgatcaactcctttaagggaaaactgttcatcagcaacaatccgtttgcactgcctaccgcagagacctttgtgggattgaccaactatgtgaacggtattgaaaaaaccggttttttcacagctttcggttggtcagcatttatcactgtattttccgtggcagcgatcattctgttcacttccatgactgcgtactatctgaccagagtgaaaaccggcgtgaccaatgtgctgtattacatgttcgtattttccatgatcgtgcctttccagatggtaatgttcactatgtccaagctggctaatatgacccacctgaacaaccctcccggaatggtgctgctgtatctgggatttggttccggcctgtccgtgttcatgttctgtggattcatcaaatcgattccactggacatcgaagaggcagccatgatcgacggatgcaaccctttgcagaccttcttcggtgtcgtaatgccgatcctgaagcccacagccatcaccgtagccattctgaatgccatgtggatctggaacgactatctgctgccttatctggtgatcggcctgagtactaattacaagaccataccggttgtagtacaatacctggtaggttcttacggtgcaaaggatctgggtgccatgatggcactgctggtactgtccgtaatccctattatcgtcttctatctgacctgtcagaagtacattatcgagggcgtggtagccggtgcagttaagggctaaaaaatagaaagatgtggttattaatatgagaaaaagcggaatattactgccggtgagcagcctgccgtcccgctacggaatcggttgcttttccaaggaagcatataaatttattgacagattaaaagaagccggtcaggcctactggcagattctgccattaggacccaccagctatggagattctccgtaccagtctttttccacttttgcgggtaatccctactttattgatcccgaggatctggtggcgagaggctatgtgaccgcagagcagtgcaatacctatgacttcggcacggatatccattccgtggattacggcaaaatctataagagccgtttccgcctgttgaaggaagcgtttgataacagccatattgaagaagatgcgagatttcaggagtttgtgcagaagaatgcatactggctggaggattatgcactttatatggccatcaaggatggtttccgcggcatctgctgggcagcctgggaagaggatatcaagctgagaaccccggctgccatggacaaatatcgcagaaaatatgcgaaagagattgtattttaccagttccagcagtatctgttccaggtacagtgggagaaactaaagacctatgccaacgataacggcatcaagattattggggatattcccatttatgtagcatttgacagctcagatgcctgggcgaatccggagctgttccagttcgatgagaattgtgagccggtagcagtggcgggatgtcctcccgatgcattttccgccaccggacagctgtggggcaatcctctgtataactgggaacatcacaaggagaccggttatgcctggtggatgcagcggctggcagcatgctttgaacgctatgatgtggtacgtatcgatcattttcgtggattcgatgcttattatgcgattccctatggggaacccactgcggagcacggccactgggaacatggcccgggatatgatattttccgttccatgaaggaaaaattgggagaaaaagaagttattgcagaagatcttggctttttaacaccatctgtgatagaattagtgaagaaatccggttatccaggtatgaaaattttgcagtttgcatttgattcccgtgaggaaagtgattatctgccgcataattatacacataattgcgtggtatatacgggaactcatgataatgatactgtgatggggtggtatgacaccttgaagggagctgacaaaaagctctgtgacgactatctgcgtctgaaaaatgcggacggagagccgattcccagagagcagcttccctgggaatttgtgcgtgccgcaatgtccagcgtagcggatctggcgatcattcccatgcaggattatcttggactgggatcggaggcccgcatcaacattccttccacactgggcatcaactggaagtggagaatggggaacggagattttacaaaggagcttgcaggacggatccgcagtatgacgaagctgtacggcagataggtccgtaggcttggaaaggtttgtgctccatggaggaaatcacgatcaaagacatcgcaagaatctgcggtgttggtgtcagcacggtatcccgtgccataaataaccacccggacatcaatcctgagaccaaggaaatgatcatgcgggtgatcaaagagaataactacgtacccaacaacagtgccagaaacctgaaacgtcaggatgccaaggcaattgcagtactggtcaaaggtattaacaactctttcttcagccagatgatcaaggtattggaagaagagatcaaggaaaaatcttacgccatggtattgcagcatgtagactatgacgaggacgaagtggaagtggcactgaagctggtcaaggaaaaaagacttcgcggcattatcttcctcggcggttatctggtgcacagtgaggaaaagctggcacagcttcatgtgccgtttatcttaagtaccacgggaatgctgcccaagggcttcagccgcaacacctattcctccgtagcggtggatgataccaaggaaagctacaagatggtggactatctgtgcaagaacggacataaggatattgcaatcctctgtgcccgcaaaacggatgcttccatcggtaagctgcgtctggagggctataaaaaggcgttgaaggataacggaatagaagtaagagaagaactgatcctgcctatgaggagtgatttggaagattactccttggagaatggctatatggtgacgaaggaattcctcgagaagcagattccgtgcacggcgatcttcgcaatctccgatatgctggcgatcggtgccgggaaagccttgtctgatgccggatacaaggtgccggaggatatttctctggcaggctttgatggtgtggaaatcgggaaatatgttatcccgtccttgacgactttaaagcagccggtggacagcatggcgagagagacggcccggatcctgttcgacatcatcgggaaaaaggcgaagcaccagcactgcgtgttcgacggagaactggtggtgcgggattccactatgccgaggacttagactatgcagatacatggttttaacaagacaactttattagattatccggaacatattgcagccactgtttttacagggggctgcaattttcgctgtccgttttgtcacaacggggaactggtgctggatcccggctgccagccgctcattccggaggaagaagtactctcttacctgaaaaaaaggcaggggattctccagggcgtctgcgtcaccggaggagagccgactctgcaaaaggatctgaaggattttttacgcaagatcaaggaactcggatatccgatcaagctggataccaatggctatatgccgggagtattgtgggatctgatgcaggagcatctgattgattatgtggcgatggatattaaggcgtccagagataattatgcccgggcggcgggactgccgcatatggatatctcccgcatcgaggagagtatcggcatcctgaaaagcagcggtatcccctatgaattccgaactaccgtggtaaggggaattcataccgtggtggaatttgagaaaatcggtaaatggattgcgggatgccctgcgtattatcttcagaattacgaagagaatgaaaactgcctgtaccggatgatacagacagtggaatgtgacgatgtgaaaccgggcggagtagatccgttcggagcattttccagagaggaactggaacagatggaggaactggcccggaaatatgtggggaaagttatcctgcggggcgtggaatagatgctgtgcctcccagctacataagctgttgtatttttacaaactcatcaaagcgaggtaaggccagcgtgactttcccgtattctttggaaataatgacaccttttctctttaaacgctcacgatagacagagaaaagttcagatttcatatctaatcgctcacggagagcttttacctgagtctctccgctgagagacatttcagttacgatttttttatccagatcggataattccgaccatattttactgtatacatattcatccagatattggtcatattccggcaaaatctgttccaaagtctttttatcgcgattttcccagtagagataaccaagtacctgaaaggcaaaaggatagcctttggtcagtgaagccagttctccggcagcatctatatccagagaaaagatatccatatattgtttgcggatagcggtataattgagtggctccaggattaatttgggtgcacggtataaaaaggtcagtactttatcattttgaagattataaatattttcatataatcccgtcatcagtaaaaagatgggatagtcgtttcgtaaaaaaatctgaaaggagcttgcaaagattcggatatattcggaattcgtcacttcatcaacgctgatcagcaaccttttttcacttttctggatatatttcaacatgagttccagagcgttttcgatatccgtgaccggagcagcgttttcaatggatactcccagaccaaaagcagaaaagtcaagttttgcattaatgaacagcgtgtgtaattcgggaatgctgtagatttttgcagcaagactttgcagtaaatctctggtaggattcagttccacaacgatccagtcttctctttttcgtaattccgaagcaatatttgtcatcattacagtcttgccagagccacggacaccggtgatcatgtagatttgattggatggaatctcggcacaaaagctttccagaatttggtttgtttccgtgagacgggagatatattgcaacggtttttttccaaaagataacgtaaacggattggtactcataatgaaaacctccttttcttatattagtttatataacttttaaattcttatataactttatataagtgtatataactttgtaattattatataagtttatataacttttggcaagagatattgcggctatgggaaaggaatgcagaaggaaaatgtaaacgcttactcttcctaaatagacattttgtgagaaaatgtgcatattttataaaaaaataaatgttgcgcaaaaataatagctaaaacttgctcaaaaaatatatgaataacttccaaaaatattcaaaatacacaaaaatggtttactaatgtgaagcgatagtgctaatatatagtacatagtattgtaagagcttacaaatataatcgtttataacacatgctaagtggaggtatgggaatgttaggcaggagaggaagaaaagagagaaaacgactgatggcattgcttcttgcgggagccatggtgctgtcgggaatgggaatcagccccatctctgtacaggcagaggaaacggaaactgtagtagaacggataaataagacagtttctgacggaaatgcggaaacagccagagaagtgttgggagaggaagaaggtattgcggcagcttcgacaacacaggatgcgaatgcagcaatggctgctgtgcagagtggaacggaaaaagacctgtatgaatttgatctgagcaagggtctgacagcaggaacaacgtatgatggcggaatttctgtacttgaaactatgagttttaaatctggttcagctagtttagatggggtaaagtatacaggatgtgtacagggagataattcgcctaacccgaacaaaggaaaaattcctaccagtggtgcagcagtaaaactggaggcggaaaaagatggcagaatcaaagttgtatttaaagcaaaaggcaaagatatttattttttgcaggatgtagatggcaagccccaagggattgagacctttaaggcgggagcagacctgattgccaaaacttatgaggtggaaaaagggggcacttattatttatatgcaagtggtagtaagattatgatctatgctctgaccgtagattacagatcttccgtaagctgggatgacatagcagctcccgttctgggaacaccttttgtcaaggacggaaccatcaccgttccgtacactgcacagatcggtggaatctatgcaaaatctttggaagtgacgatgtatgatgctgatggtaatgcggtggagacaaaatccgttactgcacagggaacctctggaaatgcagagttccagcctgcagcgtccggcacttacagctttgaagcaaaactgataggagaaggcgagaatacaaaagcaagtaataagacaacagcaatagaatttgtattacctatggcaacgccgaagggcttaaatgctgagaataagggacacggcaatgtgaaactgacctggcaggcagttgccgaagcagagagctacaaggtatctgtggacggcacggttgttgaagaaggagtgactgcattggctcagacgatcaaaggattgacggtaggtcaggaatatacatttcaggtagctgcagtcagaggagaaaatgtatccactccggcggaagtaaaactgacaatcactgaagatgcagtgaagacctggaattttgcagcatttggtcagggcgttgacaacaaaacagcgaataacggttatagtggaagcctggatacaggtgatttgaagatctgggagaagaacagcaaaggaaagctggtagcagcttcaacggatggtctggcattctactacaccacgattgatccggcaacagagaactttacgttatctgcagatattacggtggacgaatggacatacaccaacggacaggaaggctttggccttatggcagctgaccgtgtgggtgagaatggagattccggtattttctggaacaattcctatatgctgagtgctacaaaggtggaatatctctgggatgccacagaaggcaaggtatctgatgccggagacaaatacaccatgaaacttggtatcggttcccaggaaaaaataggtgtaacaccggaaaatatgaacgacagtcctacagatcagggcttccggtctaccatgactactctggagaccagtgctgcaaacagcggaaacggcgcgggaacttataacatagtaggcaaatataccaattctgcagaagctgtgaaggatattacggatctgaacgtgcagaccactttccacatgactttgcagagaaacaataccggttatttcctgagctataccaatgtggaaaccggtgagaccgtaaccaataaatactatcacggcaaagacggagacgaactgaccagattggatgcagagaacatctatgtaggtttcttcgcttccagaactgcaaccatcagcgttgccaatgcagtgctgacaacaatcgatccggtcaaagatgctccggcagaatccagaccggtcacttatgtaacaccgaattatacgattgattctgcttctgtagccaacagtgcggattacgaactggtatattacggcaatgcggacggaacattgaaaattaccaacagtgacaatgaaaccgtattgtcagatgcgggtgtaaaggcaaataccaaggtatatacccatacgacactgaaaagcggaagcaacgttttccatgtagagtttaccccgaatgcggattacagaccttcagagtattctctgttgagtagctatgatacagtaacatttgactttacagtaaattataatgtaaagggtagaacggttatttatgctgctcctgagggaagaagtacgggaagcggtaccaacagtgatcctgtggatatttataccgcagtgaagagcgtggctccgggccagatgatcgtgttgaagggcgggacttatgcactggataagacggtgacgatagacagaggtgtcagtggaactacagatgccagaatctatatgattgccgatccggacagcacttctcgtccggtactgaatttccagagaaaatgtgcaggtatgatcctggcaggtgattactggtatttccagggatttgatgtaacaggttctgctaattccctcaagggtattcaggtatccggcagtcacaatacactggatgatattatggcatatagaaacggcaatactggtattcagatcagccgttacaagagcacagacggaagaagcgactggccttcctataacctgatcctgaactgtacttcatatctgaacgcagatgcgggatatgaggatgcagacggatttgcagctaagctgacgattggtgagggtaatgtatttgatggatgtattgcagcatacaatgccgatgacggttgggatctgttcgccaaggtagagaccggagctatcggtcaggtggtcattcagaactgcgtggcattcaagaacggttatgtactggatgagaacggacaggaagtagatgccggtaacggtaacggcttcaagatgggtggttccagcatcagcggacatcatattttgcgcaacagtgtatcattcggcaataaggcaaagggtattgattccaacagctgtccggatattgaggcgtattcttctaccagttataacaatgagtcctttaacgtggcattctatacaaatgacgcaaagaatactgcatttatagcaaaaggaatcctgtcctttaaggatagcagcaatgcagcagggcagacggttgcagaacagttcaaaccgaaaggaactcaggagaccagtgcctacgaaaatgcaatgaactattattggagaggcgaaaactctaccaacagtgaaggaatagcagctacagcagaatggttccagaacatggatatgaacagtgcaatccacggaggcattcgcagaaatacggacggtaccatcaatatgaacggtttcctggcagtgacttccgcagtaccggaaggtgttggagccagaatgaccggaaccccttctgctgtatttacggtagcggcagatgtggtgaacaacgatgatgacgatgacgacgatgatgatgacaacagcggttcctctgcagcacctgcagtagactggacggatgtaagcaactctgtacaggataaggtggcagagatgatgaaaaatcctgctattgcaagtgtcaacatgaactttgtatgcagcggtgaagtcaaggtgcctcagaatgtactgaataccattaaaggtacgaagctgacggtggcattccacagcggaaacggtgtggcactgagcatcagtggacaggatctgaagaataaagatctgtcaaagattcagaatattgatctgacagtagaccagacgagcaacacaatcccggcaaatgtggtatccgcaaagtccggaaccgtgaacagacagctgggtatcagagataccggcagcttcggagtgaatgtcaacattcatgtaaatgtaggcaaggacaattccggcaagagtgcaaacctgtatcgctataatacagagaagggacgcctggagtattgcggatcctttaccataacttccaccggacagtccatgttcgcattgaagcgcggcggcaattatctggtaactgttactgaccgcagaccttccgagagcatctggtatacagagggcggttatacggtaaagagtggtgatacgctttccaggatcgctaagagaaatcacatgactctggcacagttgcttcgcagaaatgtacagattacaaaccagaatgtgatcagagttggtcagaaactgaatctggaatgatcgtaaaaactgtaagagatagagaaaaaggacaagacgggaaactgaaaaacgagaaaaacggatggcttgggagggccatccgtttttttgtgtatatgatgagtcagcctactcgattggaaatattttattgcacctgattggggctcttctttccactttcgaaatccagagcattctgcaaggtagtctctgcaatggcttccagtgcttcttttgtgaaaaatccctgatgggatgtaatcatgacattggggaaggacaaaagccttgcggtggtagaatgctccagaatctcatcggaacgatcctcgaagacgtttttcgtctcttcttcatagacatccagaccgaccccggcgaacttgtgcaggcggatgccctcgataagatcctcggtcttgaccagagcaccccgggaagtgtttaccagaatgacgccatccttcattttcttgatggtgtcaagctggatcaggtggtaggtggaatccatcagcgggcagtgaagggagatcagatcactttgcgccagtaattcgtctaaggtcacataggtgacgaaatctttcagatccgggttctcgtagacatcgtaggcgatgactttcatgccgaaaccgttacagatccggcacatagctgcaccgatccggccggttccgatgattccggcaatcttaccatagaaattgaagcccatgagtccggcgaggctgaaatcattttcccggaccttgttataggctttgtataagcggcgattgcaggccagagccagagccatggcatgctctgcgacagcttccggagaataaccggggacgcgcatgacacatatgtcatatgcagctgccttttccagatccacgttgttgtatcctgcgcaacgcagcaggaccaggcggacacctttttcgtggagaatttttaatgtggcttcgctcacattggagctgacgaaagcacagacggcatcgaagccgtcagccagagcagcagtacggggatccagatccgaccggatgtaatcaatctggatgccgggaaattttttcagagttgcctcgaaagattctttatcatagcttttggtatcataaaataatattttcataacagtcctcctcgggttgatttttatagtatgtgtattgttatttttaatcatacttagatttggctttactatagctcaaaatatgggaattgtctatcatatttaaaaagtgaaatcgagaaaaattataaaaatgatgcagatatgatgcaatcggcagatatactggcatcaggaggcgaggattatgaaaaaaatattttttgcagcagtatttgcgggagcactgttaggttttacatcctgcggaaaccgggagatggtgacggatccggagatggagacagttatagacagcatcaaggagacacagagcggtcagacgacggaagagacgacggccgggactgaggagactgcggaagtgtccacacagacggaaccgacagaaggccagagtgaaatacagggaagtgaatgggtgcagtttaccacagaggatcacgagggtagcagtgatcccgaagacaagaccagaagttatacctattactatccaacagttacagtgacgattccgggcaatgagacggtgcagatgaagattcagaaagagctggatgaatatgtagacagttttgtagaaggaatcgagaacggggagtttggtacactttatgaggatatgccggtgtatgagcagagctatgaggatcttactttccgtgtgatccgcgcggatgataaggtgatcagcctgtcgtgggggctggaagggtatgatcagggggctcatggatggtataccttgtactatatgaactattatacgcagaccggagagagaattacttttgacagtctggggagcggattccgcgacaaagcactggaactggtgacagcaaaggcagcggaaatgcaggcaaaggaggactgcttctttaacgattacgagaagagtatcaaactggtggtgttggatggtacggaagatttgaatgctatctatcaggaaatttatgggccagacattgcaggtacggataatggccccgcagaccctacattctacattacagaggatggctttgtatttgaatccggccagtatgtattacagtcctatgcagttggaattgttgactttgagattccggcagcagacttcggggatgatctcacagcagatattttttaatggagtacaggatgctggcgggtatatttgcaaaatatgggcctttacatgggcgggcaccgtgtatataataagaacatcgggaatgaggttctcccggaagcacaggcttcgaaccgccggaatttgaacatacgaattcgatttggctgatgacttctgcagaatatgcaggggacaccagccttttttgttggaattcaaaatgtcctgctgcgagaaaacggaggaatttttatgcttacatcactgggactgatctttttactgggattactcatggcggcggtctgccagaggattcacctgccccgtattatcgggatgctgcttacgggtattattctggggccttatgtgttggatctgctggatgtgtcaatcctgaatatctcatcagaactgcggcagatcgcgctgatcatcattttattgaaggccggattatcattggatctgaaggatctgaaaaaagtgggccgctccgcagtcatgctggcttgtgttcctgccacttgcgaactgttggcttttgtgatatttgcgcccatgatccttaacatcagccgcgtggatgcggcagttatgggagcagttctggcagcagtgtcaccggcagtggtggtgccacggatggtgcatctcatggagaacagctatggtacggagaaaagcattccgcagatgattctggctggggcttcctgtgatgacatctatgtcatagtattgttttccacttttgttggaatggcacagggtggacaggtcaatgccctggattttgtgaatatcccggtatcgatcctgacgggtgtgttgttcggtgcattggtgggttggctgctggggcagctttttgaactgttgtaccgaaagggcagttatgtgcgcaacagcatgaaagttattatcatcatgggtttgtccttcttattaatggctttggaaaccctgttaaaggggaccgtggcgttctccggcctgctggcggtggtgagcatggcctgcgcgctgaaaatacgggcacctagggaagtcaccggcagactgtctgctaaattcggtaaactgtggctggcagcggaggtagtgctgttcgtactggtgggcgcggcagtggatatccgctatactatggaagctggaccggcagcggtggggatgatcctgctggcgctgctgttccgttccgccggtgtagcactgtgtatgttgggaacggatctcaataagaaggagaggacgttttgcgtgatagcctatctgccgaaggccacagtgcaggctgctatcggctctgtgccgttatcgatgggattgtcctgcggcaagatcgttctgtccgtggctgtgctggccatccttatcacagcctcactgggagcactgggaatggatgccacataccggaagctgcttcagaaaaatggagaaaataatatcatttgacagccatccggcacgtgatcgagtcccggaaggaagccgcaaaaacgtccacaatatctacaccataagaaccgcaggcacgctctcgctctggcgcagaacgtagcggtacataattgaccccaatacggtcaataagtaccgacgtctgcttacggcctgcttgtccttatggtgtagatgttgtagcgcaaactacgaatatccaatgcaaacccccggcagctacaacaactgccgggggtttaaggaggatagaaatcgttttaaactatgtttattagaactgttaacccatggtaatgactacatcgtatgcttccttgcccttttcgtaaggaatgatgtgtccgtctactgccttgccgtccacggtcatggatacgacacccttttccacgttctgagggttctttacctgaatgtgataggtgccctcacggaacttacgggtgatggagaaatcaccgaagcccttgggaatacaaggatctacggacaatccctgatgagtgggatatacacccagtatgtattgggagatatttacgaaagtccatgcagcagtaccggtcagccagctgttctttgcctcgccgtggaattttgcatccttaccggctaccatctgggaatatacataaggctcggtacgatggatctcactgatatcctcaatgtatgcgggacaggtcttgcggtagatctcgaaagctctgtcacctctgcccagaacggtctctgcgatggatacccagggattgttgtggcagaagataccggcattctccttatatccggggggataagaggatacttcaccaagttcgaggtgatactccgtgtatgcaggttgtaagatcatgacaccatacttggtatccagtctctcttttacagaattcaatgccttttcggcaagtccttccttcacaccgacaccggccagtacgcagaagccttgaggctcgatgtagatctgaccttcgcggcattccctggaacctactttgtggctgtaagcatcgtaagcacgtacgaaccaatcgccgtcccaaccatccttcaggatcgcatcgtacattgcctgtacttccttacgtgcgcgggctgcttcggtatcgtcacccatcagctcgcacagctgagcatattcttcgccgtattttacgaacataccggcaatgaatacggattctgcaacgggtccttcactgggaccgaaggtctggaaagattctccgggatgagcggagaagcagttcaggttcagacagtcattccagtcagcacggccgatcagaggcagattgtgagggcctttgtggttgatgatatagtctaaggagcgttttaagtgatccatcagaggagcagctacgctcatatcgttgtcaaaaggaaccatctgggtcaggatggaggtatcgccggtctctcttacataagcactggtacctgcaatgagccacagaggatcatcattgaagccactgccgatatcggagttgcctttcttggtcagaggctggtactgatggtaagcactgccgtcctggaactgggtggaagcgatatcaatgatacgctctcttgcacggtccggaatcagatgtacgaaaccgagcagatcctgacaggaatcacggaaacccataccacggccgattccggattcgtaataggaagcggaacgggacatgttgaaagtaaccatacactgatactggttccaggtgttgaccatacggttgactttctcgtcagcggaatctaccgtgtagcgtgccagcagctgtttccagtaagcctgtaatgctgcaaaagcctcatctacctgtacatcggtctggtattttgccagcatttctttggcacgggtcttgttgatcacaccgtaggattcccatttctcgtcttcggggttctcgatgtagcccagaacgaagataaaggtcttggtctcaccggctgccagatccacgttgatctgatgggaagcgatgggagaccagccgcttgccatggaattcgtgcacttgccgttctctacagcttcgggagaatcagcccccctgtaagcacccaggaaagcatctctgctggtatcgaaaccatcaatcttcgtatttacggaatagatcgcataatgattacgacgctcacggtactcggtcttgtgataaatggtggaatcctgtacctcgacctcaccggtgcttaagttacgctggaagttcttcatatcatcgtcagcgttccacagacaccactctacataagagaatacggacagcttcttgtcctcggagctaccgttggtcagggtcagctgggagatctcgcaattatcgttcagaggaacgaaggagagcacggaagccttgacaccgtttttggaagaggtgaatcggctgtaaccgataccgtgacggcactcgtaagaatccagctcggtcttcgtgggctgccagccagggttccatacggtgtccccgtccttaatgtacagatatttaccgttgatgtcggccggtacgttattataacgataacgggtcagacgcagcagctttgcatctttatagaaagtatatccgccacaggtgttggatatcagactgaaaaactcattgcagcccaggtagttgatccagggaagcggagtcttgggagtggtgatgacatattcctgatgcacatcatcaaaatgaccatacttcataagaaaatctccttctttcatattattgtatactgagtgtttgttttttcgttgtggagcgctttatgttcagtaaacgattaagtgctccggatttctgatttgtattatacagaagcaaaggggaaaatgcaatacgaatcttgaaaaagcccgtaaaatgcgcaatgtatacaaaaacagcagaaaaacatggacagaagatacaaaacaaaacggacttcgaaaaaaggatttacgaaacaaaataatagcaaacgttatcgcacactttgcctttatatagaagaaacacaatctatgtacaagccaaatgtacaaaacagcctatctgaaattgttaattatagacaaagtggatacttttttgaaaaaaactgcaaaaaagtattgcaaaatgctcaaaggtgttatatattaaaactacgaaaacgattaagttacaaaacaggtcggacggaatgacgaagacatggaacaggagaaagatatggcatcactgaaagacatttccaagatttgtggagtctccgttgcaactgtcagcaaggcattgaacgaccacaaggacattggagaagaaacaaaagcaaatatcagacgggtagcaaaggagatgggttattccccgaacctttccgcaagagctttgaagacgaaccgaacctacggcatcggagttctcttcgcagacgaggccagaagcggtcttactcatgattacttttccagtgtactggacagtttcaagaggacggcagagaaaagcggttacgacattacattcattaatagctgcaagaaccggccggatcggatgtcctacctggaacacagcaggtacagaggcttcgacggagtggtgctcgcctgtattgatttcggggatcccgaagtcatcgaattagtacagagttccatcccggtggtcaccatcgactatctgtttaataatcgtatcgcaatcatgtcggacaatgtgacaggcatgaaggagctgttagagtacatctacagcagaggccatcggaagatcgcttatatccacggagcgatgtcggcagttacctcgggacgattatccagcttctaccggacggcagaacgcctgggactggaaatcccggatgagtacattcgggaagcagcctacagagatacgacgaccacctaccgggtcaccaacgaactgctggatctgccggatccgccgacatgcatcatctatccggatgactttgcttctttcggaggcatcaacgctatcagacagagaggattacagatccctgaagatatctcggtagcaggctatgatggcatacaggcagcaaggcagttggagcccagactgaccacagtccaacaggacacagaacagatcggatgcctggcagccagagaactgatcagtctcattgagagacccaagaccaccatcatagaacaggtcatcgtacccgggaaagttgctgaaggcaagtcggtggccagaattccgacagacaattaatcaggcatttatatggaagcgacgcaaccgccgacatatgaatataaatgcaacaaacacttacaacaaacattcaacaaaaaatgggaggaaacaaacatgaagaaaaaagtacttagtgctttacttacaactgctatgcttgccagcatgctggtaggttgtggcagcagcaatgaagctcctgcagcatccaccgatgcggcacccgcagcttccaccgaagctaagaccgaggcgcctgcatccaccgaggcagcagagcctgcagcagcagaggaaggcaaagtcttcaacatctactgctggaacgaggagttcaagagccgtctgacagatcattatcccggatatgaagaagtagacggaaccaccggtaagatcggtgacatcactgtaaagtggaacatcactccttctgatgacaacgcttatcagaacaatctggatgaaacactgttaaagcaggctgatgcagcagctgatgacaagatcgacctgttcctgattgaggctgactacgcattgaaatatgttgataccgactacacaatgcctgttaaggatctgggcatcaccgatgcagatctggctaaccagtatcagtacaccaaggatgttgttaccgactccaacggcaatctgaagggtgtttcatggcagggctgccccggcgttctgatctacaaccgtgaagctgctaaggctgttctgggaaccgatgatcctgcagaggttcagaagtctgtatctgattgggatacctttaccgcaaccgctgagaagatgaaagcaggcggttacaacatggtatcttccgtaaacgatacttatcgtgtatactccaacaacgtatccggtaaatgggtacaggatggcaagatcgtaatcgatgacaacctgatgaagtgggttgatgactccaagaagatggttgacgctaaggaaaccggtaccttcgacctgtggtctgatgactggagcaaaggcttctatcccgatggcaaagtattctgctactttggacccgcttggttgatcaacttctccatggcagctgataccgatggatctatcgcaaaccagggtggctggggcgctactgaaggacctcagggcttcttctggggcggtacttggatctgcggcgctaccggaactgacaacgcttctctggttaaggatatcatccttaagatgaccgctgatgaagacatcatgaaagagatcgttgtagctgatgatgatttcgtaaacaacaaacccgctatggaagctatggcagcagatacctcttatcagagcaaggtactgggcggacagaaccctctggctatgttctgcgcaggcgctgagaagatcgatctgagcaacctgtctgcatatgatcagggatgtaacgaagagttccagcatgctatgaagaactacttcgatggcaaggcttctctggatgatgcactggatctgttctacaagggtgttgaagagaagtatcctgagcttactcactaatctgaaacgataagcgaatagcgaaacaataaggaattgagaaccgtgcctgcctggctggtcaggtaggcacggtttttctctcaaaattcccggttggcagaagcttttttcggaagaagataattaagaacaaaaagaagagagctgctgcgagccttatcggaaaaaagatggcacgaaaaaacgtaaagtcgctaagagagtatgacggcaaaagggaggaatcattatggcaaaggtaaaacgcggaaaggtggtacgctataataagtggggttatattttcctgatcccctttgtggcagtgtatgtattattccagttgatcccgttgttccggacattttattacagcttttttgagaattaccgttccggactgacacagatcggaccgaatttcatcggatttggtaactatgcaaagatgttgtccaatccggacctgtggatgtacaccaagaatacattgatcatgtgggtactgggatttgtaccgcagatcatcatatctctgcttctgggtgcatggttctcggatcccagccttagattaaagggacagagattcttcaagacagttatctatctgccgaacctgatcatggcttccgcatttgcaatgttgttcttcacgctgttctctgatggtggtcctatcaatgaaatgctgatgcagatcggagtcttaaaagagccatatcagttccttacaaacgtatggagtaccagaggtctggtagcattgatgaacttcctgatgtggtttggtaatacaacgatcctcctgatggcaggtatgatgggtatcgatacttccctcttcgaggcagccgaggtagacggagcaacctctacccaggtattcttcaagattacattacctttgttgaagccgattctgatctacgtaatgatcacatccctgatcggtggtctgcagatgttcgatgtacctcagattctgaccaacggtaagggcgatcctatgagatccagcatgaccctgatcatgtacctgaacaaccatttgtacagtaagaactacggaatgagtggtgcgttgtctgtaatgttgttcattatcacaggtatcctgagcttgatcgtatttaagttctcgaacggcaaacaggataagtaggaggtggcagaaatgttgagcgtagaaacaaacgagacaaaaaaaggtctgggcattcatgccagaagagcacttgcatatatcgtactggttattatgagttttctctgcctgttctggttctatatactgtttgtaaatgcaaccagatccaaaggtgagctgacacagggatttaccctgctgcccagcacacatctgatccagaactggaagggcgtcatggcaggaaccctgccggtagtcagaggcatgatcaacagtttgatcgtagcaacctgcagtgcagtgttgtgtacctacttctctaccatgaccgcatatgcgatccatgtatatgattttaagttaaagaagttcatgtttacctttatcctggcaatcatgaccattcctacccaggttaccgcactcggatttatccagttggtagctgatatgaagctggaggataactttatccccctgatcatcccggcaatcgcagcacctgctactttcttctatatgaagcagtacatggaaagtgcattgcccctgtctctggtagaggcagccagaatcgatggttccggtgagttccgtacatttaattccatcgtattgccgctgatgaagccggcaatcgcagtgcaggcgatcttcactttcgtagcgaactggaataactacttcacaccggcactggttctgcatgatgacaagatgaagacattacctatcctgatcgctcagctgcgttccgcagacttcctgaagtttgatatgggtcaggtgtatgtaacgattgcattctctatcttccctgttatcatcgtatacctgttcctttccaagtacattgtccagggcgtggcaatgggaagcgtcaagggttaatatttcgccagcaacattcaatacataaatctctcctgaaaagcggcactcttccccggagtggcgcttttcgcttgcaaaaaaacggggaaacgggtataaaataaagagaagggtgaatgcgtattttgaggaagaaagaggtaattgccatgcagatgtatgaggtgacagcactggcaccggaaggaccggaggaagtctatcaggcgatggtgtttgcagaagatgaagatgatgccttgaaccagctggaggaacagctgaaggagcagggtattgcccatggaatgtgtatggcggaagaagtgtagtgtaaggtgtgaaaagaacttctaatcactcagagcaaaggctctttcgcgaagaagttctatgtttcacacgcaaagtttgcgccaatgcgcaaactttgcaggttatggaaggatgtgagtgttgcaaatggaaaattcctatcgtttttttgagaataaagattgtaaatatttcccctgccacaagggacttgcagatttcaactgcctgttctgctactgccccatgtaccgcttggagcactgccccgggaatcccaggtatttcgagaaaaatggcagacggatcaaggattgctcgggctgcaccttcccgcatgatccggagcattatgatacgatcatgcagattctgcgggagaattagacactgtccgacagctgcagcgaaaatggtagcaggtccggcgggagattattccgccggtatccatccgtcctcgccgacgaggacgttttctttggagaaatacgtctccacctccggatttacaaggcatctggagagagggctgcgtccggaacagtccgcaccgggaccgaagttcccatattcaatataatctgacaacacttctgcacgaacttttccccagttctgccagccttcgggacagatatgatcccccagctcacaacagataaacgctgtcttcgcgcagtctctccagggacgaccgagatagacggagtccggctcctcgcctgtgatccgacaatgcgagaatacaagaccgaattcctgtcctgcgggagtgctggcggcggtgatatatgcttttccctcgctgactctggcgatggaatggatctcacagtgatcgaagaatgcagtattcggtccgaagatatagtccacatcgccgcagacataacaatccttgaaataattccgatagaacttatgcacgatcggcacttctgaagcctggaagaagtccggcagcatcagtttcttcatattacaagtcatcggatctccgttgaagattgtatcctgccaccctgtgaaacgacagttgtaacagctcaaccggtcggctgctgcatagactgccagcgcctgcccagcgagatatccgggaccggcggtgctctcaatcgtcagattccgcagcgtaatatctttcccggcgataaaaattaccgccgtattaaacgttccatactctccggaggcgtccggacggggcttctttgcaccgtcgccgtaacggaagacggtcgtcaggggatcatctcccacaatctcaatattttctttgcggataaataacttctcttcatagatgcccggtgccacctcgatccggatcgcctcatcatgacgatcgtcgatggacaggatcgcctcctgtaacgttgagaacgcggacgggtcatttttagatacgtgtatcgtagtcattttcttaatattcctccttgatcaatctctgatagatcttaaaatttcaaaaacaattgtaaatactgggtttcagcaacgcaattataaaaaaatgaactgctttcaaattcttgtcatttgttattttttgagattatttgaaattttttggattgagaatctctccggaggcatgatatgtataatgcaacggacggacacggcgccggattacagagaggaggaaatgcaatgcctggaaaacaaaaagggcaggtcgtaaacagaccacatgggaacaataaagtagcggaacactttcgcaaatattatcagttatggctgctggcacttcccggaatcgcacttacattgatgtttgcctacatccccatgtcgggactggtcatcatatttaaggattacaattttaaggacggaatcttcggaagcccttgggtgggattgaaaaactttgaattcttcttcgccaacttcagtaacgcatggagggcaacgaagaacacgattatcctgaatcttttttataccgtattcggtacggtggcagcggtagggctcgcaattatgttcaacgagattcgtcacaagaaattcctcaaggtcagccagtcgctgtcgatcatgccttactttatttcatgggtagtggcaggtggtattttaagagcactgctcaattacgacggcggcgcgatcaataacttattggtaagcattggcttcgaacgcctggatttctataacgatccgaagtactggagagtcatcctcaccctgtgcaatatatggaaatccgcaggatacaacggtatcatctacttttcgacaatcgcaggcttcgacacctcgctctacgaatcggcgcaggtagacggcgcgaacctctggcagcggatctgttacattacaatccctctgctgaagccgacgattatcatcctgttcctgctgtccatcggtaagattatgagcggcgacttgaccatgatgatgtctatcacaaatctgtctccgatgctgttagatacgacagatatcatcgatacttacgtatatcgttcggttatcggtgtaggtgactttgtaatgggttctgccgtgggtctgtaccagtccatcttcggttttattctggtactgttctccaactggctggtaggacgctttgacaaggattatcaattattctaggaggaagatcatggaaaaacagaaaaaaataaaacgttgtgcctccgacagggtattgattacaatattttacatactagtagcgattttcgcaattgtatgtctctatccgctgctactcgcgatcggaacctctttcgcggatgaagcctccgtaacggtcaacggttaccgcgtcatcccgaaaaagttcagcctctcagcgtaccagatgatcctcggatccatgggtaaaaacctgttgaatgcctatacggtgaccattggcgttacagtattcggtacacttctctcggttcttatatctgcggcttttgcctatgtgctgaccgtgagagagttcaagcctaagggcgcattgaatatgttcctctacatcccgatgatcttttccgcaggacttctgccctggtacatcatgtgtaccaaatattaccatctgacagacagcttcctcgcactggtgctgccctgctgtatgaacgccttcaacgtgttcctgctacgcaacttcttcaagtccatcccggaggaactggcggaagcggcgaagattgacggggcgaactatctctgcatcttccgagtgatctacttcccactggcaaaggtaggtctcgtgacggtcggactgttctatgcactgagctactggaacgactattatctgtcactgatgtttatcaataaacagaatatgtatcccttacagtactatctgtacaatatgctctccaacgtacagttcatggcaaatcaggcgaatgcctccctcggatacaacatcaatattccgttggagacgaccaagatggcaacaatctgtgtgacggtcggaccgatcatactactctaccctttcgcacagaaatatatcaccaaaggtgtgatcgtcggagcagtcaagggataacacaggattattaaaaaaggtttctaaaaaatagcaacatagagtacaataaaacataggaggttacttatgaaaagaaactggagtaaaaaagcactttccctgctgatggcaggaaccatgatggcgggactggcaggctgcggttccgatgcagcacagaatgacagcagcgccgcggcatccgccgcgcagagcagtgccgcacagagtacggatgcgagtaccagcgacaacccgctgcgtcccgatactctggataccatcacggttgtattgttcggtgaggaatctccccgtatgcagcagttaatggaagaaaaatatcagcaagtatttattgatgagatcaacaccaaggtagaactgatgtatctgccctggaccgagaacggcgcaggtggcaaggttgacctgatgatcgcttccggacaggaattcgatgcctgcatcgtagatcccacttgggctgccagcagctacagcaagggttatttacaggatctgtccgatgtgattgacaaatatctgcccgactggcacgagaatatgaatgctactgcattcgacgcttaccgttatgacggcggtgtttatgcaatccctatcggtaacaagccgaccgccggtgtatacaataccgtatgtgtaagacaggatatcatggatgccatcggcatggacaatatcgcaacgttagacgaccttaccacatatgctgaaaaagcaaaagagcagtacggcttatatgcgacctacgagctggcagatgcagcttacatcatccgaggtaccagcgaccgcaatctgattactgtagacaagagcaatctgtggatcgaccaggataccaaggaattcgtaagcctcgtggattctccggagtttgaggcagctgtaaagctgtacaataactggtacaacgagggactgatcccaaaggatattttgaccaacactgtaaccctgcctttccaggcgaacatgagctctctgatgcgaggaacctgcggcactaccctgatcgagaacgagccgggtctccagacggtagtacccgaaggcaagactgctgagtactatatcagtcccgataagccgatctacaaaaatagttacgagaacacagcattccaggtacccgtcacatccgacaaggctgaccgtgtagcgatgttcgtgaacctgttacagaagaataccgagctggcaaacctgtttgcatatggcatagagggaaccgactacgagctgatcgatggtaaagtatccaagataaataacgatgagctgttctatgagtggatgatctacaacgtaaatatttccaccccgagtactgcttataccgatgagtttatggaagtatataagaactgggataacggcgcaaagccctccgcaaccttcggcttcaatattgattactccaatatcaagaccgagaaggcacagatcgacagcgtatgggatgaacttgcaaagcccatgctggcaggtctgaaggactatgactccaatatcgacgaactgagatctgcactgaaggcagcaggctgggatacctatgtagcagagatccggaagcagtacgacgaatttctggctaataaatgattttcgggctgcctgttcttgcaacaggcagctttttttcttaaaatagagatgattaaaatagataataaagattatgaggagatttcgggatgaacaataaatggcagaacgcagtccggagcatggagcagcggatggaaagcctgcggttaaatatgcacggctatcagatcctttatcggggggagttgatcggcgaacattactgggagtcttttcatagggacagcctgcaccggatgtattcgattacgaagagcttcacctcgctggcgacgggactgctggcagcggagggcaagcttggcttagacgatcggatctgtacgtattttccggaaaagctgccggagggtggcgcacatccatggtgcgaagaaatgacgatccgggatttacttacgatgcgtacctgttatgaatccacgacctttaaacgctatgacggtgactgggtggagtcctttttccgggtgacaccggatcatgtgccgggaacggtgttcaattacgacacatcggcgtcccatgtgctggcggcgctggtggagaagctgacaggtatggatatgttggactatctgcggaaaaaggtgcttcgcagggtcggattctccgaggaagcctatattctcaaggatccctatggtgttagccagggcggcagcggtcttgtgagcaagctgagtgaccttgcggggattgccatgttatgctgccgcggcggtgttttgggcggtgagcagctgattccggcggatttcctgcgggaggcgaccgcttgtcaggtgccgacgaatcttcagccgacgtttgacgagcagctgggttacggttttatgatgtggaagacccgttatgatggttttgcattctatggaatgggcggtcagctggcgctctgttaccccgaacgggatcttgtattccttacgatggcagatacgatcgggaatccggcgggactgcagatgatctatgactgcttttatgatacggtatatcctgcggtgacaggaatgccggaatatacaaatacacaaaaactgccagccggagagagacggcgcggtgtagagcactggcacttttatggaatgcaggacaaagcgggagcagcctgcgattccagtggttgggagacggttgtctttgactgggagcaacgtatcataatacttgtgtcagcagagaaaacctacgagtggtattatggtgacgacacatgggaataccagaagttcccggagacagactatacctgcatgtgccgtggacagtggatgttgggacattttgtatttcatagctttcttattgatgaggaggaagggcacgttgcgatggactttgcgtggaagggtaatcggatgagtgcccggctggtaagcacttcggaaccgccgtttgtaaaattaaaaggcttctgggcggcggagcagatagaataagtgtaacaaaagattcagatggagagtaaaaattcggatgaagatagttcagaaatacagaggaaagatcattctgaggagaatatttgcggtgtgcttcggactggcagcagtctgcattctgctgtcgtgtattctcggctttgggtggttccgtgtgtcgcagatccagcaacaggagagtgattacgagagccggatggatacctatgtactggtattgcagaattacggcaaatccatggagaatgtggtaacagtgctcgaaaatgacgtctatatccgcaagctgatcaaccggaatacatttacatgggacaacaccgcggggatcgcggcgcaggaggttacgaatcttgtttctgtgaatccgatgattcactccgtctatgtctggctcgaggacgattatctgatcaaaagcacaaatccctcctatcccatcgaccagaacggggatgcgcggatgctggatattttccagatgagcacgtttcacgagagtgcggtcattccatatctggatatctatggaaagagccagaacctcctctgcctgactagcggatcgatggatcccaccactgggggcaaacgcagcggcatccaagtcaacatggatctcgacaagatcatgacctcaaccctgccgaagacggaggaggaacagttcctgctgatcgacagggacgggaatatcgtttatgagcagggaacgcgggagatgtaccgggtcggggaacgtctggaggatattctgtggaaaaacagaaatctgaccgagacgtccgccgagattgtgcgcacggcgcaggggagattcctgtccgtagctacggagattgatgacgaatttacgctggtatggctgatttcctaccgacatctcaccggatcgatgacccgggtcggcttcctctttttgggaattggtctgcttgtggcgatcatcgtactacttctcgcgctgctgatgtcgaatcgtgtatacaatccgatcggcgagatggtgcggactgccagcgaggagggattgccctccgaggcaatggcgagacagctggagaatacggagctgtacagcatcgcccagacctatcagacgatggtgcagagactgaaccatatcaacctgcgcaaagagcaggaggatcttgcagcttatctaatcagcagagagaaaaccgcaaaattgccggagtgggtggaagagatttacgccaagccgggtgtccggattcgtgtcgtggtcatgcgcctcagcgatatccaggatctgcacagtaataacacggaagaagcgatcgcttttgagatggagacgatcaagacgatcgtcgagcagacgctccgtgagttgggcaacgtcctcgttttgccggtagaccgtgagtttatcgcggtgattctgttcagtgaggagagcgtaacggaggaacgtgtgacggtggcgtcgcagcatatccttgaagtcaccggagagctgatccatatcggcatggatgtgggaatcagtggagaaaagggcgaaacagagggatttgcggagttaaatctcatgtatcagatggcgcgggcagcgacagcataccgttttatctatggtatgggtgcggtggttacggaaggagagatggcgcagagggcgttaaatggggaacaggcaccgtcatcagaagaattgatccagagactccggcagagtgatcggacaggcttttcagcggagtaccgcaggattgtcggggaactcaaaaagctatcgatccagaaagcgcaggatgcactgatggagatcgctgggcagatgcagacctaccggaattcgttgcaataccgttttgaaccgttgacgaagaaggattacgaggtactggcgggacaactggcatcctatgaatatatggacgatgcggaggactggtttttccggatggcagaagaaatctggctgatcctcgagcggaatcggcagacgggcagagaggacgttgtggagaaggcgatagcgtatttgcagagcaattatggcgatccgaatatcagtgcccagtatcttgcggacaaatatcatattacaccgtcctatttcagccgcctcttccatgaaaaatgcggctgcacctttcctgactatctggtggcgctccgcatcgagcgggcgagagaactactcctcgagcgggagaacctcagcatacaggagatctgtgagcttgtcggctacagcaatgcatcctattttacgaccagctttaagaaaaaatacggcatgacaccggggcagttccgccggagccagcattaaaccttagcgaatgatgctattgagtggatgagaggaaaaagacatgatgaaattatatgatatcacggagaaaccgttgaaaatctacggtctcgctgtggcagacagtgagaaaagacattttttcaggctgcccgaagaggcactggagcgcttcccacagtacggctacctcggaagaagagctgtcggcggcagagtccgctttcagacggatgcaaagaaattatatgtaaaaatgactcttgcgggtacgaaagaggatatcaatattccgctgtccggctcggcgggcgcagatatttatctcggaaagggcacagaggcgacatatctcggttacatcgcgccaaagatccatatcgagggcgagattacagtggagaagacttttgacctcacgggagaggaggtactcgtaacgatcaatctgccgagaaatgatcatctccttgagatgcagatcggcatcgaggagagcgcgaagctatgggaagcacccgagtataccgtggaaaagccgatcgtattttacggttcctcgattacagagggcggatgcgcaccccgacccggaaatgcttacaccagtatcgtcagcagatggctggatgcggactaccgtaacatgggtttttccggcagcgcacgaggcgaagaggatttcgcggaatatcttgcgggatttcccgagatgagtctctttgtcatggattatgatcacaattcgccgagtccggagcatctggcggagacccatgcaccgttttttgagatcatccggaaagcgcatcctgatgttccggtgctcttcctcagccgtcccgataccgatgcggagccagaggacagcatctgccgtagagatgtcgtccacgctacctacgaggcggcgaaacgcagaggcgatgagaagatttggtttgtcgacggacatgagctcttcggcaagatcggacgccctgaatgcaccgtcgacggctgccacccgaatactctgggtttcctgcgcatggcggagcagatttacccggttatgcaggaaatgctgaaaaatgtctgatctattttagaaaaatatatttatagtaaatctctggtcttacatacaagatacagtggaagattggtgatgtcaccatccttccggtagccgcgtttggaaaaacgtaaggctgcagcagggtgattttctgcaacatatcttttgaaagagggagcggatttatcttccccggctttcacttccaccggaatgatatcggttccgttttgaagcacaaagtcaatctcgctgtttttatcagagtagtaccggggagcgatttcaaattgtccctgcaactgctgtaaaatataattttccgttaatgctcctttgaactggtagcttgattttaacagaatggcactgttgtcgataccggccatatgcttaagcagcccggtatcaaagacaaatagtttaaactgatccagcttgtcgaaggctgaaagtggatgctccattttggagacattatatacgcgattgagcattcctgccgagaccagccattcgatagcttcttcaaaatctcttgcccttcctccttcgcggacagcaccatacataaatttctcgtttggctttgcaagctgagcaacgatactgcggaatactagaagaatacgaccactgttgatcttcccgttatgctttgaaaagtcattttcatatatttcgattaactcccgttgtatctgggagattcttgccggatccttgtatttgatccaggaggatacgcactccggcattcctccgatgataaaataataattgcatgcttcagatagacgagagtgaaaaatctcttcgatcgtttgctctttttgaatgctgtcataataggtatatagggcaggatccgtagcttcgagaaattcgtcaaaagtcagtgggaaaatatcgagtagatttaccatgcctaccggataagattttggctgggctaaaatggttcccaacagacttccggcggaaaccacatggtattcgttcgctttttctttaaagtatttcagagtgtttaaggcctcgggacattcctggatctcatcaaaaaggatcagagtctcaccgggttggattttttcaccgcttatcatggacaacaattcgataatgcggtgggggtttttgttcgcctgaaaaatggattttaattcatcctcttcatcgaagttgaaatagacataattagcatagcaggtctgtccgaattccttcatcagccaggttttacccacctgtctggcacctcgcaaaatcagaggctttcgttccgggtcgtttttccagtttatcagggattgcattgcatttcgcttcataaatacaccgtccttttcgggaataataatagcataacacatttttctgaaaaataaacaactgttttgcacatttttctgaaaaaatcaaataccaataatcacatttttctaaaatacaaaagccgatagtctgttttcgcagattaccggctttatttatgcgcggagacggtgggatttgaacccacgtgcccgaaaagggctaacgcatttcgagtgcgccccgttatgaccacttcgatacgtctccaaaagattacaacgtagattattttatctgaaaaatgccggtttggcaaggggagaaacgaaaaaaccttttgtaatgagattgttactgcctacgtgataataaggttgaaagcggtagttataaaaaaagatgttgacagaacaacatctaagtagtatattgcaaataaatactttgataatcaaagtattcgcagggcaatgctgtacgatatagcgaagccaaagcaattgtgccgaagagaacaaagcggcaaagacagaatattaaaaaagaatgcataaggagagcaaaaacatgttagagaaagtagcagctatcatcagagaacagttaaaccaggagaatgtagaaatcacggaggcgacccgtttcaaggaggatctggaagtggactccctggatctgtttgaactggtaatggtgtttgaagaggaatatggtgtgtccattccttccgaggaattggaaaatatggcaacagtaggtgatgttatcagatatattcaggagcatgcgtaagaacggcatatctgactgaatgcaagaatccgcaggcatcaaattcgggggcttttgaccccgacatcagaatatgtaatataacgcagaatgacgagaaggatcagaaagacaatgaaaacaaagatcacggaacttctacaaatagaatatcccgttttccagggcggtatggcatgggtggcggaacataagctggcggcagcggtatcaaatgccggaggcttaggcatcatcggtgccgcttccgctccgcctgaggttgtccgggaggaaatccgtaaatgcaaagaactgactgacaaacccttcggcgtgaatatcatgctgctcaatcccaatgcggaggatgtagcgaagattgtcgtggaagaaggggtaaaagcggtaacgactggtgctggaaacccgggaaaattcatggaactgtggaagaatgccggagtgaaagtcattccggtggtggccagtgtggctatggcgaagatgatggaacgggccggcgcagacgccgtagtggcggaaggcatggagagcggcggacatataggttccaccacgaccatggcgctggttcctcaggtggtggatgcggtatcgattccggtgatcgcagccggaggtatcgccgatggcagaggcatggcggcggccttcatgctgggggcagagggaatccagatgggtacccggttcgtagcatccaaggaatccatcgtccatgaaaattataagaatcagatcatcaaggcaaaggatattgattctgtagtgacgggaatgtctaccggacatccggtgcgttctttacgtaatcagatgaccagggagtatctgaagctggaaaaagagaatgccgatttcatggaactggaaaagctgacgctgggatctctcaggaaggcagtgcaggacggagataccgtaaacggaacactgatggcgggacagattgcaggcttgatccgcagagaacagacctgccgtgagattattgaagaaacagtgcagcaggcgcaggagtgcatagcggcacaaggacagcataaataaaatatagcgacaggtaaccgctgacaacagatttcgaacagcgacaggcggcgtagttatatggaaaacggcgcattataaaaaatgtgctgtaaccgaggagaacaatagcatcacatagtaattaggagaggacaaaatgagcaggatcgcatatttattcccgggacagggatctcagtacataggaatgggaaaagaattctatgatacatacccggaagcacaggcagtatggaagctggcagacaaggtgcttcagaatctatactggcaggataagcgggaagtacaggcggaaagcggacatccgtactccatggaacagctgacctttgaagaaaatccctatatcaacattacggaatacacacagatcgccatgctgaccatggaagtggcaattctgaaagtattggaggcaaaaggactgaaagcggagatggcagcaggcttaagcctgggagaatatggggcgctggctgccgctggtgtgatggagctgccggatctgttccggatcatccggatgcgtggtatctatatgcaggaggcctatccggaaggcggagccatggcagcaatattaggactggacggagataccgtggcaaaaatctgcggacagacagcaaaagaaaccggcaaagttgtctcggtggcaaattataactgcccggggcagatcgtgatcaccggagaggcagatgcagtagcagcagcatcggaagcgctgaaagaagcaggtgcaaaacgctgtgtacccttaaaggtcagcggaccattccattcagctttgctgaaaactgcgggagaacagctggcagaagaattgaaaagcgtcaagctgtcaaccccctggattccttacgtgtctaacgtaacagcggattatgtgacagatgcgtcacaggttgcggaactgctgaaacaacaggtatccagtcccgttcagttcacccagagcgtagagcggatgatcgcagatggcgtggatactttcatagagatcggtccggggaagacactcagcagcttcgtacggaaaattgacagaaatgtcaaagtatgcaatatcgggaaaccggaggatctggaccgggtgatggaggaactggcatgttaacaggaaaaagtctgacaggacaagttgctattgtcacaggggcatcacggggcatcggaaaagcagtggcacaggcactggcagcagaaggagccacggtgatcattaattataacggctctgcagaagcagcggaagcggtggcggcggacatccgaagccaaggcggcatggcggaggctgtgaaatgcaatgttgcagattttgcagagagtgaagcctttgtaaaggcagtaacagagaaatacggcagagttgacatccttgtcaataacgccgggatcacacgggacaatctgatcgtgcggatgacggaagaagaattcaatgcagtcctggatacgaacctgaaaggcgcatttcacatgatccggcatctgacgaagacctttatgaagcagagatatgggaaaatcatcaatatctcttctgtcagtggcatcgtcgggaatgcagggcaggctaattattccgcctccaaggcgggactgatcggtctgacgaaaagtgtagcgagagaactggcatcccggaatatctgtgtgaatgccgtggcacccggatttatccggacagatatgacagataagcttccggaggcggtacaggataatgcggttggacagatcccgcttaagaaaatgggaagaccggaggatgtcgcacaggcggttctgttcctggcaggagatgcctcggactatattaccggccaggtgctgtgcgtggacggcggtatggcaatgtaaaaaatacctccggcaacagtaaagcagaatagaaaatatgtccgctaacagtacagcaggatagaaaataagtcaggacgcgagggagtatatcacgtatgggtaaaaatagaagagttgtagtaacaggcatgggagctatcactccgattggaaacagcgtagaggaattctggaatggtatcaaagagggcaagaccggattcggtcctatcacttattttgatactgcggattaccgttgtaagctggcggcggaagtgaaggattttgatcccgcacaatatatggacaaaaaatccgcccgcagaatggagcagttctgccagtttgctgtggcggctgccggacaggccatctcggatgctggtctcgacatggaacaggaagatccttatatggtgggctgcagtgtgggaagcggtatcggaagtttacaggccatggagcgggaatatgaccgcctgaaggaaaaaggccccggcagggtaggccccatgctggtgcctctgatgatctctaatatggcagcaggcaatgtcagcattgcctatgggctgaagggcaagagcctgaatgtggttactgcctgcgcaaccggtacaaattccatcggagaagcataccgtacgatccagtacggtgatgcggatgtaatgatagcgggaggaacggaaagctccattacccccatcggaattgccggattttcagcactgacagcgctgtcatttagtgaggatccggaacgggcatccattccttttgacaaggagagaaacggcttcgtcatgggagagggttccgctatcgtggtactggaagagctggagcatgcaaagaggcgcggggcgaagatctatgcggaactgaccggctacggctgttcttcggatgcttatcatattacatcccctgcggaggatggcagcggagcagccaccgccatgctgaatgccttaaaagacggcggggtggcaccggaagagcttacctatatcaatgcccatggaaccagcacccatcataatgacctgttcgagaccagagcgatcaagctggcatttggagaacatgcatatgacctgaagatcaattccaccaaatccatggtgggacatcttttaggagcagcaggtgcagtggagtttgtcacctgcgtaaaagaaattcaggaaggctatatccaccgcaccgtgggactgcgtgagacggaggaggaacttgatctgaattactgccgggacagctacaaagaagaggtgccctatgcattgaccaattcgttgggcttcggcggacataatgcgagtctgttgttgaagaagtacacagaataaccgcagcagatgttcaagacacaggatagaaggcagagcatcaacgaggacgattgcagaatgcgaggaagtagttgatacgacagcattcgcggaacggaggaacaatgtcagtttataacacccaggaaatcatggagattttgccccacagacatccctttctgctgatcgatactatcgaggagctggagcccggtgttcgggcagtgggacgcaaaaatgtgacctttaacgaaccgtattttgccgggcattttccggggaatccggtgatgccgggcgtgttgatcatggaagcactggcacagacaggggctgtagcaattctgtctctgccggagcatcgtggcaagaccgcttattttgcagggatcgacaaggcaaaattcaaacagatggtgcgccccggagacaccttggagctggagaccaccattatccgcagtaagggaccggtgggtgtcggggaagcgatcgccaaggtaaacggaaaactggcggcgaaagcagagcttacctttgcgttaaaataagaataatctgcggaagtgattttttatgagcgggacagagagataaaagtgacgcagaataagaggtgcaggtatgggaagtgtagatacagaaacagagatcaaatgcccgaaatgtaagaaaatgataaacagagaccgggcagcgaaaaataaatatgtctgctatgagtgtggttattatttccgggtgaagacccacaaccggatccgcatggtggcagaccggaaaagctttcagccctggttcgaggagatagaagagagcaatccattgaaatatgagggctatgaagaaaagctgtcggaggccagggaaaaatccggcgtaaaagaagctgtgaccgtaggtgaatgcgagatctacggggaaaaggctgtgatcggcatctgcgaatccaaatttatgatgggcagtatgggtcatgtggtcggcgagaaagtcacccgggctatagagaaagctacggaacggaaactaccggtatttttgttctgctgttccggcggtgcgagaatgcaggagggaatcgtgtcactgatgcagatggcaaaaacctccgcagcgatcaaacggcatggagaagcaggacttctctatgcgacgatcttgacagatcccaccacaggtggtgtaacggccagttttgctatgctgggagatgtgatcatggcggaaccgggagccttgatcggcttcgcaggaccgagagttattaagcagactctgggacagcgcctccctgatggcttccagacagcggaatttttgcaggagcatggttttgtggacggtatcgtccgccgggagaatctgaagaagaccttatatttcctgatcacgacgcatcggtgcagtgaggggaattatgcggattttaagaaaaatattgacttccattttgaacctacggagattgtgaaggagcggtcattcctgacactccccagaacggcatgggaaaaggtcaagaccgtccggagagtggacaggccggcagcgaccgattatattccctacattttcgattatgtagtggaggctcacggagaccgttattatggggatgataaagcactggtaggtgcagtggcattcctggacgggcagccggtgacagtgctggcagatgtgaagggcaaggattttgcggagtgtgccagacgcaattacggtatgcccatgccggagggatatcgtaaggcactgcgcctgatgaaacaggcggagaaattcaacagacccattatcagctttgtgaatacgccgggagccttctgtggcgtggaggcagaggagagaggccagggcgaagccattgcccggaatctgctggagatgtcagctttaaaggtgccggtattgtgcattctcatcggagaaggcggcagcggcggagcattggctacggcggtaggcaatgaggtatggatgatggaaaatgccacatactcgatcctgtctcccgaaggctttgcttctatattatggaaggatgccgacagagccagagaagccagtgaagtcatgaacatcacttcggaagatctgaaacggcttggtgtcattgagcggatcgtaccggaatacggcggagcagaccagagtaccgtggaagccatcggcggttatctcaaggaacatatcaaggaatttctgcaaaaatacaccggcatgaccggtgaacagatcgcagaggaacgttatgaaaggttccgcaagtattaaagcggtaacgagaggtgatgtgggatgaagcacggaaaaatgatcctgggggaattacatgcagatattcccgtgatccagggaggcatgggtgtgggaatcagtctgtccgggctggccggagcagtggcagctgccggtgggatcggcatcatttctactgcccagatcggtttccgggagccggattttgacagagatcccatcgcctgtaatctgcgtactatcggaaaagaaatagaaaaagcaagacagaccgcaagaggcggtatcgtcggtgtcaacatcatggtggcaacgcagcgttacgaggattatgtcagggcagcagtgctggcaggtaccgactgcattatctccggtgcgggactgccgctggatctgcccggagtcgtggcagagacggaaaacggaatgcccgggcgcagccaccggacgatgctggctccgatcgtgtcgagcccccgtgccctgtcggtcgtcacgaaatactggatgaaaaaatacgacagaaagccggactttctcgtggcagagggaccgttggcaggaggacatctgggctttaagcgggaagaactggatgcttacacaccggagaactatgagagagaacttacggcaatgatccggcaggcagcagaactggaaattccactgatcgctgcaggcggtatttatgaccggagggatctggagcattgcctgtccctgggggctgcaggggtacagatgggaacccgtttcgtgaccacagaggaatgtgatgcggcggaggcgtacaagcaggagtatctccgggcgcagaaagaagacattgtcattgtgaaaagcccggtgggaatgccgggcagagctatacagaatgcttttctggaaaaggtggcggccggggaacggtttatgaccggatgcagacattgcattaagacctgcgatccgaagacagcaccgtattgcatcaccagagcattgatcaatgcggcaatgggagatgtggataacggactgctgttctgcggcagcaatgcctggcgggcgcagaaaatagaaagaacagtggatatcatggaggaaatggcgtgagaaccataagaatcaccggaaccggaagtgcacttccgggaaggatcgttacaaataaagaattggaacagctggtggaaacctcggatgaatggatccgggagagaaccggtattgcggaacgacatgtgtcagttggcgaaacggttgtgacacttgcgtcagaagctgcccgtaaagcactcgaacaggcaggaaaaagagcggaagagatcgacctgattctggtggcaacctgctctccggagcagtatctgccctgttgcgcctgtcaggtgcaggcggacatcggcgcagtgaatgcactggcttttgatgtgaatgcggcctgttccggatttttgtttgcactgaataccgcggatgcctatctgcggacgggacttgcggaaaatgcgctggtcatcggcagtgaggtactgtctaaactggtggattggaaggaccggggcagctgtattctgttcggagacggcgccggggcggtagttgtggagcgatgcaggacggagtctcgggcggtggaatacagtaacgctttgccggagacagagaaagggatgcaggagacggcggaggagaaacggataccggtagcaggaattctgggccgggcactgcactccgacggcaccggtggcggagtcctgcaatgcggagcgagagaactgacaaccccatatgcaaggacttcagcggcaaaaacggatcaaaaacagcagacggatgacagagaaccttatattcagat

SEQ ID NO: 5564 - DNA, 3722 bp, Unknown
  gut microbiota DNA sequence
atctattgtctactttttacggaccggttcagattatctttcagacgggcttattatatttgtttgattttcttttccttatcaatacctcataaattgcttagagtttcaagttagcttttcactcgctttttactttatttctgtttttcgatatacctgatacagaacaggtaaaataataaggaatagaacggaataaattgttaaaataatcggaactgatcctatcactttcccaccaatttcataaagagtaaaggttttaattgccatatttatctgcaagagctggtctggcaaaagtcctaatacatctgataatactgaaaatccacccaaaaaggattgaatgaataacagtacaaatggaattgtaacagctaaaacagttgtatgtgtcttggcagataccaacatggaaacagctaaaatgaataatgctcccacatatccaccaatcacggttaagaggtatgcctgcaaataggtaatattgtaaaaacttttccagaaagcccagcttgtctgaataacacaatttgcaccgccaatacctgcaacactaaatactactgcggaatatatcagaattaccaaccagtaaactccggtaataacaatcaacccagccgctattttagaaaaagtccccctatttctgccataccttgcggaaaagaaaacagaatccgctttccacccaaattcgtttgaaaagatacctgctacaaagaaactcataatcaaaacggtcagcataatgattgtgggtgcatagtccaaagcagcagtaaaaccgcctgcatattcataataaaaaggagtctccagtttttgatattgactaaccagaaatgctttttccttttcactgaattggtcttttgcttcatcagaattaagccatttctccagatttaagatgcggttatcataaagctttccaacctcatcctctgataagctgtctgcccgatagtaattatgttctcggaactcggaaaatccagagttaattaaatccctaatatcagaaaatccctgttttttggaatagccaatgttgctggttttaatatctgtcgggctgtcaggataggtttcgttgattagccgattttgccgaatgacctctcgaagcacatcttctgtgatcaggccttcccattccgcttttgtatcacgcaagtaccttgctgccgcaattcctgtgtgtgtatccccctcctcatccacatagtccatggaagatattgcaaaatagcaagtaacagcgatggctgccagcaatacgatcagaccgattttatttgcagtttttgaaaatatcttttttatttcaaatcgaatcattccatgtcaccatccttttctccaaaataatacaaaaagacgtcttctaaattagggcgcacaagtcttgcatgttcaagcggctgcctggcagaaataattcgtaattcaacagtaccattttctgatttcatattagatactttatattgtttcatcaactttgctgctttttcatgggaagtctgacaagcccatactttttgcggcatggaagatacgatttcatctaaattcccttgctgcaaaatcttaccgtctttcataagccaaatatcctttgcaatatactccacatccgaaacaatgtgagtagataatataacaatacggttttctgacagctcactgattagattgcgaaaacgtattctttctgcggggtcaagtccggcagttggttcatccaaaatcaaaattttagggtcattcagtatcgcttgtgcaatgccagcccgacgtttcatgcctccggataatttccgcgtttttttattagcagctttggaaagtcctacctgtgcaagtagtttgtttacttttttctttgccacaatcgggcgaatcccttttaaggctgcaatgtataaaagataatcctttaccgtaaattccggataaaatccaaattcctgcggcaaatatcctaaaagattccggtactcgccgcccattcccccaatatcctgcccgtcacataatatctttccacttgtaggggtcagcagtgagcatatcattttcattaaagtggtttttccagcaccattgacacctaaaagtccatacacaccatttgaaatcgtaagattcaggttgtttactgctcgaaaatttccaaactcttttgtcagattaactaattgtagttccacttaaatccacctcccaaaatttattacaatcaaatatggttttataaattgcaccaatcagaaaaacaacagcagttccaaacaaagcataccaaaccggaagtgtaatgagaacgtaaatggtttcgttattgataatgaaccaccatattccgctccataacaggcagagaataatagaagttccctcatttacacgactattgctgcacaacgtaccaaagcaaatgcaagcagtcaccacggctggaaacaaaaactggatgacaatttctgatagcgcgagattgacacttcctctaagtgtgatacaaaacaggcttatcataaataaatcgacaattccaaatagaaagattctggctgcatatatctgtcgcaatgaataaaggcaggtcgcttctatctgcatacagtcacaagatttgtttttccaaaattccggtatcatcagaacaataaagagtacccctatcatacctaacattcttatcacatacctattgtctaaaagatatggcaaaagggttgcagcagtccataacaaaagcatttgcagcagccaccaccgcttgcgtataagatgtaactctgtccataaaaattcccaatacgttagttgcttttcctgctcaacggagcaataactttctattgattttcttacggtttcttttatgtgctgttcatcaggaataatattctgattttcccgataccttttgagttgttcttcaatattcacaaaatcactcctcccttagcagtctttctaaatgtgtttttgcctgttttacccggtattttactaatggcaaacctatttgtaaggtgctggatatttctgtaagtttcagttcctgaaagtaatacaagataataacttcccttaattcagcgggtaatctatccagagctgccttaatcgtcagcctgttaagaagctcgtctgtttcagggggatgtaaacaatcttgaatttctaaagactgttcctctaacaaactttctcggatttttttataggaatccctgcaaagatttccagcaatcgtatacaaataatttttggtttttcccatataacggtagtcggacaatttctcgaaaaagcgcaaaaaagtttcctgtgttaaatcttctgcggttgatgtatcagggcaatgatagttacaatagttcaatatttccttatagtatttgcgaacaaatacattaaaagcattttcgtctccacgcttcattctttgtagcaacaaaaaatctatatccacgaaatcctcctttcccgttattgaaagtcaatgcgcatttctctttctaccatgtataacgaatgaacactgtaaaaagatagtgtggcttcattttttataaaaattttttccggatagattgcttatacctatttattatattgaattgcccttatagcttcaagatagataatttgacaccaattcaccacttgacattgtggcaaagactttc

SEQ ID NO: 5565 - DNA, 2377 bp, Unknown
  gut microbiota DNA sequence
aggctcactgctgttgttcagtaagcccaggatcttctatgagcaggcagatgacggatattatgtgcggttttatgtctatggtctgacgaatatgactacggcgaccatccccgatacttatcagggggagaaggtagtgggcctgcgcggcaacaccttttccaatatgccctttttatcagaggtaacgctgccggacagcattacagagatccgcgggcaggcatttaaaaactgcagaagcctggaatgtgtcacattgccgaagaatctgacgtatctgggcggggaagctttttaccattgcagcagtctggaggaggtaaatcttccggcgggactgacggagatccgcggcaatacctttgaagaatgcagcagcctgctgcgcatagagatcccggataacgtgaccaggatcggcggacatgcgttttatggaaataccagtctggaggaggtggtgatctccccggacagcaagctgcagcagatcgggtcttccgctttccggtgctgtgattctctgcgggagatcacactgccccggggcgtatctgtcaatgaacgtgctttcaaggagacacctgtaaggatcgattactatgaatactaaatttattcatttgttatatgtgccgaccatggcatgtaacatgcagtgccggtactgttatctggaggaccacaccgtagataccctgcgaggcggagattgcctggagaccctgcaatatgccatcgcgaaattccgtgaagcggatgtggtgccctttaatatttccctgcacggcggcgaggtgaccactttaccggagcaggaattccacgacctgatccaatatatcagcagatactatcaggacatgcgtgaactcatcacggatgccggcttcagggtggggcatccccacatcaagacgaatctgtacggactggacagacatatcgagaccatccgggagttcaacgtgtccatatcgggcagcctggatctgcctctttccctgcatgaaaaatacagggtgaccaagggcggagagggcacactggaacggatactggataatatccgactgctggaggagatccctgacaagaaaaaagtatctgccacgatctttcgggagcatttcgaacagctggatcagatcatcgaggatatcagattcctggaccggaacacgtgcctggacatgaatgattttaatttcatgatagggtttgactacaattcctgtggcctgctgcatcacatgagtgaagaggaacagctgatcttttaccggcggatgcacgaggcttttgacgggaccaatctggatgccggggtcaacggtgcatggttcgatgagttcggaccggaatactgcaccaactgcgataattgcggagaaaaatttttcctattggagcgtaccggagacatctattcctgtgtcagaggtcagaagaacgaagatttttactacggtaatatctaccgtgacacggtggacatcattttgaaaaccgctgcacggaagatcttccaaaaccataacagacaaccgtttcccgaggaatgtgcgaggtgcgcttacctgtatctgtgcaaaacgggctgcccttttgtgaaaaacgtatatggatccggcaaaagctacacctgcctgctgcaacagcagatgtaccgggaccgcggctatgccccggatgcttctgctgacgagacggcatatgaatatgtgacgaagatgcgcctcgaggagccggaaaagtatctgcctgcaaaagcatccgcagaatatcctgcactggaacagatcattgcacaagatgcgaagctgaaatatatctatgacagcggtgtgttcgaactggacgtggatggagacagatatccgctgatctcccagatccttagaaagtccagggagatcctatatctgacacccatcagtacggtaaagctgcgtatgaaaaagcatatgttgcaggaagaatgcgattatccggagaacaacgcattgtacctgatgctgttgtccggagatctcgtgacttacggtgatgaagggagaacaaagcagcggcacattgccacgcatcagatttataaaggggtgctggaccattccggggacaacgaagaagaatggtatgtatatgatatttccgggctcctgcgcgaatatgcaaaggaatatgccgcggacagcccgaacaatttgttgtgcaccactacggagttgagagactgccattaccggaagcaggaaaataatgcctattaccatatacaggccatcaatctcccctttcagaacattgaattttactatctgacactggagcaaaaaaatgacaaggaggctttccatgaattttgaac

SEQ ID NO: 5566 - DNA, 151 bp, Unknown
  gut microbiota DNA sequence
tggctccgatggaacaaaaagagatcagcctgtcggtggactgcccatctgatctgacaatatcccatgacagccgctggacttccgaagcattgtttaacattctggataatgcggtaaagtacacctctgccggtggcagcatccaggt

SEQ ID NO: 5567 - DNA, 517 bp, Unknown
  gut microbiota DNA sequence
cattctcagggcacgatcttcaaacgcttctatcgggatgaagcggtgcatgatatagatggggtcggaatcggcttataccttgcccgtgagatcattaccatgcaggggggctatattaccgttgagtctaaagttggggaaggatcaactttttccgtgttcctgcccataaaataattctgaggcagtctgttttggcaggctgccttttttttgaaaaatttttagagggcaatggattttaggacaattctgcaacatttgggatttatgctgacagcaacattatgaaattggaggtggccttatggaaatcacaaagacattactcatcaatgcagcttgcttgctgatcccgccggtcgttgttgttctgctgctccggcacttctttccaagaaaaatcagatggtcggctggtgtggtggctctggtagatctggtgatcttctggacagatatttcttattatgagagcgtttggctgacgctgttttttgttgtaattcagtta

SEQ ID NO: 5568 - DNA, 1655 bp, Unknown
  gut microbiota DNA sequence
gaaatcagatggtcggctggtgtggtggctctggtagatctggtggtcttctggacagatatttcttattatgagagcgtttggctgacgctgttttttgttgtaattcagttagcaatggttttgcttatatctatccggctttataaaaaagacacacgaaaatgaattgtcctaaaattgaagcaattcaccatggattttcatgccatttaggacaattctgcaacatttgccctttactctttactcaacaaattaaagcacacttataacaggagaaaacaccatgaaaaaaatcaatttttgcaaagcaacaacaatcattttaataatcaatgttattttatctattgttttatttttcgttgttcctgataatatagcaattcaatgggcaggtacatcccccagaaatgcagtagattcttactatatatttttagtaccggtattgtcagtgctttttgcttttgctggaaaacctatttttacaaggttcctgtttagattgtggaatagaactaacgagtatttagtggcatacctaaatttgtgtctgcaagttgtatttcttacttgtgaaatctatatcgggttatataacttatgtaattttaatgttgccattagtataattctcattgtggaatttatgataaatgtggtgattggattgaaattatttcacaatcaatctatctaaaaaatcgtgtagtatgtttcggcggacagttatttctggatgcccgctgtaaatttttttgaaatgtccgagcgttgtaacatttctcggacatttgggttttataatgatcttatcaacaaaagcaagcgtatacatgaagcaatgcaataaaaaagttgcttgttcaataagaatatgaattgtcctaaaattgaagcaattcaccatagattttcatgccatttaggacaattctgcaacatttgctctttactctatactcaacaaattaagaaaggcaggtaactgttatgaaaattttgcagacaactgatcttaaaaaatactacggcacagagccgaacattacccgcgccctggatggcgtgaacttctctgtggaggagggcgaatttgtggcggtggtcggcacttccggctccggtaagtccaccctgcttcacatgatgggcggcctggatacccccacttccggcagcgtgatggtgcgggataaggagctggcgaagatgaacgatgagcagcttaccatcttccgccgccgcaatatcggctttattttccagaactataatctggtgccgatcctaaatgttcatgagaacatcgttttgcccgtggaactggatggggatacggtggatcagaaattcatggcggatgtggtgtccatgctgggactggaggataagctgaagaatatgccaaacaacctctccggcggccagcagcagcgtgtggctatcgcccgcgctctggtgtcaaagcccgctatcgtccttgccgatgaacccactggaaacctggacagcaggaccagcgccgatgtgttggggcttttgcagagaacgagtcgtgaatttaaccagacgctggtgatgatcacacataatgatgccattgcccagcttgcagaccgtatcgtgcggattgaggatggcaaaat

SEQ ID NO: 5569 - DNA, 422 bp, Unknown
  gut microbiota DNA sequence
tggccagcagcagcgtgtggctatcgcccgcgctctggtgtcaaaacccgctatcgtccttgccgatgaacccaccggaaacctggacagcaggaccagcgccgatgtgctggggcttttgcagagaacgagtcgtgaatttaaccagacgctggtaatgatcacacataatgatgccattgcccagcttgcagaccgtatcgtgcggattgaggatggcaaaatcgttggataaaggaggtggcagacatgacattgccttttgaaaatgatacagggccggttattaaaaaattggcgtcacgaagtattcaaacagataagcggcgcaacctgtttgtgatcgtaacgattgctctggcagccgctttgatggcagcgattttttgtgcaggagcgggaagtgacagaaaactggaggc

SEQ ID NO: 5570 - DNA, 137 bp, Unknown
  gut microbiota DNA sequence
cagcatactgacattcacaggctgcttatagaacttcatatagctgaggttcatgatcggcatttccagctgatattccttggcaatctccctgctgcgggcagtcagctctgtttcatccatttgctgctcattct

SEQ ID NO: 5571 - DNA, 1609 bp, Unknown
  gut microbiota DNA sequence
tctgcatctgaatttgcagaagctatcgaagaattggcgacccatgtagccaattttagtatcaatgagcaggattacaacgttttactacgttatttttcctttggtttgcaccgtcttaaatcgtatcgtgtacggtttgagcaagaaaaaaatgccccatctgcatctaattgatgaagcgataggacttttgaacactgaaatacgccttatcgagtggcgcatcaaatacccggaacagctacagcaacgtatcaacaaacagcccctttcccctctctatctcgcagacaagacaacccttatcaacatcatggaaatggtaagcggtctgttcctctccaaaaacatcgtgtatcagaacggcaagcccgcctacttggtggacttggcgaaagcctttgaatggctgttcaacatcaagataggcgactgttaccaaaaacatgaggacgtgataaaacaaaagccgggcaaactgaccgggtttcttaatggattggtagaacttatcaaaaaggaacatgacaagaaaggatatagataatcagtgacttatgatttatttataggggattccattagttcccccgtaatttctttgcgcctattttctgaactttgcttcatcaattgattgacagacaagaatgtataatcagaaaaatgaagcaatcatgtatatagacaatgacgatttcagcgtatggatgcagaagctgtacgccaagctggaagaactctgcaaggatgtacgggtactacgcaatgcggacaaggtactacccgaagatgacaacctattggataatcaagacttgtgtttattattcaaagtaagtatcaaaactctgcaacgctaccgggctatcggtgcgctgccttacttcactatcagcggaaaagtgtattacaaggcttccgatgtccgggagtttattaaagaacggttcagcgtcaccacgctacgccagttcgagaaagaacactgtacgaagaaaaagaagtgaatctgaaaagccggaacggtgaatgtacttcatctgttccgactttccccgtttatggcttacccaacttatcggcttctttctttagctgttcggcttgctcattcaacagccttgcacgttccagtgcttccgcctgcttttggatgcgatattcaaaatccatcactgaatcggtcaaacttcggataaaaccgttatcccgttgccacttgaacttgttttccagcatatcaaaagtttccccgtctgcctgtccttgcatcagcaaatagcggtatttcatatcgttgtcctgcaactgctgcatacgttcagccaaacggacattcaagaatatggaaacggaacagacgaccagcactgccgaaaaaacaaacaatcccggacgaatccaagaagcgaccttgttgtaaatccgttgatagaacggtaagggcgtagcttcctctttatccgtcttgcaagagcccaaagtatcaatcattaccttgaaacaacggtaggtttccaatgttattttcttggtgtcctctatgttcttctgctgaccttgcatcctgctccttatgtcgtcaagttggctttgaataacc

SEQ ID NO: 5572 - DNA, 2614 bp, Unknown
  gut microbiota DNA sequence
caggtactatcatacttacctccacaaataccgatttgttgatttctgtgataccttctaattagaaaaaatcaaaccgaagctgtctgtcaatccagttcttctgctccgcttcatgtataacatctcccgacatactttcaccgatcagaaacggagacttgggattatgttttttcctgttttctttcactaagtttacatctgcattggcataacaatatttgcataaatgtccacatgtatcatatgcgcctatgtccacgccaagcacgcaggcgcaggcaccgttcctttgattgatctttctcttcggaatctctaatctgttatgaagtgccttttcaaaagtagccaccgtcatacatccggagcaatccgcaccatacgcggccagatcattaccctcagcacaaggtcttaccgtcattccgtattttgcagcaatctctatcaatgccttaccgattgtaattctatcccgacggcttaccgctttcgcttccgggaaattccgttccacttttttataaatatctataaagctgattacacaggtttcggtatacccatgcagtaccgccgccattttttcaaactcagatatatgccattctaccgtatgcgtggcatctaccaggattggatcatatcgccaaccgatgctgtccacgcctacgatatccgataatattttaaagtgatccattaccgttcccgtatccggaacatttggctcaatgtctcgtccatatggcgtgatcgtgacaaaccagtactgcccatacggtgttaattgctccataaaaggaagcattggcgccggattcttcgtgcaaaatgcaatcagatccacaacctcaggcgagagactgtactttgttacctgtgtaggattatagggattcctcactaacacaaagccttcctgtattctgttcatcagccattccgaataaaatgccggaatatctgttctcatccctgtctgaataatcattgccacatcaccaaaagtcctaccggcaaagcaatcaccgcctggctgaacattcctatcactgcatatttaatatgatgccaataatcatggtaagcatccaccaaatcctcagttcccggaattatcatcttcttactatggcaaaaccacagacaatccactaccaacgcatcaaaccagatctcagctacccacataatatatccgtgaaaccatccttcaaagaacgtgcgtgcaccgccgatatagtacgccaataccgtctgcaaaaatatgtatccgataaaaagtcccagttttcctatcgttgctttctttgtaagtttcgcggagctttcctgaatcaatccaagctctctgcatcggtcctgtatcgcctttgggtattcctgtatcatgccaagcttccccttctttgccataatgatgccgctaattgtaaaaatgacgacattaaaaataacgatttctaataagtaattcattttgcccccttatggcacgattaacttaacaacttcctatattctccaattcttccagcgcttccatatttttctgcagatcatcccttgccgttgcataatatgatttttgaaaaagcatatcccacgacaaataatctgccatacaatcaaactgctttctgatcagttcatactgtatattatctacgggagaacctcctacaacgatcagtcctgtctttttccctttcaactgcattccgcggcaataacatttatctataacctgctttaactgggcagacattccccaccaatataccggtgtggcaaatactatcatatctgccgatacgatctgatcgattgtggcatttgtgtcatccttatctacacagcctttatagcattgacaagcaccacatcctttgcacggagctatatgtaactgatccggttgaatgatttctatatcattccctgcagctgctcccttctgaaacgcatcaatcgccgttaaaacatttccttttctggcactgccattgattattacaattttcataaataacacctcccgtatagtatcttttatttaggcccagaaatttaacgctttagatccgggtttcattattattttgggattccattattatttcactagtttacactatttttcattatctgttaatctcatatacaaatggaatttttattgcttacaaacagacattatcttgcatataaaatctgtaaatctccgtcaacaaatccaatgcctattgcttgatattcttttaattttccagcatattttccagaagaaaggtattcattcactaaactaataaaaaaagtttccactaattcccaatcactttcacactctatcacgaaaggttgatctcttgtagtaaagacttcatcacaagcccaatcatcattatccttatcgaatgaaaatgtgccgaccaattcaacagaccatttattatctgtatcttcatataaattaaagttaattgcttttatttcactattcaattcattcttcaaaatcaaatctaaccattcaaagaaatctttggttttattcagttttaacctatcaagtaatcccataacttcaccctccacaaac

SEQ ID NO: 5573 - DNA, 6717 bp, Unknown
  gut microbiota DNA sequence
tggaggtttacacaaactttaggatactcccccgagattatcgaatcctaatacaatctcgcaccttccatatctccggtcatgcggaagatggcccactctgcgatatttaccgcatggtcgcccactttttccaaatactttgccatcatcagataatccaccacacgatccgcatccaggctctgctctctgatagcctgcatcattcccgttttgacttcgttgaagagatcatctaccacatcatcatgttctactacttttcttgcatttgcctcatcaccttccacaaatgcctccaccgaattgtggatcatctccttggcttcttccatcatctccagcaacagatgttcctgttttccttcgggattcatgttgcccatacgcaggtacagttccacaatatctgccacatggtctccgatccgttcaatatccggtaccactttcagcgctgcggataccagacgcatatctctggccaccggctgctgtctggtcagcaggctcagacacatagcttctatacttcgctgcatatccaccatggtatgatctgtattcaacagcgtcttcagaatgtcttctttgttctcacgaattccatacgccatacggtcataactgatctccgcatgctctcccatctcagatactttatttttcaaagtctcaagatcctgttcaaataatactctgggtgacatctcccattcctcctatcttctcatccaaaatcatccaaaccgtccggtgatgtagtcttctgtccgtttgtcctgaggtcttgcaaagatctcggaggttgcatttttctctatgacttcccctaccaggaaaaatgcggtgtcatccgacacacgggctgcctgctgcatattgtgggttacgatgaccacggtgtattttttcttcagtgtctccatcagttcctcgatctttagcgtggagatcgggtccagtgcggaggtgggttcatccatcaaaagtacctccggagatactgccagtgctctggcaatacacagtctctgctgctgtccaccggacagtcccaacgcggatttgtgcaggcgatcctttacctcttcaaagatagcggcaccctgcagagaacgctccacgatttcatccagttcctttttattcttgatgccgtgcagtctgggaccgtaggcgatgttgtcataaatggacatgggaaaagggttgggctgctggaataccatgccgacctttttacgaagcaatgtggtatccacccgcttatcgtaaatgtcctctccatccagaattacttttccttcgactctgcagccgtccaccaggtcattcatccggttcaggcaacgtagaaaagtagatttgccgcagccgctgggaccgataaatgcggtaatggcgtggtctgcgatctccatatttacatctttcagtgcgtggttctctccataatggagatttaagttttccacggatattttactgttagccatatattttctccttcttgtgatttctcttactctcgtctcagcttattcgccgccagcttggtcaggaggttcaggatcaatacgataatgatcagaacacaaccgataccgaaagcattatcatactgtcccttctgcatctgtaaatacaattcgatggtcagagtaccaccagactccatggccttgtgagccagctttgccagattgtctccgaaaactccggtgaacttcggcagcttgtagtcgcttcccgcagtgaacaacagagccgcagactctcccacgatacgtcccagtgccagaatgataccggtgacgatacctggcatggaagacggcagaaggatcgtccggatcatatgccatttcgtggatcccattcccaacgcaccggtacgataactgtccggcacggtgcgcaatgcttcctgcgtatttcttgtgatcaggggcagtaccatcaatgtcagggtaaaggaaccggtgagcagtgaatagccgaagcccaaagtctctccgaaaaagatcataccgaacaggccgaaaataatagaaggaataccggacagtgtctccgtggtgaactcaatgatggagaccagcttgccgggttttgcatattcattcagataaatggcacttcccacgccgatgggggtcgcgatcaacagagtgatcacgatgatgtacagggtattcaacaggttgcccgcaataccggtggtctgctttctggcactggtcaccgtcgttaaaaatgcccagttaacggtgcggatgccctttacgaagacatacaggataattcccagtaaaagtgccaccgccagtgtggcagagacataaatggctgccagcaaaagcatgtctgtggggcgttttctttttacatataaggtgtccttattcattgtcatccgccccctttttcagtattttattcaatacgatattgatgatcataataaatacaaacagcaccagtccgatggtgaacagcacctgtctgtgcagtccggaagaatatcccatctcgctgacaatagctgtggtcaggaatcgcacggagttaaatggcaacggcacattgacgctgctaccggataccagtgtgatcgccatagcctcgccgatggcacgtcccactcccagaacgatagccgtcacgataccggattttgctgccggaaggatggagcggaaaatagtctgtacatgggaggctcccagggccagagaggaggatttgattcctgcaggaaccgcccggatggaagtctcactgatattgatcacagtgggcaggatcatgatcgccagtacgatcacggctgacagcaggtttgcaccgccggtgaactggtgtgtcgtggatccctggaagatcagtctttctaatttatacatgagaggattcagtaagtagattcctaacagtccgtagataacggaagggatgccagctaacagctctaccgcaggctttacaatggcagctaagggtctgggtgccacctctgccaggaatactgccgtcagcacgccgatgggcacaccaagcaggatagccagcgtcgtaccgacgatggaagtcaggataacccacagaataccgaatttcggatctgccgccgttggcatccattccgtgccgaacaggatctctcccagacctactttcataatagcgggggtaccgctgatgatcatatataaggtgatagaaactaccgccagtacggcgaagaaggcacaaatggtaaatactatttgtgccacagtttcaacgaccgctctattttttctgtttcccattacggaagcgtgtgttccactattcatcgcttttttcctttttctgtgtcgggctattattttactgtgatcagaccaacttcggaagcaacctgctgtccttcgtcacccagtacaaaatcgaaccatgcctgtaccagatcgttctgctcggagatctcacccttggtagccattacgaagggtctgctcaggaaatagttaccggccttgatattctctgcggtagcttctacaccttccagggaaagtgccttaacactgtcatccagtgcatccagggaagcgtatccgatagctccgggagtagatgccacttttgcgatcacagcaccggtgctatccagttcgtttgcatatttgcagccgtctaccagatcaaccagctcttcgaacgcgcctctggtaccggaacctgcctcacgaccgatcacgatgataggctcatctgcaccgccaacttctttccagttggtaactgtgccattgtaaatgttggtcaactgctctttggtcagatctgctacttcgttagcagggtctacacatactgcaataccatcgatagctactacgttctctacaacgcctgctgccttttcctcatcctttaagcttctggaagagttaccgatatctgtggttccgttggtaacagcttcaatacccgcaccggatcctacgaattcagcggttacagttacatcaggatgttcttccatgaaagcttcgctcagtgcattggctaatttctccatagaagtacttcctaccatggaaatgctgccggacagatctgtggtggtctcagcaggtgctgctgcgctgctctctgccacagtgctttctgctgcgctgctctctactgcggaaggctgtgctgtggctgcatcaccgttaccgcatgcaaccaatgcggttactgctaatattcctgctccgatcagagctaataatttgctgtgtcttactctcataataatgtcctccatgtttttgtttttctttctcttgattacgcaatcatactaacatgggggaaattcacataatatcacagtccggtaatttatttgtaagaattaggtaaaatcagatgctctccagaatgccgtcggcaatagcccgggcgatctcgtcaaaccggctgtcaaagagttcgttgtccgcatccgtattgataaatcccacttctatcagcacagccggcatatttgtgctgttgagcaccaccagattcggtctttcattcactcccagatttacgaaccccacctgctccagtccggcattgatgttgtacgccatcctggctgccgctccatagcggttgtagactaaactctccactccactgtactggttcggataaggactggaattgcgatggatcgagacaaaataatctcctcccacctcatttccctcctgtgccttctgatagggggactcatagatatctgtggtccgggtgtaatacacatccactccgttttcttctaagatgcttcccaccgccagtgtcagtgccagcgcatcctcactttcttttcttccattataggtggccccggggttcgcaccaccatgccccgcatccaatacaatcaatgacataaaaaaactcccgcatatccttttgtttcatgatatgcgggagtttccccatttagatattttttgcttactttaaaattgctgccgtcacttcctgcggaatcacaaattccggtgctcccatagaaccgggagccacttcgtattcgtcaaaggcaatgaccagttcgtctttttcattaaaatagaagttcgtctgctccgtgatcccctgaaaattgaattccggcatatcgtcattatccaggaaatagatcacgccttcgtccgccgccatctgctcctgcatctgggtcttaatgttctcgctgatcgcggaaatatagtcgctcccttccacaaacagatcttccagtgtcaccacatttcccgtctgtttatcaatcgtataaaactgattattctcgtagccgctggcttccgtctccaacacgcttaattttacggtgtaatacctctcattgtccgtaacgacctcctgggacacatgcagaccatggtatccttcctcggataaggtatcctcgaactgacggatcagttcctctaccgtagcctccatatcctggttgaccgcttccacaccgtcttccgacagatttgctaccgcagcctcctgtccgacaccttccacacttccggctgctgtgcccttaggagtggctgccacttctccaacggaagcaccttctcctgcgtcttctccatagttgatctgtgcaagttctacttcagcatcatggttctcgtcactgtaattgtactgccgcactgttaccagcctaaaaaagccacccagcaacggaatattttccatggcatgggctatctgtatattggtatttggcagtgcgatcatcacgactgctgcagccgccactgctgtccatgcagaacgccttctggcgtgctctactctttttttctccatccgggctctgtcgatacctgcctgcagccgttcccgtcccgcttcgggtattatcatattctcatactcctcttttaattgtctcaactgttcctgttctgtcatatctattctccatctgcccggtcggttcggaccggtcatgttatctcttcctatatcttcctatatctctttgtctgtatctgtcttatgtcctgcctatatatgatgtcggggcaaaatcccacgactttgactacggattgctcagcccatgctgccctcgaggttcagccgcagttttttcatcacccggtacagcctgctctttaccgtactcaggttctcatccaggatcttcgcgatctcctccagctgcctgtcctcaaaaaatcgtaggactacgatggcacgatcctttgggtcaagattttctattgcgcgctttaaatcaatattttcatagatatcttcacttgccgcctggatctcctccacatccacgctctccttccggctgcgcaggaagctgcacgcctcgttgatcacgatccggtacacccaggtctccacgtattgcggctccttcaggctgtcactttttaaaatagctttataggctgcttcctgtacaatatccagcgcgtccgcttcattatgtacataactataagcaagacggtaatacttctcatacccttccgtcagggcacgctccaccgcctgttctttttttctgtccgacatatatcctttcctcacttttgaaaactgcatgcaattatttttcggtatttattgtaacacatattcttttgatatattctacgattttgacgctgtattcccgcaaaaagtttcaccgac

SEQ ID NO: 5574 - DNA, 799 bp, Unknown
  gut microbiota DNA sequence
ttggtcacgatgtcatgaatgaaatgatccagtctctcggtgggactgctgccgatcacctcacagatgtccttcggcacatccgcttccgtgaggattcctccgcggatggcgtcatccatatcgtgatgaatataggcaattttatcggaaagtctgacgatcttgccctccagggtgtggggctttccaatggtctggtggtttcttataccgtctcgcacctcgtaggtcagattcagccccttgccatccttctccagaatgtccacggtgcggacgctctgttcggcatgttcgaagccaaaagggcatactctgttcagcgcacgctctccggcatgtccgaaaggcgtgtgtcccagatcgtgtcccagcgcaatggcttccaccagatcctcgttcagctttaatgccttggctatggttctggccgtctgggatacctccagcgtatgtgtcagtctggtacggtaatggtcaccctcaggtgtcagaaatacctgggtcttatcctttagccttcgaaaggccttgcaatggataatacggtctctgtctctctgaaacaccggccggatatcacattgttcttccggtcgcagacgtcctttggagttcacactcaaggatgcgtacggacttaaataatccttttcccactgttccaagttttctctgatcgtcatagttcctcctgcccctacttctaatattctgtgcctgtcttaaaaatccttttctttcttttgaaaaaatagtcattttttctgatttaaattatctgcacacagaatag

SEQ ID NO: 5575 - DNA, 1406 bp, Unknown
  gut microbiota DNA sequence
tgaccaagatgcgcgcctccatggtgtgcgagccttccctggcattctgtgccagagacctggagctgggacagtttatgcttttgggaaagggcgaagagaataccggcggcagacgcagagacagcatcacctctgacggtatggaagctatgatcggtgccatttatctggatggtggcatgcagcctgccaaggcttttattgaccgcttcattctgtcggatttagaggataagcgtctcttctacgacagcaagagtaatctccaggaactgattcaagggaaactcaaaaaagagttcgagtaccggctgttagaggagagcggaccggaacacgacaagaccttcgtggtagagatcgacatggagggagaatgccttggccgtgggcagggaagaacaaaaaaagcggcagaacagcaggcagcttatgaggcgcttctgctattgagggatagaggatatgtatttaaaaagtattgagatccacgggttcaaatcatttgccaataagatcgtatttcagttccacaacggaatcaccggtatcgtaggacctaacggcagcggtaagagtaacgttgcggacgcggtaagatgggtgctgggagaacaacgcatcaagcagttgcgtggtgccagcatgcaggatgttattttctcgggaacagagaccagaaaaccgttgagctacgcctatgttgccattactctggacaacagcgatcaccagctggcgatcgactatgacgaagttacagtggcgagacggatctaccgttccggagaaagtgaatatctgatcaatggtactccctgcagattaaaggatgtcaatgagctgttctatgataccggtatcggtaaggaaggctattccattatcggacagggccagatcgacaagatcttaagcggtaagcccgaggaacgtcgtgaactgttcgatgaggctgccggtatcgtgaaatttaaacgcaggaaagcagcggcccagacgaagcttgagaacgagaaacagaatctggtgcgtgtgaatgatattttatcggagctggaaaaacaggtaggacctctggagaagcagtcagaggtggcaaaggtctatctgaggaaaaaggaagagttgaaatccctagatatcaacgtgttcttattggaaaataagagactgagagaacagcttgcttccgcagaagaaaaatataatctggcaagcacggaacttggtgagaccggtgaaaaatatgagggtatcaaggaagaatacgaacggatccagcaggagattgagagtctggataccgctatcgaagccgccagggaacagctgacggataccggtctgatgcgcggtaagttagagggcgagatcaatgtcttaaaggagcagatcaattc

SEQ ID NO: 5576 - DNA, 9612 bp, Unknown
  gut microbiota DNA sequence
acaccgagtacagcgccgatgatcatgcccagtaacataaaggtggtcatgtaatctctgggctgcatcagaagccacatgggcattacggatgccaggaacaggtatgccatgatgatgtagatccatgtggtcttggaagcatagatgggaagcttcatgcctaccgcaaacatcactaccagcaggccgatggctacgactgccttgatccactcgttcatttttccaacctttttctggatcagtccgaagatcacggcgaccaggatgaacaacatggaaatggatgccgcactgccgttggcatatgccacactggcatcttccagtccggtacctacgaaggtacctgccaccatatcggtaaatgccgcaatgactaacagagtgaacagccagcagaacagcatgaacaactttctgccggtcttaccaatgtatttttcaatgatcattcccatggattttccttcgttcttcacggaggcatacagcgcaccgaaatcctgtacggcaccgaagaacagaccgccgatcagaagccacaggagcacgggaacccatccgaataccgatgcgaggatgggacccgtcacaggacctgctccggcgatagaggaaaactgatgagaaaatacagtgaatttggaggaaggcacgaagtcctctccgtcttcatgggtaaaagcaggcgtcttcgccttctcatcgattccccacttttttgcaagccatcttccgtagaagacatagcctgctaccagcactaccattgcaatcagaatgattaccaaactgttcatttttgtttccttctttcttgtgtcttgttgttttgtcgtgacagaaagaaaaattctgattgcccgtaaaacaaaaaagctttccgtctccagtgctttataagcactcaaagacgaaaagctctaagctctccgcgttaccactttgcttgccgtatatcttatacgacctctttttcccatctccatgaaacacaaatatctcatttccaacaggcttctaaataacggtagaataccggtgacacctacttaactgcttcagtgtacttctcacagaggatagtctgccatactcacatgccgtctcacaccagccgtcggctctctgaaatgcttccgtatgcagatcttgttctgctcatcgaatttcactttctgttcgatagcaaagataccactctgattttataatgtcaatagttttcttttaattttttattgatctattttatcattttccctttttatccgcgatcagaggtttgatagcggaataaatctcgctggtacgtttgctgtccttgaactctttgttcagggcattgttgattccctgtttggtcttgtactggcggatgaattttaccacctgagggacgatggtctggtcggaaagcaccttttccactgcctgggccagttcatccggttcttctgctgccttcttctctgaagccttcttatcaacagttttctccgtcgttttcttttctgccatatttgcagtattcttcttccgggtatttccgctctttttccttaccgtttttttcacgggttccacaggcacaggttccagtatctcaggcaacggttcttccagaatctgcacgctcacaaatgctggctctgcaatctcctctgcatccacttccgccttcggttcctccgtcattaccgctgttgcgttctctgtctcctgttctgtgatttccactgccatcggctctgcagcttccaccgacagagcctgcacgctctcctgttccgtactttccgttacttccattgcattttcttcggtcaggagattttgttccgccattggattctttccccacaagagattacggataatgcgcacgggaactccctgtgctttccagtataccatcagactggtgaatccattgtccttggtcacgataaagtaatccgggtgtatcccttccctctgctgctcacagatcaggtaaccgagatacgttgccagctggaaatccagtgcattcttggtacccactgctaccttgtggtaaatgatctgtgctttcgtctcattcaacttccgatgcaggtcaaaagtcatgctgtccgcattgtcactgtagaaaatgcagacggtatcctcctccgccagcagttccactccctccatgcctcggctctttacattttcaaaatcaatcagataataggccattatttctcctccccatttgttgtatcaatttcttccgctttaccagtctcttccggtgtcccctgctccggttccgccggtgcatccttctgttccacagtctctacaggctctgtgttttctaccggtcgggttgtctccggcgtcccggactcctctgcacctgcctgcggcttttcctccgtcacggcttccggctcttttgggatgcctgtctccgttctgctctcctctgtggctttcttcttcgccggaagctttttgcgaatgctttctttccagccggtgagcctctcatccctccggttcttccgttcccttcgctttgctgcccgttcctgtctggcctcttccttaagttccagtttttcctgttttctggcctgttttgccagtgccttttcttccagttccacttccttgacagcggctttctctatatcccggatatagcggtccgcctttttgtggttcttacggtccaggcggtatgggtcatacacaaagtacgataccgctcccagcaccagaatcaccacaccggcaatcgtcagtaccggtacgacgatcccatactccgtaaatcccagttcaaaacagacaaatacgatcagcatggccggaaacaacagcagatacagaattcttgtcaccatatccaacaatgcatgctgtcttttcccattggtcagaagtgttccctcaatagcggtataaaatgccataaaaatacacaattccgaaccgaagccatgaagatatccgcagattccggtcagaatcagcgacagaaaaaacatgccgaacgccgttccctgataccaggcattgcggtactccgtcattccctgcagcttgtcctcactgatgccgtgcatccgatagacatccttgcggatcagccgttcaaattcttcgttataccgctgttcctctctggtattgcgcaggtggtcttccaccgccttgctcatctgctcgatatattcctgctccttgcggatccgtttggttctgagctgctccagctcattctggcgcctgacttcctcttccagtttccgtacctttccgatccggggattctttaccataatctccggattctccggaagcacagttgtttcgttcttctcctgattctccattgggtcctctttccgtttatattatcatccaatagccttattatagattttccggcccagaaaaacaaccttttgttccctgttttcattgctttggctcttcatcctgtcactcgagaaaaatgccgcaagtaccggcagcattaccataatggggaataaataacgtacctgcactaccggccccagtaacatggtcccaaagtataaaaacggcagtaagctcatctggaagcaccagtattttcttcgatacaggcacaacaccatcaaaaagaacagactccagctgtatagagatccatgaaaaataacggaaagcaccggccattcattaaagcagttaccactgacgatcttttccagcactttttccagtgccgggaatttcgaccgatgttcaatactgccatagccttcgatttccgaggaagtataggtaaagagcacaccataccttgtgtctgtgccatagcccagattttccgcccaggagaaatcatcccagaaccagtatcctctggtcagttccagaaaagcatccaggaactcgttcggataccgtttgcccactcgtagccagtctctcaaaaactgcctggaattctccgtatatgccgaagcatttaccgcgcccttgatggtatctgccagcggcgcataataagcatcccaatgatctctcggcacatatttttccagcaatgccgccagctccggatcctgcacctccagttcctctccatgataatatgccactctggcaaactgctggatgggaacgctgtaagcctcgatcttcggagcctccagccgggtccctatgactgtctggatcacatttcgcattccggtctctcccagtaccagacaaatccccagaatcagaatacccagtttttcctttttcggccgcaggatcaataacagcagcataaatactgccaccgcatatactgcattattacgaaactgcatcatcagacagccctcagccaccagaagaatgttcatgaggattttcttttttccgttgctgaaataatttctctccagaaaaagtaaaaagaacaacgtaaacaatatggtaaacaaggtatcctttgtggtacacaccactaaaaccgtgttgtatgggaaaagcgccagaaatagtgttgttaccaccaccggccattttttagcagtcatccgccagatcatggacgttgcataacccatgaccagagcatacagcaccatctggaataccgccatacaggccattcccgcctcgtaggatccgatggccgttccaatctgtaaaaacagccggatcagccatgtatgtgcaatgggctgcaagggataaaaccattccaggcccttatacgcttcgttgacctgtctgtgaaaatcgtaagacatgatgatcgggtaataagccagccataccggaatcaggcacaggaaaataacgactgccgttactgcgaatacaatgtcggacttccaatatctacccgacatcgttgcttctcctctcgcagagagtcggtctatcccgtcaagcaacagatttgcaaaaggaaatgcggcaacacttaagcacagcgcacggatcaggatcatccctttgccccggactccgcaatccgtcattcccagattctgcagctgatatcccatgaccatggacaaggcaaacaggaagctgatcactgccacataacagattctgcgcttcctgtcccttttctcctctattttccggagattttgctccgtctgctgcaacatagaatagattcctacagccagtagcacattcagaacactgtaatagatccggttcaccggctgtaagctgaacagatatgccaccccgtagacaccgcacagagacagaaccgctctgcccgaagttcctttgtatttcatccatttatcctttgcaatagtcaatcgtaagatgcctccatacatttatttccatttcttccactatattgaaatttacactttctgtcaatcattgtaagttcttttctatttgatatattgtatatatttaacaaatatagtaatgattcctattattatatttataatttttgcgcatttcttttttttataaaaagagatatactatatacagaaacaaggaaatgtttccacaaactcataaaccaacagaaaggatgatagattatggcaaaattatatacgatcactttaaatggcgttacagaggaaacttacaatcaggctaccgattatattcagaaaaacgcactgcgtctgaactaccgtccggttgcttccaccattgatgtggaatttccagatgacatcgatcccgcgaaagctccggagcttaccgacgcagtgatccgcgaggtgcatcagactctgtaattttttttgatttttacttttgcaaaatggcaaagcaaaagtccgtcgatgctttaacgctccgacggactttttttgctttattcatactccggttgtcctacaaattccataagttcttttgtatctctcactcctcttgccttatgcttgtctatctccttctaccgtcatatcaggattaacccctatgcttccgatttgcactctaatatcacgacttccgtcatatgccagtttatcaattgttttgtttctgatcagataattaactttatctatacgattgttctgtgccaatctgcgtgctaattcagcaattccagactcattcgtctctcttttggtatgagaaggcaccacacaaatactcacattttcacatatttcatcatctaattgttgaaagaaataggatattttccactaaacatgtatttttaggtattcatcatataagatatccatgtgcagccagtcatagtggttccgcatatagtaacaatgcccccggtatctgccacttattctgaatcctgccttctcgtaacacttaatggcaggggtgttcgtttccagtacatccagatggacactatacactcccagcaccataaagcagtaccgcaagagtatctgcacgacttcggttccaatgccttttccacgcaccgccttttctccgatgttaatggataaccaggctgacatatcctcagttcgatggtcaatatgacaatatccaatcaatgcgtctgtctctttcaggacaattcccatccgcatgacagaatggtctcttacccaaccgggcatccgggtgatgtccaccacagaatgcgcatgctctataaagacacaggtggtttcatccgacatccacttcgcgtataagccgactgcctcctcatcatccctcagtacggataaaaaaatttgatttccatctaatctgcatatatttttactcatcatgccaccttacatctgctctgtgtgttgcgaagtccttgatgttatttgaattataacatagaacttcctttttgggcactatattcttcgaacatccgccgcttacgcaaagcccaaagtctccgcagacaatcacatagtcctgttcgccctcacaatctcattcaggcgtaccggtctgtatccatataacatgcagcccacattataagcgttctccctctgattcatatattcccatgtttcatccctcttatcgtgaatatgaccataaaagtgcaagtgacctctgtaagagccattccattccgacatcagataatggtacagacatatctctttcccactatccgacacgtacagcatcatcctattgatggaatcacaatatcccattgcaatctcattatccagcagcctggtatcatggttgccaagaaccagatgcttatgtccctttagttgactcagataccattccgcacttttttcgtttctatagcagaaatcccccaaaatatacacattgtcatcatgatttactctttgattccataaggatatcattgcctcatccatgacttccacatttttaaaggggcgatggtcaaagtcaattactcgccctgcatcttgggcataaagggatacccgcagggtgttttcttaattttgccctgctttctgggcatagaagtatgccgcaggcaagggcggaaaaaaggaactgccgcatagacagcccgaaaaacatggattccgtgtaattgcggatttctttatttatctttacttccaatccataaacacctcctttttagcacaaaaaaattgccatctttggaaaaatgacgattcttcaagttttactccgtttacttccaactcattcttgcgttatatacattgtttacagcttcaatatagcatatgaaagagggatggtcgtggtcgttctgccgcaggtatctgtttttgatattcaaatactgcgttctgacaagctgccattttccccttttcttaatatacttagcctttttctgtattcctgcggaatgaggggctttgttccaatagtattcatcccgataagtgaaccctgtttttttgtgaataagtctgtaaaaatcttcctctgtatctctgcatacaatgcagacatccattgaaaactcagtaggatttcctctaacaaaatgaattttccccgtagtcagagaagatgttgaatcctcacaatctcctaaatcacgctcgtttaacgccttattaaaggatttcctcgcacattcttttagatttctgcgatcctcaaaatcttcacatcttacaatctcaaggttgtaatccaaatctatcgacaacgaagcattttgcaccccgtccttaaatatatatacacgtttcatccgctttctcccttacaagcccatcatttcacgcacgacacagtctgccatcttgaccgcaccgacaaggacgagcatattgaataccagttccccgatatagctccacaccatcgtgaccgcagccgcatcgggattgaccacgggcggggaagccgcaaacaccgaaaagataatgcaggcaagcacgatgattgcaccctcaaggcacacggcacaataactcttgataaagctcctgccgacattctggctcggctctcccgcaaagaagaaagagggacgggagcgattgcggtataaaggtacagcttgaaaaacctgccgtacaccgacattatcataatgaacgacagcactgtgatgaacagcccgccgatgagcgtcaccgcccataggggaatgctttcaaaaaagccgcagtcctccacggctgtcacaatctctgtcggcaacatcgtctttttgcgatttgacatagatgcgtcctcctttcgcatagttttagccactttgtcaaggtggctatgtaaacaagtacaagagaacgcaaaaaaccgcctactcttaaaatcaataagaataagcggctttgtaatttgccttagacatattcaattttcattctcttggtcggtgcatttatgaccttaaaaataagctcgtcaacaaaatccgtatcttttcctgacttaatatccttcatcatctgattaaatgaaactcttccttcccataatatgaataccgaattttaatccaagttcatgtacataagaagcaggtgtgtaaatccgcttccgtctgctgatgacggaaatctgccgggactgggctgaaaacatgcccagtcaatccttccaccttcacacatcataaagaatctggtgccattatccaatacttcaatacccttttgtacatagtcagataatgcccattctccatctgcacgatccatatcataatccatagcgtcgaaatctgccagatgctcatccatcagaataacccttccatcttcatccgtaaccgcttctgcatcagcctgtgtataggtaaccttgtatcctgcttccggtccgtccagtactgctcctccacggtcttcatagctattgctcggaagtgccttgacataatcttcatctgctattgctccaagatagtcagatgctgcctcaaactggggatagctcataccatcaccaataaacagaaaacatatttcggtgcttttgctgtttcttcttgcgtctgcgtttctgcagatacttctgttacgattgtttcctgctctgttgctgctgtactttctgtctgtgccggtgacggtgactcagaagaagtctggtctgctgcaggtgctccggatcatgctgccatagacattgccattacaacagcaagcatacccttcatcatactcttaattctcataatcgttt

SEQ ID NO: 5577 - DNA, 125225 bp, Unknown
  gut microbiota DNA sequence
atcatttccagaccgaggaaccatcggtatgcgacattgacttcgatttcttttactgtctggcgcatgcttcggatgccgtacagatactggatgaatggaattttaatgagcatgaccggatccatgctgggacggccattgtctgcactgtatttatcgatcacaagttcatagataaaactccagtcgattgcctggtcaatcaggcgcagcagatgatcctgcggaacaaggtcatccatgcagaacatctgaatctgttctcttttcttatctgcattctgtgtcatcataggaaacaccgcctttattttgatactttcattataccaaaaaagtagtgaaaagtcccgtaaatacggcattttcactacttcttatatgcttgtaagtacataatttttgcagtcatgacacaagaaaagctccctcacaggaaggagctttgtctacagtctgaggcatactcgcgtatgcctttttctaccgtatcatcctataatcaacctttcatctgagcggcaacttctgctgcgaagtcttcgttcttcttttccatgccttcgccaacttcgaaacgaacaaccttagcgatggtcagagccttgttaacgctctccaggtacttagctacggtctgcttgccatcctcagccttaacgtaggtctgatctaacaggcagatctccttcaactgcttggatacacgaccgtctgccagacccttgaagatcttgtcagatacgatagcgtccttgtcagccatagccagctcagccagagcagctgcagcttctttggacagaaagttgaacaggtagttcatgttgctcttcttctcttcgtagatagccttgtcctcatcgctccatgcagaactgttcatagccttgtcgatcagcttgttcagaatgggcttaggcagggatgcaggatcgttcaaagctgcgtcaacagtgatctcctgtaacttagccagctcttctgcggaaatatcatttctgctgatgtaggtaggattcatagctgctacctgcatagcgatgttggtcagtgcttctcttgctgcgtcatcagatgcgccgttagctgcaacgataacaccgatacgtccgccaccatggatgtaggatactgctacatctccggctaccttctcgaaacggcgaatggacagcttctcaccgatggtagcagtcttctctaccagagcatccttaacggttgcgccttcgaaaggaactgctaacagtgcttcgatatcttcgccatccttgccaccttgtaaatcggaagcaagtgctgctgcattaacagcctctacgaaagaagtaaaggtctcgttctttgcaacgaagtcggtctcggagtttacttcgattacgcaagcggtcttgccgtctgcggagatagctgcacgagcaacaccttctgctgcgatacggcttgctttcttctcagccttagcctgtccgttctttctcaggaactcaacagctgcgtccatatctccattggtctcgttcagagccttcttacaatccatcataccagcgccggtcatttcacggagctcttttaccatagatgcggtaattgccatttttttatcctctcttcttaattaatatattatcctcaagaacccagaccgtaatgacaggcatcgcaatctgggttcctatgcttttcttatggaatcggattattcagcgtcagctgcaacctcttcgatatcctcagcctcggtagcaacgtcagcgtcactgtatacagcttcgccctgctttgcttcgatcacagcatcagccatcttggaaacgatcagcttaacggctctgatagcgtcatcattaccggggatgatgtaatccagctcttcaggatcacagttggtatcaccgataccaatcagagtgatgcccagtgcatgagcttcctgtacgcagattctctccttcttgggatctacaacgaagatagcgtcgggaactctggtcatgttcttgataccgcccaggttcttctccagcttctcccattctttctttaactgaataacttccttcttaggcagtacatcgaaagtaccgtcctgagacatggtctcgattgcatgcagtcttgcgatacgggactggatggttctgaagttggtcagcataccacctaaccatctctcgtttacatagtacataccacaacgctcagcctcaacctttacagcgtcctgtgcctgcttcttggtaccaacgaacagaatagtgccaccctgtgcggcgatctcggatactgccttgtaagcctcgtcaacctttacaacggacttctgcaggtcgatgatgtggataccgtttctctcggtgaagatgtaaggagccatcttagggttccatcttctggtctgatgtccaaaatgaacacctgcttcaagtaactgcttcatagaaataacgctcatgtctttacctccatttggttaaaatcttccgcatttcttttctgccgggacgcgttaagaacccggttagctctggcgaagacctctgcattttggcaggagcaccatcgtcaaatcgaaaggcgtgttttttgtcacaacagtgcgattataacataggaaaacccctatgacaaggggtttttaatgttttcctgtgattattttagcaatttcctcttcggaagtcccgggagcgatctcatatgtgccgggattgatactgcggctgtagccgttgttgcataaataattgtcaaatgcctttgcattctccaccagtccagcctcatagagccatctgctgacactgccggaatcatcgcctctctggattgttatgctggcggtctgtgtccgctgtggtgcttcggttacttccggctctgcggttgtctccggttccaccgtagcctgtgtctctgcgggaaccgtggtctccggttccgcttctatattgttctgttcctgtgtctgcgtggtttcctccggtgtgccttccgtcggctgttttgcactgttttgcagtgccgccagcgtcagttcactgctgtccaccattccaagttctgccgcacgctctctgatctggtcatccgtcatgatctgggatgtctgatcctgccggttggaaaaactgattcccaggatcaatgccgtcacgatcataccgattccgagacctcgcagataatattttaatttcatcgatatctccgtccttaattcacgcgattactgtcaggccttatacaggtcgatcacaagctttacttcaccgacacccagccccagttccttggcaatcgccactgtggatttgccctgtctgtgcatttccagaatcttctcgttattgttctgaccttcttctgcggtctcccccatgaatccgatctccggggagccggacggctctatcgtctctgccggttcctgtacttctgtcagctgttcttccgtcacattctccttctgtgtcttcacgttctcttccgctttgaccttagccttgtcttctgccgccttcactgccttatccattttggatacggtatctttgatattggcatgcttattgttcagcatatcgtataaaaacatggcttcctcatggttcttgtgaatctcctgcaataccgtatcggaatattcactcactgccatgatcttttcattagtcagacgttccagggaacgttctgccttctccagcgcatcttccgaggtctcgtccattttatcctgcatctgactgcgaactgtctgcatttcttcttccataagacctttgatctcttcttttgctgcttctttattgattccgctttcttttccggaaggcaataaaaaacttcctataaatattacgattcctgcgatcagcagaaccacttctaatatacccatactgcttttcctttgtattctcagatcttaatgtcaaatccctgatgctgtttcgtcaccaccacaccatctttttcggaattttcttttttccggtgtttaccaccgttaccggcatactcattctttcctttttccttggcatcatactgccccgtataccagtctgcattatcactgctgtgcacttctctggtccgctgttcactctgtttctgtgcatgctctcccagcgtcatctgttgaaatgcacccttattgtcttcattctgcttcatcgtcgtgtaatcctgcgttcgcgggatcgacgcaacctccaaagatccaaacgacataagacattcctcttttctgccattttctgttcctgcaacaatctgctgccggttacagtggtgtggacttcacatctccgtcaatgcgctcgaaccggcaataatgataggtactcttcacctgcatggaagaatctccgatgatgatcgtagtacccgggtacacttctccccgtacctgcaccatggcccgctcctgcggattgaactccagctgcagttcctgcatacgccggttcttttcctccagactcttattgagtgtctccatggaagctgcagtgtttctgagatagttgatctgatccggtgtaaaacggactcccttgctctttttttctgcaaaattcgcaaggatcggctgcagactgcggatattcttcacaatctcggagacttccttctgcatcttcatatattctgcctttttctccggatccacaccaacttccactaccgtcggcgctcccagcattgcccccagcgtcttaacctctatcttctgtccggcacgtacatgaccgccggtgataaatcctcgcttgccggttacctggatctctgttgccgctatcacattgctgtgcaggatcgactccgtgctgacatagcctccggcactggctgtagcattctccaggaattttgccacaatattgcccccagctttcagcgtaccctttgccataccattcattccgcgggcaatgatgatattgcccccagcctcaatgtaggcaccttccacgacaccgcttatgatcacattgccgcctgcccggatgacgaaattggaggaaacattgccatttacctgtacgcttccctcaaaatcaatatttccggtagataaatccacgttttccacttcgtaaacatccgatacaaacacctttccctctaccagggaaacatgtccgtctaccagggaagtgagtcttctccggtcttcggaaatctctatattatgaccgaactccagatgggcttttttcacctgtctgggccggatcttggcaccctgtacggtagttccgtactctccctcgtcctccggaatgacctctgccagcagctgtccctttttacaggggttgatcatgttcagatggaaataatccaccgtcccatcatctttcagtgtcggctgtgcatggacatccgtattaaaataatatttgatataggcgtctgtgccatgtctgggttcttttccccgggccactaccagatcggtgcaataaattccgtcagacataaaatgatcctgcagaacactcatctggattccatagacaatattccggaaccggagatctttgatcacactgtccattgttgcccgtttcccggtctgtgaagccggatagaaccgtacgattgcctgcaaattgtcctcactgacttctatacgacaggattcctcgatttccggacaatcctttcgttccagaaagcagaccgcgtcttcttctgcgagtatcgcctttttaatggacatgggatcataaggtatggattgtctgtccagataatccattacctcctgcagtcttacgtcctctcctccatccttgggttggaagatctgtaatccataacctcccggtgttctcaccacttgaaaatagccattctgcatacgccttttcctctgccttcccatcccgcattccattacgggtcaacgaggttctacaaaagtcccatgtagtctcccatttttgtcttcattttctgtaaagcacgggtatgtagctgggataccctggactccgacacctccagaatgttactgatttccttcaatgtcagatcctcataataatatagcgtaactactttcttttccttttccgtcagaagttccagtgcttctcccagaaccttggtcagttcttctttttccacactttcttccggaccatcaaaacgtgctgtcatatgtctgctataatcctgtgagacatcacttccctgatccatatactcgttcagggatatcaggccggtgatcttcatctgggactgccagtccagatattcctctgaagaaattcccagtcccgctgcaatgtcttcatccgttgcactgcgtcccgtggtctgttccacttccttgatgaccgcgtcgatcttcttctgccgttgtcttatcgttcggggaatccagtccattttacggatctggtccagaatggctccccggatcctcagactggcataagtctcgaactttacctctttgaggcagtcgaacttgtcaatggcatcaatcagtccaaaaatcccgtaactgaccaggtcttcgtaatccacattatagcccagatacatactcagccgtcccgctactgccttgactagcggagcatactccagtatcaactgttctctggtctccggtcgtttattagcagcatattcttctaataaccttttcttaccggcttcatccattcgaatcgcttacacccttctgcgctgtgtcctcctgtgacccagcagcttcttcctcttgtaaagccttctctttttcttcctgctcctgttttgccttctcttcattctgtctgtcgaaccggtccagcaacagccggatcacacttcccagacaataaaacagcagcataacagtaaaaagtgccacaagacttgccagtaacgaataacttctcaccagcgttacgatccaggtacacgcacctgcgatcagcatcaaaagcaatggcatattctttctgttcataatttacccatccggtcatccatccttaaatgatggactcactctttcctaccgcacgaatatggaactctccggtctccggataaaaagttacggttcttccgtaattcttacctgtatcctgtgccaaaataggaatactgatctctttcagtttcttcttcacagcctccacgttacggtcccccacctgcatcatgtcgtttttcccctgaaacgtgaacatagtagctccgccagcaatcttggcaaccattctcgcttttttggctcccagcttctccatctgtcgtaccagttcatcgattccggtatctgcaaattttgcaatgttctgactgctgttacggatcgtagtgctgtccggcagcataatatgtgccagaccgcctatttttgtcaccgggtcgcggattgcgattcccacgcaggagcccagtcccagagttgtcactccatctgggcttacacaggtcttcaggtccgccatccctactttaataatctcgctcattctgctccccttcttctgcgcttctgaatctatgctataggtattcccaaagatgtcagaatcttcgggtaggattcaatatcgggaaccagaataaaatatccgtcgatctcaacttcgtcataaaactgagattgtatcagcagaatcttgtctcccaatgttccgaattcaatggctggaacactgagaatagctcctgccatatccagtgtcagagacggtggggtaggaataatggtcagattcgtcatcatggacagggaattcaggtaagctcccgtaataatgttgccgatctcctgcatggcagaaaattcgatctcggagaacccttcctgctgtaccatgtctcccatgatcttatggagaagatgcttggcgctgccctgttctaccagaaacatcatgctgccggtgatatctccttccactcccaggaagacaccgaccattacctgctcttctcctcccatcaatgctcctacttcgttgaaatccaaaagctttacctgcggtaccttcatatctaccttacagttcagcatctgggagagtgctgtcatagcgttgcccgctccaatgttgccaatttcttttaaaacgtccagatatgtttccgaaactttctctaaactcagatctcccatggatcagtctcctttatgcattttcctccaatgtgatggaattcagatccaacagagagatcagttccccattgtgtttgcctacacctgtaataaagctctttttgctctcagcggtattctgtgataatttctcaatctcactgcttcccagagtcactacttctcttacttcatccacaatgattcctacactgccctgctgttcctgcttcagaatgatgattctggtagcacgggtcagttcgtctgcctccagtcccatcttcacgcgaagactcatgaccggcagaacctcaccacgcagattgatgacaccttttaaatatgcgggtaccttgggcactctggtgatatgctgcattcttacaatattgtcaatgtatcggatatcgataccgtactgctcatctccgaggcggatcacaatatactggaaaaaatcctcctcaactttacgctcgtctccggcctttaaagtttctttcatgctaagttcttccataactgtcatctccctccttacagtaatgcgttggcatccaggatcagtgctacttcgccgtcaccaaggatcgttgcaccactgatgaatttgcactgcttgatgtatttgccaagagactttataacgatctcctgctgtccgatcagttcgtcgataaccagacctgccatcttatcgcccttcttgacaatgacaacgatcaggttgtcctcaggggatctggtactctctacatccagtacctcagtcagacggatcagaggaatcacggttcctctcaagttgatcacttctttgttctctaccagtttgatatcgttgggagagatatcttcgatcgtctggatggatcccagagagatcgcatatttttctcctcctacgactaccatcagtgcctggataattgcaagggtcagaggcagtcgaatggtccaggtacttccctctccccacttggatttcacttccacttcaccgcttaaggattcgatcttggacttaacaacatccagacctacacctctgccggaaacgtcggtcaccttctcagaagtagagaatccaggctggaacagcaggttgataatatccttctcagacatattagcagcctgctccgtggttaccagattacgctcgattgctttattcttaacggcttctacatcaataccgttaccatcatcccttacttcgatgactacgttattaccatcctgataagcatccaggaagatagatccctgttccggcttgccacgctgtgcacgtacctctgcggattccagaccatggtctgcggaattacgaagcagatgcatcagaggatctccgatctcgtctactacggtacgatccagttcggtctcttcaccactcatatacaattccatcttcttgtccagcttcttggacagatcacggatcattctggggaacttcacaacaacgctctcaataggtaccattcgtaccttcattacagattcatgaaggttcgtggttacgttttccagatactcgatctgctcattgaatgcggaattattgccctggtcattgctggacgcagctaccagagagttcttggcaatgatcagctcacttaccagattcatcagggaatccagtttttcaatatctacacgcacggtacggttgacgaccggcttattggcgggtttcttttccggtgccttggctgcggctacaggcttcttttcttccttcttgggctgttctgcagccttgacctctgccactgcttccttcttctcttctgcgggttcgattgcttcctcttccgcatggtaattcttggtcttctccagttccagtaccgcaccggttacctgtgcgatctcagatacgctctctgcggacttgataatatcatccagagagtaatcagacagaacgatcagtgtgaagtccttgtcgaacttctcatcctctacatcctgtgcgctgggcatggatacgatgatctcacctttttcctccactgccttgaataccaggaatgctcttgcggccttcaggatacagctttcctgtaccactacattgataccgtatacatttttaccctgcttcatagcctctttgatcacacggatctggctgtcatcaaaagcaatgtcattccatttttcaccaccgtctgcgccggattcagctgcaggtgctgtggcagtgggagcctcttccttggcagcgggagcctcctccgtcttgccatcgtttaaaatatcattcagggccttgatcagattctcattgtcgttggttccctcatcagaggtctcctgaatattgttcttgtactcttccagagcatccagacactggaacaatacatcgatcatttccggttttactttaatattgccgttacgtacttccgagaacacattctccatgtcatgggtcaggttctgcatacgcttgtagcccatggttcctgccattcctttcagggaatgcgcggcacggaatatctcattgatattgtccatgttttcaggatctgactccagttccagaatctgtgtgttcaagttctgcagatgttcatttgtttcatccagaaaaatttcaagatattggcttacgtccatctcttcctccattctgccggtcacggtattgccggaaacggcatacattgcttgctactttactactcctacatgcagtatgatctcctgggcgatctgatctaacggtactacctgatctgccagcccggctgcgatgatactcttaggcattccaaatactacgctggtatcctgatcctgtgcgatcacataggactttttggaagctttcagtttcccgattccttccgttccgtccgctcccattcccgtcataacggcacagactaccgaatcaaagcggctggtctgcagggactcatacatataattggcacagggtctgacaccttccctgtaaggttcctccgacagatgcagcgtatggcgtccagccggagatgtgacaacattaaggtgtttgccgcccatggcgatgtagacccatccctttttcagttcttctccctctgctgcttcctttacatgaagctggctcaaattatccagccgttctgcaagggatgctgtgaatcccacaggcatatgctgtactaccagcaccggtgcatccagattcgccggcaataagggaatcaccgactggagagatttcgggcctcctgtggaactggcaatggctacgaccttgctacccgacacgctgaccggatgatgattgatgatcttcatcatctcttttaccgtgcctttttcctcggtaagcttcgcttcctcggcaaataccggcagtttgctgttcgctaccacattcagtgtccgcaggaattctctgcggaaattctcaccacgacagtctactgcgctgtccggcttatgtacaaaatccaacgctcccagttccagagcatccagagtggttctggcgccttccttcgtatcggtgctggccatcatcacacgggcgggaatcttgtatttacgcagctcctgtaaaagctgcaggccgttcatacgcggcatattcacatccaggacaactgcgtcgtaactgtttcggctcaacagatcgaatgcttccaatccgtcttttgcccggtcagccacctggaaccttatgtcagtatctattatatcacacagcactcttctcatgagtgcagaatcatcaacaaccagtattttttttggcattagtccaatctctcctttttacgactcttacgctcttcttcaaaaataaagcggatgatttcttctcttgtatttacgtccaggttatagtactgtacccggtgttcgaacgtccccttgcgtttctccagttctcttaccgccagtactttgcctaccacctcgtactttttctgttctccgtctttcaccagatgataactgcacaggatcagactgccgggttcatatcgctgggtagacacaaatcgcagtcctccgccgctgatgtccacgatcacgctgtgtttcaaaggaagtcccggctgcagttcataaggagaatttttctccagtgcctggatctcttcttcctccagatttctggcacacatatccagtgcgcagctgaaacgataatattctcttctctgatatttccgcagattgctggtcagttccatgaccagcacatatacgttgttgcttttgtaccggtctatgatccttgcaaagcactggtacaggctgttctcctcgaaaaagatcatgtcgtattccgagtccaccggcaaaagtatcagtctggtctgctccatgggcatggagatctccagggtatcctccgacagaatctgcagcacccggctctggtacacctttgccgtgctttctgctcccttttcctccaacccccgctgcaatgcgcggagctctattttcgatccttcttccacaaatctggataacataagttcatacctctcttatctggactgttttgtagctccatttctcgtacctataatgtgagaaaaaaatgctgccattccgcgcctgggctgctgctcctgcgctgtatcgtcttctttttcgcacattctctctgcgattctctgataagcctggcttgcctttgctcccggattctgtatggatacgggtacctgctgcatcaccgcctgcatgacctgaggatcctgaggtacacatcccatataagtcatgggaattttcaggtatctggtcacgactgcattcagcttgtcaaacagtacctggccttccttgatattacttacccggttggccaccatcatcaccttcgtgaaatcctcctggaatctcggatgtctgtacagtgccttcagcagagaataggaatccgtgatggaagtaggctccggtgtggtcaccagcagcacttccccgctggccaccagaaattccaacacactgtcagagattcccgctccggtatccacgataatgatatccgtcagggcatccagctccgccagattctgtatgatacaggtcagggcatcttttcccagattggacatcccggcaattcccgaaccaccagaaataaatcccacttccatagggccccaggtaatgatatcactgatgctcttgccctcgtaaaccagatcacacaggttgtgcttcggtattgctccgaacatgatctcgatgttcgccagcccgaaatcagcatccagaatgatcacccgtttgcccattttgcggaattgaattgccagattgatggacatattggattttcccacgccacccttgccggaagtaacggtaatgactcttgcagtaggtcgtatttggttatttgctttaatgatccttagctgttccgcctgatccattttcacgcgcctttctgttaaagctttcttccttcctctctattccttacctccgaggatctgtttcaccgtcttctgaggattgaacatttccatgtcatccggaacgttttgaccacaggtcacatatgcgatcggtgcatccgtataaagctttatgttcagcagattccccactgcttctgtttcatccaactttgtaaaaatcaactcaaactttgcgatctttccgtaacagtctgcgatcttctggagatccctgtattttgtggtagcacttaataccagaaatacctgatagtcctccggtctcttcagtccacccaccatttccttcattttctccaactgttccgcattctggtgcgatctccccgctgtatcgataaaaatataatcacagtcccagtaatcatcaatggcggtctgcaactcctccggtgtatagatcacgcggaaaggtgtctccagaatattggcataggtccgcaactgctccgctgccgcaatacgataggtatctgccgtaaggagagccacctttttcttgtcttccacacaatattttcctgccagtttggcgatggtagtcgtcttacccacaccggtaggtccgatgaaccatacgattctcggtccgtcctccgccggagtgattccttcggattttccgaatttcaacaccatcttctgataaatattcgccagtagataatcaaagggaagatccgctttctttgtcttggaagcatcctccagaatactgttgacatatttttcatccatctcattatccagcattttgttatacagcagacggatgaacttatcctgctccggattctgctcgtcctctttttcttcctgcttttccactgctgcttccgcttcactgtccaaagcttctttctgtgcttccgctgccttctccgtatttgcatctaccggtctgctgtttaactgactttccaaaagcgtctgcagactatccagctttttttctatattttccgtgctgtttttcatcgataccgtcttcgccgtacctacacctgccccggaagcttccgtacgattcagactgtttaccacagatctctgtggggactcatcctccagcgcagcggtcacctcgatctgcttcggtgacagaaaagagaacagccctttctttttcacttcacggacattcatgatcaccagtccgtttcccaattcttttttcgcagcctctgttgcctctgcttctgttttcccggtaaatttcttaattatcatactgttcctcgttcctgtgtcggttcaatgcgcttaatatcttaagctgtgaccatacccacagactgcaattccacattcgattctacttcgttgtaagacactacgaccagatccggataataatcttcggtcagccgcttgaaatacattcttacgatcggtgatgtcatgataatgggggtctttcccatgttttccagctttttgatctcttctcccaccgcattgagaattgctttgcttctggcgggatccagattcaggaaagctcctgtctctgtctgttttacgcttcccatgacttcctgctcgatctttggatccagcgtcagcacactggtagtctcgtgggaagggaaatacttggtggagattgctctctttaagctctgtctcacatactccgtcaggatatcggtatcccttgtcgtcggtgcataatccgccagagtctccagaatcgtcagcagatcccggatggagattccctcccgcaacagattctgcaatactttctggatctcgcccagtcccaacaactttggtaccagctcgtccaccagagaaggattgttctcttttacattgttgataaggttctgtacatcctgtctggtcagcagctccgcaatgtgctggcggatgatctccgtcagatgcgtagcgatgatggaagggggatctactaccgtgtagcccaggctctccgcccgctctctctgaccttccgtgatccagatagccggcagatggaaggaaggctcgaacgtggggatacccgtaatctcctcttccacataaccgggattcattgccatataatggtcaaacaggatttctccctcactgacctgaatacctttgatcttgatgatatactgattcggattcagctgaatattatcacgcaaacggataataggcaccaccgtaccaagttccagcgcaatctgtcttcggatcataaccacgcgatccaacaggtcaccgccctggttcacatccgccagaggaataataccgtaaccgaattccagctcgatgggatccacctgcaacagactgttgacattttccggctgccggatctcctccgccgcagcttcctcactgtctacctcctgttcgatctgtgctgtctcgatcgtgccctcgatatttcttgccacgatgataaacaccagtcccaatcccacgaacaggatcgtgttcaattctgtcacgaatcccaggattgccagcatggctcccaccaggtacagacccttgggtacaccgaacaactggcttaccagtgtcgtaccgaagtcagcatccttgcttcccttggtcaccagaataccggtggacagtgagatcaacagggaggggatctggcttaccagaccgtcaccgatagtcaggatagcgtatttattcagagcgctggtaatatccatgccttgtctcgtcattcccatgatgataccacccacaatattgatggtggtgatcagaagacccgcaaccgcatctccttttacatattttacggcaccatccatggaaccgaaaaagcttgcctcttcctggattttctctcttctcttctttgcttccgcatctgtaatggctccggtgttcagatccgcatcaatagccatctgcttaccgggcattgcatccagggtaaatctcgctgttacttcagatacacgctctgaacctttgttgatgaccataaactggatcaggatcagaatgatgaagataatgacaccgatgaccagatcaccgccacctacgaactcaccgaaagtttctacgacattacctgcattgccgtctcttaggatcagacgggtggatgaggtattcagcgcaatacggaagatcgtggtaaacagcagcatcgtagggaagaaggacatatccagaacttccttactgaacatcgtggcgaacaggattgtcagcgccacggaaatattaattgctaacagaatatccagcagccaggagggaatcggcacaataaacatgataatggcagccatgatataaattgctaccgccacatccgcttttttcattttcatctgtgcctgacctcctttctctttttgtgtattttcatctttttgctaatgtttctatttcttctctatacttctatactttcccttgcagatgatatacaaacgccaggacttctgctaccgcctggtacaattccggtggcaccgcctgtcccacatccacatttgcatatagcattctggcaagtggtttgttttctacgatttctatctgatgctctctggcgatctccttgatcttcgctgccagataatcctcaccttttgcgatcacaataggggcatccgccacctccggatcgtatttgattgccaccgcataatgggtggggttcgtgatgaccacgtccgcctggggcagattctgcatcattctccgtctggaagcttcctgcatcttctgacggatacgccccttgatctgcggatcaccttcctgctgcttgtactcttccttgatctcctgcttggtcattcgcatgtctttgctgaatttgtacttctggtagataaaatccgcagccgaaatgatcatatagaccagagacacccggattcccagatctgtcaccgttccgccgatcaatgcaatagcctgcatcagatccatatcatacagggaaaacagcagaggccatttatctttcagataattataacatatgtaagtgatcaatccaatcttcagaatggacttgatcagttccaccagcgcattggcagaaaaaattcttttgaagcccgaaagcgggttcaatttactgaacttgggctgtagcggttttcccgtaggcttccagcccacctgcaccacatcgctcaaaaatgccaccactaatcccagcaaaaggagcggtgccataatgatgatggcctgtaaaagcatctgccggaatgcgattgcggtgtcctgctgtggcatatttccatgccagaaagtcaccacctcgggaattctctcgtaaatgacgctgaacacatttataaactgataccccatgtgtcctacccatattttcaataccagaaataccgtcagcagacccagcccgttggcaatttcacggcttttggcaacctgaccttcttttctggcatcagacagctttttctcggtagcaggctctgtcttctctccgcccatcccttctgcagcgaagaattgcagatcatattccaggatcacatcatacctccgataaaagatactaccatctttttcatttcctgatagacaaagtcggcagcccccggaagcatcccggtggtaaggaacattgccgtcagtcccgccagaaccttcagctgaatacctactgcaaacatattcagctggggagacaccttggccagcactcccaggattgcattcagaagcaatatcacacaaaaaatcggcaatacaatacgaaagccgatcaggatataatcactcataaattctgtcatggattgtaacagactgtccgcgtgaaacaccaccccgttcaccgggatcagtgtaaagctgtctgccagtgctccgaaaagatacctgtacattccggaagcgatcagcatcagcataaaagaatactgatacaagacaccggtaatgctggtggtctctttcgtagccggatccagtaacgtagccatggacaggcctgtctccatgtcagcaatggaaccggcaaaattcacgactgccatacagatattggccccgaaaccaatcagcagcccggcaattgcctctttcatgacgatcaccgcatattccatcacagtgtcaacaactaccgcatccgccggcgtcagcgtctcataaagcagccacgccgtaaaaaagctgatgccgatccggattctggccggggtgtcattcatcccgaaataaggcgctatatatacaaagcaggatactcttacgaatatcagcagaaaatattcaagatcatatattgaaaaagaaagatctaccatatttcttcccgtcacctatgtacatactggctgaaacttgaccacaattgcaccgtgtactccaccatcgtgttcatcatccagtgtccgataaccaccagacataaaaagatggcaacgatcttcggtacaaaggtcagtgtctgctcctgaatggaagtcaccgtctggaaaatactgatgaccagaccaacaaccagggataccagcaacaccggcagggacaccttgatgatcacatataacgcattattcgtcatttccgatactgcatctatcgtcatagcaaaacctcatcttacgaatctaataaaatgtctgtaccagttgccctatgatcagtgcccaaccgtctgccagtacgaacagcaggatcttgaagggcatggagatcgtcgtcggcggtagcatcatcatacccatactcattaaggtggatgccactaccatatcaattacaataaaaggaatatagatcgtaaagccgatccagaatgcggttcgcagttcactgatcataaagctgggaaccaacacggaattcggaatatcctccagggttccgtcccactcctgtcctgcgatatccatgaacagttccacatccttcacctgagtctgtggatacataaattcccgtaagggtgccatgcctttttccagagcctcatcctgatcgatcgtgccctcctcaaaaggctggattgcttcctcattgatcctcgtgatcgtaggctccataatgaaaaatgtcaggatcagtgccagtccgatcaggatctggttcggcggtgccgtctgggtattcagtgcagacctggtaaaatgcagcacgatgatgatcctcgtaaaagaggtcatcatgataataatggtcggtgccagtgcgatcagcgtcagagtgatcagaatccgaagcgcaccgttgatctgtccgttaccgttattgtaggtaatgctgacagtattcgccgtattcagctgtcctacctcttccggggtcgtggctgttcccgccggattgatcaccgtggaaacttccgtatctcccgtcagatgacgctccgatgcctgcacctttaccggcgtacaaatacacaatatgcctaccgtgaccagcaggcataccatatagataatcgtctttaattttatacttgcatcaatgatctttctcttcattctctttcttcgccgcacgttccaataattcccggaacccggaagtactttccaatgtagtcttacctttcagttgttctgcaggaatctgtcccagggccgttacggtatccttgcagaccgcaatggcaaaataagactcaccgatccggaccagctgaatgtatttgttatttgcgatccgaacggtctctctcacttcaatattgcctgccgctccctgttgtttctggtatcctgcgatccatttcgttaccaatgcggttaccgccagtactgccacaaagatgaacaatactgtaatgaactgggcataactgtctgcttttccggtaagtatgatcattaacccactacctttttcacagcttcaataacacgttctgcctgaaaaggttttacaatgaaatctttggcaccggcctggatagactcgataaccattgcctgctggcccattgcagaacacatgataaccttagcaccaccgtctaacttcttgatctccttcagtgcctggatgccgtccatctcaggcatggtgatgtccatcagaaccagatcgggattcacttccttgaacttctccactgccttcattccgttctctgcttctcctgcaacattgtaaccgttcttggtcagaatgtccttaatcatcattctcatgaacgctgcatcatcgcagatcaaaatattctttgccatttaattttcctccatttgtttggtctattctctgttttatttaataatttccgtaatacggacgccaaagctttcttcaattacaacaacttcacccttggctacaaattttccgtttaccagaacatcgatcggttctcctgcaatacgatccagttcaatgatcgtacccggtgagaactccagaatctcggaaatggatttcgtcgttctgccaagctctacggtaacttccaaagggacatctttgatcagaccaatattttcctgtccggaaagtcccatgctgtcatttgagaagctctggaactgtgcaggctgcacattgacattctgctgcggcattcccatattgcccatctggttcatcatgcccatgccattcatctgttgcattcccatgttccccatctgctgcattcccatctgaggcataccattcatccccatctggttcatgctattcatgtccatgccaggcatctgattcatacccatgccacccgtctggttcatgccgttcatctgtggcattcccatgttgcccatctgattcatgccattcatatgattcatagccatgggatccggttgctgcatattcatctgagtcatattgtttgcgccggcattcatctgtcctgcattgttctgcggagctgctgcgggagcaggtatgctttccggctgagttgctgcctgatcgttgctttctcccaggcttcccatctgggtattgataaaggtctctaccagcttacgggcaaaatcgatgggatacaactgcatgatagaactgtctaccagatcatcgatctgcatacggaatgcgatttttacaaaggttcctcctaaaaacggagatatttccttgccatcctttacctctgtcagatcaaaaagagaagactcaggcgggctgatatcaattaccgtctgcaacagtgtggaaagggaagtcgctgcggagcccatcatctggttcatcgcctcggaaattgcactcagatgcagttctcccagctctccatctgtattcgtaccatcaccgcccatcatcaggtcagtgataacttttacatcatgttcttttaataccagaatattggtaccgtccagtccctgggtatatttgatctgaataaatacacagggcttttcataggcgtccagcaggtttttccatgtagccagcgtaaccacaggagttgtaatatttactttgcggtttaccagtgaatatagggttgtggcagaggatcccatactgatattggccacctcgccaatcgcatccttctctacatccgtcagttcctctccgtcactgacaaccggtgctgcgttctccgcagcttcattctcattattataattttcagccgtactgttctccggtgccggatctgctgccgcatcaccgccatccgcggtatccgacagatccataccttgcagcagggcatttatctcatcctgagataacatcccatccatcgttactcctcctctctgatcaccgatgtgatctgaacagcatacgaatctctatccgtaccgggcagtgccgtgaactttttaatattgcccacatacacattcatgtcggtatcgactctggaatccagccggatacagtcgcccacctgcagattcaggaaatcattcaccgaaatggtgctccttcccagcactgccttgatcggaatatctactctccggatcatggactcaatgtactcctcgtagtgttcatcgtgattctcctgcattgtggagaaccagtatttggtgttcagtttatccatcacatcttccagtgtaaagaaaggaagacagatatttaccattccttcgacatccccgattttcatattcagggtaacaatagcgatcatatcgctgggagcaattacctgtgcgaactggggattcgtttccagccggcttaacaccggtgagatctcaacaacgtttttccagggttcacgcatcagctgcgtaaacatgaccaaaagcttctgtaagattgtcagctctatatcggaaaaatctctgctcttttccaatggctggccgctgcctcccagcatacgatccagcatggcataacatagattagttgcaatctctataataatattgccgttgagtggtgcaaaattaacaattccaagcaccgacggattcgaaagtgcgttggagaactcactgaacgtaaccgtttccgaacttgctaccgatacctgcacgttcttgcgcagatataccggaaggttcgtagagatcagtcggctgtaatgctcgaatatgatctccaaggttcgtaaatgttctttggagaatttggtagggcggctgaagtcatagtttttgacctgcttctcgtcctccccctggatctggtctacatccaggtctccctcagacaactgtttcagaagattatcaatttcactttgtgaaagtatatcactcacaggccctcacctcctgtcatcttattttcccgcttcatcagccgaatttcactccgctgattgcgaccttgtagatgaagtcggattggaatagatcctgaacagacttcagaatctcctcttttaagccttccatatcctctctgcactcatcctctgtatgtgcggaaacggtagccgtgatagcatccttgatcaggttctcatagcttgccagcgtgtcactgctgccataggtcttataatccttatgcttcttgttgatagacaaagatacatcaaacatgatgtaatcctgttttgctcctgcttcgctcttcagaggaattgtcatggagtctgcaatattatatacctctgtatcggtaagggcaacattcgttgtttcttcatcccccggaacggtaagttccagattcatggcagtggtaatattgtctaccagttgtgcggtcttcttattcgtacccacaatgctcacaagcatgacgctggtcaacacaatgttcaccaccagcagtgccagaatcaatactgtcatcagatttttcttcattggtcttatgcttcctttccctctccacactaatatgttgtggatggattatagattctgatctctacacgccggttcttgctgcgcccctcttctgtggagttatcagctaccggtacacggtcacccatccctgcgtgtctcagatcagatggatccagagaggtagtctctgtcagataatagaacacggaaagtgctctggcgctgctcaattcttcattatcggcaaacctcgcactgtgaatagggacattatctgtatgtccttcgatttctatggtggaattacttccgtaacgttccaggatcactcccaccttgtccagaactgccttagcctgatccttcaggctgtcacttccggaatcaaacaacagcgctcccttcatagataactgcacatattgtgccgtaaatgacacactgacctgatctgcaaggctgtcctccaccagagcttcctgtactgtttccgccagttcttcgttgctctccagatttttctcattcagtgcctcttccaaagcttctgcgttgtcatatttctcataattatcagaatccgtctcactgtctgcgtttcttccggcattactgatatactcatccagatcattcaactggctgacgccgttgctgatcagaataccctcaccgattgccgtggatccggcattgaaaatgctaaaagtgctgttcgacatagctgctgccatttcgctgtacttggttgcatctatcgaagacatggaaaacaacataacaaagaagcacagcagcaagttcatcaggtcactgaatgtggtcatccatgccggggatccagcaggtggatcttcaggcttacgttttgccattatgcttcaccccctgcttcctcttcaccatctgcacttgttctgtccttcggaggaaggaatgacttcagtttttcttcgatgacacggggattttcaccagcctgtatggataaaagcccctcaatcataacttccttctgctgcatttccacagcattatctgcttttaatttattggaaacaggcgtacaaatccagtttgccagcaaggatccgtacaatgtagtaatcaacgccactgccattgcaggtcccagtgtggacggatcgtccatgtgatacaacatatctaccagaccgatcagggtaccgatcataccccaggcagggcccatggccgccagtgtatcccagaaaccgatcgtctctttatgtcttccctctacacttaccagttctgtctccatgatggcacgtaccagttcgggatcggtaccatcgacgatcagaagaattccctttttcaggaaaggttcctccagatccgttgctgcttcttccagagacagcagaccttccttacgtgccacattggaaagctctatgatcttgccgatcatctcggaagtattcagtgccggtgccttgaagatcagagtaaaggatttcagacccgctatgtaattctgtaagctcatggacatgagggtacaggagaaagctccaccgaatgtaataattgcagaagccggatccagatattctctgaatcctccgacacccgcagagcttatgataccaaataccaacatgaataacgctaataatattcctgctaaagatgctatatccacttaaatcacctggcattctgcaaattattttgcaaaaatatcctttctgtataatattacaagattttttatttcttgtctactttcttttacaattattttcctgcctgtggtgagagtcagcaccgtatcaggggtctcttctaccagttcgatcagatccggattcaccaacaccttgaccccattgatcttcgtaacttctatcatactgttttctccttccccattcattgttcaatatcttctgtagtttatgacttttaccacattctccaattttgttatagtacttttttcccttgatcttttatacatacaaaagggacaggtagcattcctatcccctttatacgtatattgcatttttaacgttttattaacgcttcagattggtcagttcttccaacaaagtatcggatacggtaatgatacggctgttggcctggaaacctctctgagtggtgatcatctcagtaaactcggaagacaggtctacattactcatctccagatgaccggtggacatgtatccaccgcctgcggtgatgtctacgccgataccatcgaactcaccggagttcagggttgcagagtaaaggttgtctccctgcttctccaggccggaagcattggcaaatgctgcggtagcaatctggcctaacagtttggtcataccgttgtcatagcttgcgtaaatcataccatccttctgaatgaatacaccgatcatatctcccggacgacgtccggttcccagtccgtccaggtcaccactggtggcaccgatggtggaagtacccttgttatcgtagttggtgcattcggacaggtcgatggtaatatcggagaagttgccacctaactgtgaaaatgctgcattaatgcccaagtttgtagtagaaccgccgacactttccagtttaccggtgtctttattgaataccacagtagttccttcaaaataacgaccttccatggtaatagcactgccgtctgccggaagcagctgatctccggtaccagatctcatattgccaagcagctgctgcatggtaagctgttgcgttgtgtctgtagggctggtaatatacaaattcaaaaattcattggtagatccctcatatccataagctgctgcaatggcatccaaagcctcctgctgttcctttgctgctgtagcattgtttgaagtatcaatcaggcttccatcagcattaaaaattttcgtcaggtcagctatatctttggttccatcctttgttttcagcatcgttccatcccacttgtaggcatcggtattcaatgtcaccttagtctccatcttctgctgggtacggtttccgaaatccagtgcggaaatatcgatctctgctccggtggaatccagcagtttcgtcagttccatactataaacattggtgttcggttcgccagactgtttaaaggtaaattttgcagtataactgtaacctctcgcatcgaagaagttcaggtttacggtcttaccgttggcactggtcacatccttatcgttctcatccagaataccggaaatatttgcctgtgtggtagcctcaggaggatatgtcatatttgccgtactcataatacgcagtgcagttacggtatcctgcttgatgttacctgtagtcttatccacgccccagcccataacattgtaaccggtgctggtcattgccaggttgccggcaccatctacatagaaagagccgtctctggtgaagaaattctcggagccgttgctgactacgaagaagttgtctccggtgatcatgatatcaaaggggttgccggtagactgcgcggaaccctgcgtggtaatggcagtattgatagctcctgccttaacgcccagaccgatctgcttggcattggtaccgccgacaccagtggtagcgttggcaccactggccttctgtgtggtctggctcatcagttcactgaaagtcatggaactggatttgtaagctgttgtgttgacgttggcaatattattaccgattacgtccattctggtctggtgtgtcttaagtcctgctacgccagaatacaatgatctcatcatagtgctttgttcctcctgtattggaaccgtgctccctctctgtcattcaagggagcatgacctccatccctggtccggtctacataataacggctccgttaatatttgtaaatacgttttcttcggtttctctgctgttcatggcagtcaccacggtcttattgggtacattcacaataaaggccaagtcatccacgatcaccagagaatccctgattcccttctgtcccgcttttcttgctccgccattcaagcgttccagctgtgcgtctgtcagctcaatgcctctgttttccagccgtacggcggcatgcttggagaatttcagatcctgcgttccggaaacattctgttcctggcttttgttctgtaggatctcctggaaagataccagattttcctgtgctgcttttacggtcttgcggctgctgtttaagtactgatttgccaactggtcaatggacagaaaactgttgttctgaatatccatatccatctgcccctctgcgtcagctgcttactgcattatacgctctctgtgctgtcagtttcttctgactcatccttgctctcggtatccttcttttcttctgcttcttcggcagctttgcggatctccttgagacgttcaatgtacttattcaagctgttcacggtatcttttgccaggaaggatttctcgtaatcagtcatatcgttgtattccttctccagatcatcaatggtcttgccatcactggaatcaatgccgtttacattaggaagcttgttcagctttacggtaaagttgtaagccttgttgtacgcattcagataatccgtatccactacggaatccagatcatcaatggagtacttcttttcgttgatataaaggtaagctttgttgttctcgtaggacacataatccacttttccctgcaccagtttggtatcgccggaggatgtggtggtcttgatatagacctccttgcctaccagagaacttgctctctgcagatccatactgttggacatattctgcatctgctctacctgtgagaactgtgcatactgtgctatgtattccgtattggacgtaggctccagaggatcctgatatttcatctgtgctaccagaagctgtaaaaatgcttccttgtccattccgctgctggactttgcagctttactcacggaagtctgagatgcggtctctacgatcttaccgttttccacgggtgcaaccaatgccatttcctttttctcctttcgttatttattatgcggtaaaatccaccgtattgccgttcgccgacatcatatctgctgcgatccggtcttcttcggtctgaggctcttcttctgcaaatgctgcgttcagattgatcctgcgggtacgctttctacctgcacccgtttcatttgccgtattactgttattgcctcttccctgctccagattctgttcgaactggtgggtctgaacggtaacttcaatagcttctaccttgacaccctgctctgcaaagttttccttcagctgtaccatctgactttccagtgctgccttgactgtttcattctgtgcaatgaaattggccgtaaccacaccgtttctggatgccatctgtatatgcagagttcccaggctctggggatgaagctgcatttccagttcagagctgtccgccttgacggatactttcatataatccatgatctgacgcataatgtcctgcgtatctgcggttcttgcttcttctgtctgtgccgtctgctgtaactgtgccaggaaattgtcttccttcagattctgtaataacagattgccatgctgtccaccgtcgttgtgttcctgtctgctgccggaatcttcggtcttgttctcctgtgcgttctgtacgggaactttttccccgctgtcaggtacctgtgtcacggttgcttctgtggtatccacagtagattcttccgtagtaacggccacattctctgttttatctgtttccacggtgatcaccggttccgccacagtttcctgtgtgatctgtgttaccgcttcctgccatttttcaggagatagctgtaactcttcctgcgcctgccctgtcagttccttctgcagatccataattccttttacatcattgtacagattctcatccgtcagtaatgcgaacgaatcctgtgctccgctgactgccatcagcaattcattcagtttcccgggatctgtcagatccacttctgtcattcccagatcttccatggtggcctgcagttcttcttcactgacggaaaatgtatccgtgatctgttggatcaggttctgtaccaccgttcccacaacttcctgaactttctccagatcctttgcatccaggctgtcatcttccatcgtcttgtttccatcagagacatccgctacattgttgcgttgtctgccgccggctctcaaagattcaccacgtctgacatcgttccgtcccgcctgggtgcggtccccgtcggctgcattagttgtctgggcattgctctgggtcttattccataccgcctggaagctggttcccgcattctgcttcgctgctgtgaccatatccggtatctgcacattgccgctgttaccgacacctttaattgtcgttcctgccataactcctcctttcccaggccccttttaccaccttatgacggtctatgacctgtaattatactacaaatcatgtatcggatcttttctgctttttcttaagattccggatccataattttagtaatctttgccgctacttctgaattcatagctcccaggatggcacctctgtcatccgcactcatgaccttcagaattctggctgccagatccagattgttcgtcatctgttcaaaaattgccgctgcctgcttcggcttcatggctgaataagcggccgcataatcctgcacttcctgactctcctgcagctgagtcactacctgtttgtaaatatattccgcagtggccggatccatggactcataatatttcttatattcttccgctccgggtcccttatcggaataaacgacctcgtcatagaattccttctgaatccgttggaattccacctgctgattttcgaattccttcagcctgagaacttcggctttcagctgatccagttcttcgtccttggcggaagatgcattctgtatctgctccagctgtagttccagactcttgatctgatccaccgcatcctgtaagctggtatagccgccgtaagcaccggaattcgttgtctcagtcacagagttgccgggaagaatccggttaagtaccggaacatcctttaagatcggtgttactaccgagcttccgaagccgccgatatccagcttgatgattacacagatcacagcaagccacaatgccacgatcaggatcgtggccccgaaggtcaaaaggctgttcccctcattcccgtcctccagttcatcttcctgtttggcaatttcccttgcccggcgctttgcttcttttcgctgggcctgctgttctttctttaaattttttttctcttccaccagctgttttctctcgttatccgctgcgttttcttccggagttttttctcttgccatactaaacctcatgcctttccatcacctgccggcttttcgccccgcatccccgttctagcggttcttctgtccgtaggtgtaactggtcagttcatcaattgctttactttccgcatggttttcttcctgcagaaaagcctcaaatgccttctcccgcagtgtctcatgcatctttctttccttcatggcctctgccatccgttctctggcagcttccacattttcctttgctttttccacccggattgcctgcgttgccacaatgctgtccattttcaaaagtgcttccttgttctcttcaatggcccgcagatccagctttccttttaacagccccgcagattgctcttcatactctcttctgcgttctttcaagcgctccagatgttctgtttccacattcagagccgcctgcgccgttccgaattcctgtttcgcctgtgtttccattttttctttgatattcaggatgttttgcagagaatatctgaatctcgccatttatctcacccctgatctgcgaacagctcttccagcatctgtacggtctcttcaaaggtaaatttttcatccgtaccctggcataggaagccgttcacagcatcgattctggagattgcataatcaatattcgggttgctgccctttttgtatgcaccgatattgatcagatcctccgcctcattataggttgccagtacatttttcagcttgttggctgcctgtttgtgttccctggtggcgatctggctcatgcatcgggaaatgctctgcaaaatatcgatagccgggtaatggttcttatgtcccagctttctgtccaacataatatgaccgtccagaatgcttcgggcggtatctgtaatgggctcgttaaaatcatcgccgtctaccagaactgtatacaatccggtaatagagcctactgcggctcttccggctctctctaacagcttcggcatctccgagtacacactgggaggatatcctctggtcaccggcggttctccgctggccagtccaatctcccgctgggccatggaaaaacgggtcagggagtccatcatcagcaggacatccttgccctgatctctgaaatattccgcgatagcggtagctgtcttggccgccttgttacgctccagagccggccggtcggaggttgccacaaccacaacagatctgcgcataccttcttcacccagatctctctcaataaattcccgtacctctctgcctcgctcgccgatcagtgctatgacattgatatccgctttggtattgcgggcgaacatacccatcagggtggatttgcccacaccagagccggcaaagataccaattctctgaccttttcctaccgtgatcatgccgtctaccgccttgactcccaacggcagtacctgatcgataatagttctggacataggatcgggaggtgctgcctctaccggataggcggctccattgatcatttcgccgtcaataggcacgcccagtccgttcaccgtcttgcccagcagtttgtcgtttaccgtgaccttcaggggatctccggtattttccaccacacatcccaatccgataccatctacggaatcatagggcataagcagtgtcttcttgtcacggaagcctaccacttctgccatgatgggccttgccccttccgcatccggaaggatccggcacagatcccccagtttggaatccggtccggcggactctatggtcagacctaccacattgaccactttccccagcttacggtaaaagctcttttctgccattttattatatttttcaaaatcaatgttcttaatgaccatttatcagccttcgtaggataataattttagtttctgacgcagttccgacagttgagtccccagtccacaatcaaaaatgccgctttcggtctcgatcatgcactcacctttgcccagggtcatgtcctcaacgatctccaccgtactgttcggtgcagttgcccctgccatgatctgctttttctgcatgctgacatagggataatcttctttggaaacatgtacgagaaagctccggttgtcctctgtttttctcatggtagcagaaatcagatagcagagcacttctctgtaagaatgcagatccacatcaaaaatatgctcgtaaatacccgtaatggtatctacgaactggggctccagttcatccattctcttctgatattccgcatccagtccggcagcttttttctgatattccgctgctctctgggcctctgcgcgttcagcctccgcttttgcttcctgctgtccctgccttctggcctgctccagtgcgtctgctttctgtgcttctgcctgtgctctggcatccgccagaatgctctcagcctttgctttggcatcctctatgatcttctgagcctctgcttcggcttcctcttttaatttctgcagatcttctccggccttgatcacattgccggaagtctgcggattctcttcgccatccccggtgtccgtcaccagtgcctctactttatctgccgccagtccggagataaatccggttccttcgtcctgctgcattttggcagccagttcccggatccttttcgctaccagatcgttggtatcgatcacccgggcatcttcttccacaagctgtgtaaatccccgttttaaaagattactagacaacgatctcgtcacctccacctctggaaatgatgatctctccggaatcctccagcttacggataatattgacgatcttctgctgtgcttcttctacatccttcatacgaacaggacccatgaattccatatcttccttgatcataacaaccagacgtttggacaggttgttgaagatagcattctgtacctgctcgttggcacccttcagtgccactgccagatcgttgttgtccacgtcacgcagcacacgctgaattgccttgtcgtccaggagcagtatgtcctcgaaaacgaacatcttttttcggatctcgtctgccagttcgggctcttcgatctccagagtctccatgatatgtttctcggtaccacggtctacagtattcaggatatccaccactgcatccacaccaccgataatggtgtagtcctgattcaccagacttgccagcttggactccagtactttttccacttccttgatgacatccggactggtacgatccatgactgcaatacgtctggctacctctgcctggctgtcgggtggcaatgcggaaatgatcaacgccgcctggctgggtgacagataagacagaatcagagcaatggtctgcggatgctcgtcctgaatgaagttgatcagctggctggcatccgtcttacgcacaaactcgaagggccttacctgtaaagatgcagtcagcttgccgatgacatccatagccttgtcggaacccagtgccttttccagcagttcctttgcgtagttgataccaccctcggcaatatactgctgtgccagacacacttcgtaaaattcgttgatcacttcttctttgacctgaggagtcacacttctggtattggcgatttccagggtcagttcttcgatttcttcttcttttaagtgtttaaaaattccggcggatctctccggtcccagagagatcaggaggattgcagctttctgcagtcccgatattccaccttctgcttttgtccttgccatagttactccgtttcttagttccagtcctcgttcagccagttacgcaacaatgccgctgcggattccggattctcatctacgaatttttcaatcatcttacgtgtctcagacttagattccacatcaatatcttccagctctgcttcaggggtagactgcagcatattctccacagatacctcttcctcctgctgtaccgcctgtctggtacgcatactgtgcaatatcacaaatgccaacagtcccaggatcaacagcagcataagcacgctcaacacattctgtgccgtaaccgggctgctttccttatcgtaaaaaataggactttcgtaagcaataatcgtaatattactctcattgataccggtggcattggctaccaggctgtacatatcctgatcaactgtcatcttggtatctgcgctgttctgggatttgtattcatcccaggtagtgccatccagaagcccctgtcgttttacatcctcataatgaatttctttataagtaattgctgcaatagatatggaggaattagtgtagttgattcctcctgccggtgtcacagtatccttaatagactcattcggcagataatcccggctggtttcggaagtagaggaagaactgttgctgctgtccggagatacataggtagtatttccgctctccccgttggaagttgtccccggtacaccgccgccgtcattggtattctcgctctcataagtctcctcatgggaaagcataccttcatctctgccggagtttgcataatactcttttacggtctccttataatcagagaaatccatgctcaggtggctggtaacggccgcatcattatactgttttgttcccagcagtaccttcttgacctgattggcgatcatggattccgcctgattctgcagctcctgcatagaattagcaattcctgcggtagaataatcatctccacctgcaaacagcaggttggaatctgtatccataatagtgatattcgccgtagtatcgttgcgcagccaggtagccacacattttgccagtgccgcagcattggcggaggtaaaggtgccgtccagttccagttggatgaaggcagacgcctcttccttctgtgctgccagagttccgttatctttcgggaaactcagatgtaccttggctgattttactgcgctctgtgcttctatggtctgtgttatgtatttttccagataggaattgtaaagtctctctttgtcagtggcggtcgtagacatactaccgcccagataatcattcaaatctaacgcatctggtacatatcctgcggaacccagtgccaagtttgccgcactctgttggctgctctctacatcgatcttcagtccgtcattggattctttatgtgcaattcccgcactgtccagagtatctatgatctccgaagcctgtgatgttgtctcacaggtgatcagccgtacatactggggcttactcataacgtacatgatgattgcaaatgcaaatatcacaaccgccgccgctccaatgatgatgctcttctgcctggtggtgaatttgttccaccattccagtatttttgcaggtatttcttttaatttgtctgccattgcagctctctcctcttacgtcaagaataaaaatacttctttagatctggatctgcatcagttccttgtatgcttccatcaccttatcgcggatggctacggtatactgcaatgcagtcgaagccttatccatagcaatagtaaggtcgtgggtgttgtcggtctcacccaatgcaaatcgtatcttctcattctcggcatccgagagataactgttggtgatcttcacattgtcgattgctgtattcagaaaagtttcgaacatagtgccttctgcctttttctccttctccgccagcattccggtcagagaagtgggagatactgtggcagtaccgtttacactgttcaaagctgtaattgctgaaatatccattttaataaaccatgtccttcctcacatatattccggcgccgctatccggagcccggtaataaagacccgtcagcttactgaccgatctccagtccttttaatgccatggacttgctggcgccaaatgccgtggaattggcttcataggatctgctggcatcgatcagatccgtcatttcctgaacaatatttacattcggatatgtcacatagccgttctcatccgcatcgggatgggaaggatcgtataccatattcatctccgtagtagtatcttcaaagatctggcttaccttcacgccgctgccggtataactgctactcacattgtgcagcacctgactgaaagtctgctgctgccccttctgctggaaagtaacgatcttgcggcgatagggggtgccatcctcggttcttgtagtactggcattggcaacgttttcggagatcacgtccatacgaagtctctgggcagtaagtcccgatgccgtaacatcaaatgctgaaaacatactcatacgctaattcctcacttcatcactgtctttaaattagtaaattcctgattaatgctgctgatcagtccctggtatttcagctggttctccgccagcattacattttcattttcaatatccacgttattgccatccaggcgataggaataattggcatagtccacgtaagccctgccccgcagtcggctcagatccacattggccaccttatcatccatggactcatatctgttattgccaagagcctgctgcaataccgattcgaaagccacatcctgcctcttgtagcccggagtatccacattggcgatattattggaaatggcttcgttccgctgccaggctgcgtccgctgcccggtccagaacattgatataatcaaatgcgtttgtctgtatcatattacctcacattccgcagtcttctgacatgagcacccaaaaaccgctttctaccatatacccattttattttattataaagtatttcgacaaaaacacaatagtaaaataaactcacacagaataaatataaagaaaaaagactatttttcgcaatagtctcttcttcctaaatttttcttattcttgcaaattcttacatttttcatttaatttctgccgttctgacgcttcagttcctcgatctcatcgaatacggcatcattcaaaactttaatataggttcctttcataccggaggaacgggattcaatcacaccggcactttcgaacttccgcagggcattgacgatcacagatctggtgataccgactctgtcggcgatcttgctggccaccaggattccctccatgccgttcagttcgtcgaaaatatgggtgatggcttccatctctgagaaagaaagagtgctgactgcagattttacgacagccaccttacggctctcctccgcactctcttcattcacagcccgcaacatttccagtcccaccactgtggtaccatattcgcaaaggataatatcatcaatatcatactgttcattgcatttgtaaatgaagagggttcccaaacgctctccggcaatctcgatcggagtgatgatcgcctgaaattttctcgtatcggtattttcaaagccaagagtctccaggttgacgttctctttcgtggataatacgcccagcagtctctcgtttaacatcggatcaataaatccaccgatattgtcatccagcagttctgtgatcggctcaattccatcggattttcctacgccgaggacctttcctttccggctgatcaccagtacattggaattcagaatttcccgcatcaccttacagatgtcgctgaataccactttgctggagttattgttgtgtaacaatttcccgattttacgtgttttgtccaacagttgtacgctactcatctatttccctccgtctacacatactaagaaactaccagatgttatgcacattgtagcacatgtaatttcagattacaatgaaaatagcgttaatttatgagaaaattctgacagtatataaaactacttctcttccgtcggtttatttttcacatagccgcactgttcgtccatgcagaccagtttgttgcctttttccagcagcagcttgccacagcggggacacttctctcccgaaggcttctgccataccatgaaatcacactccggattatcgatacagccataatattttctgccttttttggtctttttcatgacaatatccttgccacacttggggcaggctacaccgatcttttcaaaataaggcttggtattacggcattccgggaatccaggacatgccaggaatctgccgtggggtccgtatttgatcaccattcgtctgccgcacagttcacagacctcatcggattcctcgtccgcaatggtcacctctgccaggtccttctccgctttttttactgcttcatccagatcaggatagaaattggacacgatggtcttccattttaccgtgccttcttccacaccatccagcagagcttccatgttggccgtgaaattcacatccacgatggaggggaatgcttccttcatcatattgttgaccacttcccccagttccgtaacgtagagattgcggttctccttggcaatatatctcctggcaaggatggtggtaatggtaggcgcataggtactgggacgtccgatgcccagttcttccatggcacgcaccagactggcttcggtgtaatgtgcagggggctgggtaaaatgctgtttcggatcaaagctctggaattccagcacgctgttctcgtccagattaccgccgagcacattttcttcttccttatcatcttcctgggtgtagacgctcatgaatccatcaaaacgcattctggaagctgccagagtaaaaatctggtcctttgcctgaatcttcacagaagtggtatcatactgtgcagcactcatgcggcttgccacaaatcgtttccaaatcagctgatacagacggaacagatccctgggaagctgctccttgatagcaataggcatccggttcagatccgtgggacggatagcttcgtgggcatcctgaatcttctggctgttcttcttctccgttgctgcagcggtcttgtatttttcaccgtaatgaacatcaataaattccgctgcctgtgtctccgcctcttcggatacacgggtagaatcggtacgcaggtaggtgatcagaccaacagtgccctctcccttgatatccacaccttcatataactgctgtgccagacgcatagtcttctgggtagagaaatttaataccttgctggcttcctgctgcaatgtggaagtcgtaaagggaagcggcgcttttttcacacgttcgccgtgacgcacttcttttacttcgaattttgcgccattcagggaatccataatgctgtctgcctgttccttgctggtaattccctgttttttttcggtggtaccgtaatattttgcacaaataggcttcttctcgccttttactttcagattcacatccagagaccaatactcttccggaataaatgcgttgatctcgtcctctctgtcacaaatgatacggagtgccacagactgtacacggccggcacttaagcctctcttgatctttgcccacagaagtggggagatccgatagcccaccatgcggtccagcatacgtcttgcctgctgggcatccaccagattcatatcgatctccctggcgtttttcagagattcctttaccgcattcttggtgatctcattgaaggtaatacgatatacttttttgttttccagtttcaaggcataatacagatgccaggaaatagcttctccttcacggtccgggtcggttgcgagataaatcttatctgccttttttacttctttgcgcaaagaagcaagaaggtctccctttccgcggatggtaatatatttcggttcataatcatgttccggatcaaaccccagctgactcttgggcaggtctctcacatgcccctggctggccataacttcataatttgctcccaaaaactttttgattgtcttcaccttggccggtgactctacaattactaaatattttgccatatgcactcccatctatccgtctgtctacggacctacggcatccggttcccgcctctttgccgtattttcccctgctttgagtaatcgtgaaccactatacaacaaaaaaatgggaatggcaagaagatttttcatttgcccagccccagacagtataaaaaaagagccaaaaagcaattttctatgctttccgacacttttcagggttgggctattctattaaagaataagcagctgataggggaatcgaacccctgttttcgccgtgagagggcgacgtcttaaccgcttgaccaatcagccacaaaaacagtacttgcatagtataatcgagttgtcgaaaaaatgcaagcactttttttaaaaatttttagaccagctcggcccacggccattcgcaaaagcggctggccggactacagctcagcccacggccaattcataaaagcggctggccggactacagctcggcccacggccattcgcaaaagcggctgctgcgcagtcgacgccgcttgcgcggctcatcttttgcttcatggattgggcgctccgctcataccatgtcaaatgcgcagctttgtacgcaagcgtccaagccgtgcattcgtcatggtatggctgagctgttacaccaggtcaaatatactgatctgattggactccgggaggtctcccaataatcccagggaatccatcaggtcgatgatggtcttggagactttggttctctggcggaaatcatctttagacaggaaggggccgtcttttgccgcttccacgatggcatccgccgccttctctcccagtccgtcgatactgtttaaggaaggcattaatttgccatccacgatctggaaggatctggactgggctctaaagatatcaattggttcgaattcaaagcctcgtgcatacatttcctgcacgatacgcatatcacccatggcatccttctccttattggaaagcgtatcctgtcgctttttgtaatccaccataacgctctccaagtgcttctgtccctgacacataatttcataagaaaatgccttggcacgaatactgaaaaacgctccgtaataggctaacggataatggatcttacaatatgcaatacgccatgccatcataacgtatgccgccgcatgggccttcgggaacatgtactcgatcttctgacaggattcaatataccactggggtacattgtgggccagcatgtcttctttccactcttcccacatggcgcatctgcccttcgccaccatgcctttacgcacggcctccatgatcttgaaggacttctccgattccacacccatctggatcagatacagcatgatatcgtcacgggtacagatggcggtggaaatcgttgccacgccgctcatgatcagatcctgtgcatttcccagccatacgttggtaccgtgggacaggccggaaatacgcaccagatcggaaaatgccttgggcttggcatcgataaccatctgcatggcaaaatcggtaccaaactccgggatacccaatgcccccagctttgttccgccgatctgctccggagtaatgcccagcgcatccgtattctggaacagactcatgacatcctgtccgtctaagggaatcgtcagaggatctctccctgtcaggtcctgaagcatacggatcatggtaggatcatcgtgtcccagaatatccagcttcaacaggttatggtcaatggaatggtaatcaaagtgtgtggttatggtatccgtggtcatatcgttggcgggatgctgcaccggggtgaaggagttgatatcctgtcctaagggcagtacgacgattccgccgggatgctgaccggtactgcgtcgtactccggtacatccggaagcaatacggtcaatctcactggtccgcttgtgaatgccacgttcttcaaaataattcttcacgtaaccgaaggccgtcttatccgccagggttgcaatggttccggcacggaaggtctgtcccgcgccgaagataacctcagtatatttatgagccttggactggtactcaccggagaaattcaggtcgatatccggctccttgtctcccttgaatcccaggaacgtctcaaaaggaatatcaaatccgtctttatggagcttttctccgcacaccgggcacagcttgtccggcatatcgattcccgccttaccggcataggccttaacctcatcactgtcaaagtccacataatggcatttgctgcaataataatgggggctcaaggggttgacctccgtgattcccgccatggtcgccacaaaggagcttcctacggatccacgggagcctaccaggtatccatcctccaccgacttccataccagcttctgcgcaatgatgtacattacggcaaatccgttcttgataatggagttcaattccttctccagtcttgcctctacgatctgaggcagatctggtccgtaaatttcatgggctctgttataacagatctccgtcagtgtcttatcactgtcgggaatgaccggaggacatttgtccgggcgcaccggtgcaatagtctcgatcatgtctgcaatcatattggtattggtaataacgatttcttccgccttatcacttcccagataagagaattcttccagcatctcttccgtggtatgtaaatacaatggtgcctgatcatccgcatcatcgaatcctcgtcccgccatgatgatacggcggtagacctcatcctctggatccaggaaatgcacatcacaggtagccactaccggcttgtggaactgttctcccagggacacgatcttccggttgatattctgaatatcctcaatggaatttacattccgtacacgttccgaagtgatcatgaatttgttgttgccacagggctggatctccagatagtcatagaatttcaccagtctggcaatctgggcatccgactgtccgtccaacagtgcccggtacagttctcccgcctcgcaggcacttcccagtatcagtccttctctgtacttcatcaccagactcttgggaatccggggatgtttgttaaaataggtcagatgcgactgggacaccagacgatacaggttgatacgccccagatcatttttcgccagaataatggcatggtaagagggcatcttcttcacggcatccacactggaagctcccagtgcattgacttccgtcagattgtgaatgtcctgctcttccagcattttaataaatttcacgaaaatatgggccgtgcactccgcatcatccacggctctgtgatgattctccagggaaatccccagggtcttggccaccgcatccagcgtatgcttcgactggttcttcaaaagtactctggaaatgcccacggtatccacataggtaaactcctgcggatagcccagtcttctgcaattctccataatgaaactcatatcaaaactggcattgtgagccaccatgatacagccttcacagaactgcagaaactgcggcaggatcacgtcgatctgaggggaatccatgacatcctcatcccggatactggtcagcttttcgatctcgaagggaatgggcacatccggattgacaaaggtggaaaaacgatccacgatctctccaccggatacctttaccgcaccgatctcgataatgcggttgttgaccggggaaaatcccgtggtctcgatatcgaataccacataatcctcatgcagactctgtcccttatcattcgtcactatctctttcagatcatccaccagataggcttccacaccgtaaatgatcttgaagaaatcctgcttgtccggattctcgtctccggcttctttccgcttgcctttttccgctttccacaggtcatcccagacatggtttgcatcggtaaaactctgtaccacgccgtgatccgtgatggcaatggcccgatgtccccatttgtaggcgcgctttacaatgtccttggcctcggagacaccgtccatatcactcatctttgtatgacagtgcagttccacacgctttctggcggaggtatccattctcgtattggtaaaatcagggatcttcttgattcccgcaatggaaccgatggccagctcgtgatcgaacttatccatcatacagattcccttgacctttaagaaagctcccggcttgatgtccccggtcacttccttcacctgctcggtacgcacgaacatcttgatggtcatagtatcggtaaaatcagagatattgaaaataataatcgtcttctcgttcttgatgtcacgggtatccacggacagtaccttaccgcggatgaccacctcacccatctctccgatgagttcctcaatcttcatggcctcttcttcgaaatcacgcccgtagatgacatccggattgtctgatctcttcaacgcacctttttcaaagttaccacccttacgaaactcgccctttttgaattctccacgcttgaattcaccgcggctgccaccctgaaagctcttggtcacgccaccggcattctcggtcttcggcttttgtgcggtctctgcagccttgccggtttccggatcctgtgctgtactttgcccgcttccttccgccgatgcagtctgctctccttcttctcttctgcctttcgtacgactgtaaatggcatccaccttcagacggatctttgcttcctcttcctcctggaaacgcccggtctctttttccacataagccgtatggatcttcacggagaatccacaacgttccaccaggatcttctccagaatctgcaggatctccccttccatactgtgatttaataccgtatcttccagcgttaaaagcatttcattttccgaaggatactcgattttcgccgtcttcagggcattatactggatatggctgtactcccggaattcctccagaatactttccttataaatatccatcagcttttccggattgtactgggaagacaattcgaacttttcgtatattttcactgtcaggttggcctgagggaacagctgcttcttgatctcctgttccgtggtccagacgtcctctttctggatcaggcgggtactttttaagtacacccgaagaaagtctctgcgttttgtcgccgagactctctccacttctgtctgccccatcaggtcacgaatgtccgtattcaactgtaacgaaggaaatacttcaaaaaacggtttactcatttattttaactccaatgatccaattcctctttcaaggcggggagcagctgatcctccggaagcttttttacgatctcgccatgcttgatcagcagaccttctccgataccgcccgcaactcccagatccgcttcttttgcttctccggggccgtttaccacgcagcccatgacagccactttgatatccagcgggtaatcctctaccattttctccactttggtggccagatcgatcagattgatctgggttcttccacaggtgggacaggatacgacctcaatgccgcccttgcgcaatcctaatgtacgcaggatcagctttgcggatttgatctcctctacgggatctcctgtcagggatacccggatggtgtcaccgatgccctggcttaagatcagggacagaccgatggctgacttgatattaccgctgttcacagtaccggattcggtaatgcccacatgcagagggtacaccgtacggcctgccagcagttcatgggctttcacgcacatcagcacatccgaagatttgatactgatgaccagattgtcatatcccagatcttcgatcatgtgtaccttgtccagtgcgctctccacaataccttccgcagtcactccaccgtatttttccaccagcggcttctccagggaaccgctgttcactcccacacggatcgggatattcctctcttttgctgcatctaccacagcctttacccgctccggatttccgatattcccaggattgatgcggatcttgtcggcaccgttctcaatggctgccagtgccatacggtagtcaaaatggatatccgccactaaaggaatgtggatctgcttcttgatctcccggatagctgctgccgcctccagcgttggtactgtgcagcggatgatctcacagcctgccctctccagacgcaggatctgctctacggttgccttcacatcctcggtcttcgtattggtcatggactggatggcgataggattgccgccgccgatcttccggtctccgatctgtattactttggtatgcattctgtaagtatctttatcgttcataagggcacctgacctttctcgtcattctcatatgtctattactataccccttttccgaaagccttgtcaattcgcagaagtgctgaaatgtcccggactgttctgtctggcatatcccaaaagttccagttccatcagtgcccggttcagtgcggaaatgtccgtatattctcccttctcccaaagttcctgcaacagcgtctccgatgtctttggcacaggttccagacattccaagatcttttgcagggattctttgggcaattttacttttgccgtatttctgccggtttccctattatttttccgcctgttctttcctccggagccatctgcggaaagtccctgtttttcctcccagctccgcaaaaaatcctctgcaaaactctccggagataaaaacactcccgctccctgcgtcagcagatgattgcagccgtcactgagcctgtccgtaagcctgcccggcaccacatagacgtccctgccctgttccagtgccatatccaccgtgatcaacgtcccgctcttctgtctggcctcaatgacgatcagagcatccgacagtccgctgacaatacggtttcttggtggaaaatgctggggcagcggctttgttcccggcgcataggtggagagcaatccccctttttccaacagttcttcatacaatcttcgattctgtgcgggataacagatatccactccgcatcccagcacaccataggaagttcctcccgcagataacgctgcctgctggctgatcccgtcaatcccccgggccattccgctgatgacctgtattcccgctcttcccagatactgtcccagttcctcggccacatatctgccgtattccgaacactctctggcaccgatgaccgccaccgccggttcgttctcatccggcagttttccccggtaaaaaatgccgtaaggcggatccggaatttctgccagtttcccgggaaatcctttctcctcccgcaaaagaaagtggatctgttgttccgaaagctgtccatattcctgttcccactctccgcttttcttctgccgttccaaggcttccgccgcagaattgcccacgcactccctccattcctctgcctccgcctcatataccgcccggggtgacccgaagcgtgcaagcagccgttctgcccgcacgcccccgattgtataggtgctgcacaaaaaatatgcatattttctctcttcctccgccataaacatacctgtccctttccctgttttcacacagcccgcacgttttccgtgattttcgtaccggcccctttttcttgccggacacttaatgtacccggttccggcacacaattaattccaatacgtctccgaaggtcgataacacgccgcctccagcaaatgttcccccgtgatctcttcccggtcctccaaatcagctatggttcgggcagttttgagaatccggtgataaactctggcactgagctgcagcgtacgatacagctgttccatgactttctgaccctcctctcccaacgggcaatattcttccacctgtgcagaccggatgtccccattgaaacggcaatccgttcctgcaaaacgctccgcctgccgttctcttgcatgccggatctgccgcttcatatcttcactgcttttttccgttttcgttttctgcagatgcagaatatccacgggatgcagttccacacacagatcaatccggtctaaaatcggtcccgatatctttcccagatatttctcgatctggggctgggtacagcggcatttattccggtccggataatacccgcatggacagggattcatagccgccaccagaataaagtccgacggataagtgaccatcccggcacttctggcaatctgcactttacgctcctccataggctgtcgcatgccatccagcacgtttttccggaattccggaagctcgtccagaaacagtacaccccgatgggccagcgataccataccaggtcttgggatgccgcttcccccgccgatcagtgctgcctgtgtcacagtatggtgtggtgcataaaaaggcctccttgtgatcagtgcctgtcccggcggcagaagtcccgccacactgaagattcctgtcacctccagactttctttcagtgtcagaggcggcaggattccggggattcgcccggcgaccatggattttcccaccccgggcggccctatcatcaacagattgtggaatcccgccgcagcgatctcggcaccccgtttagcattctcctgccccgccacttcccggaaatctcccgtatcctgtccagttccttcccttagcaagtcctccgcccggatcctcggctgatacactttttcagtttccagctccggatggttcagtgccgccagcagatcgttcagacagttcacaccccagaccgtgatccccggtatcaccgcagcctccatggcattttctccgggcaccaccacccttaggataccgctttttgccgcctcctgaacaatgggaagtacacccttcaccttcttgatctccccattcaggcccagttctcccaaaaacaatgtatcctgcagcgcttcctccggtaccagttccatatcccgcaaaagtcccacagctataggcagatcaaaggcggtaccatctttacgtcgacctgccggagccagatttactgtgatatgtgccggtgggatctggaaaccggaatttttcatggccacactcaccctctcccgggattccttcacctcactccccagcgaccccaccagctgaaacgatggtagtccccctgccagatccacttccacgcggaccagatatgcctgcagaccatagactgcagccgaacaaactgtagtaaacataaaatacctcctttaaaatgttttatttattatggaaataacagtgaaacaaaacagaaacagataaaacgaatgaatctgacaaaaataatcagacttaacaaaacaattcatacaatgggtaatcataagagcccgcaaaagggcagtgaaactaccggaatcttcttagaattaatatcagaaattttaaatgaaaacgtcttttggtgaaaaatcttccggaacctcactacagattcacaaaaccgtacgctttccgctacgtcgtctggtctgctcctatatagccggttccggatcattcctttaaattttattttccatgctgtcgggatcctgagcgaactggatcgcatgttccctgtcgatcttgccttcaaaatacaactgaacaatagcctcatccatggtgatcatacccagttttcggttggtctgcatgacgctggccagctggtgggatttgccctcacggatcaggttgcggaccgcatgattggcatgcatgacctcaaaagctgccacacggtgcttgccgtccgctgtcgggatcagctgctgggatatgactgcttccagtgtgttggacagctggacacggatctgttgctgctgatgtggtgggaagacatcgatgacacggtctacggtgctggctgcaccgatcgtgtgcagggtggacaataccagatgtccggtctccgctgccgtaatagctacactgatggtctcgaagtcacgcatctctccgaccagaatgacatcgggatcttcacggagtgccgctcttaaagcattggcataattattggaatctatgccgatctcacgctggttgaccatggacatcttatgctgatgcagatactcgatagggtcctccagagtgatgacatgggcatctctgttgttgttgatcttgtcaatgatggcggcaagcgtcgtggatttaccgcttccggtaggtccggtgaccagtaccagaccacgtttgcgctgatatagttccaccacggattccggtacacccagctcttccggagaaggcaccacggttcctaccagtcggaacgccagagccacggaacctctctgcttgtaagcattgacacggtaacgtccgcagttgggaatagagaaagacatatcgtattctccccgttcctcaaaacgttctctctgcacttccgtcatgatattgactagtacttccagcgtgtctgccggaagcatcctgggataatccatggtgatcagattgccgtttacacgcattttgggtgggatacctaccgtcagatgtacatcacttgctcccgcttccttggcggctctgagtatttcttcgattgttggcataattgctcctcactatttattgaatatgtaccggttgtccatggtcttcatgacatccacgatctggatgtcctcattcccgggaagggacagatccaggatactgttatcccggaagcttaccactgtcggccgcagtacactttcttcattttcattcaataccagtgctttctctcccgtactgagttccacgctggcaccgggcggaaggatattgatggaacggatcaatgcccgtaccgtctccggatcatatacctccgggtgctccagaagttcctgaagagccttcacctcagactgtgccgttccctgtaatgtcatggccgtgatctcatcataacggttcgccaccagcaatacattggctccggccagcattttatacctgttcttctctccgtcttccgggaacaggtccagctgttttctggctgcctgctggcagatcctgcggatgccggatccgtcggtggcaaaagcctcctcgatgataccgtaggcctcttcctgtgtctcgcagttccgcagcatatcctctctggtataaggtgccccgtaatacacgtcatcatgttttttcacttttcccatatcgtgaaggatggcagcacatacggtatgatactgttcttcccgtctgatattcatcacatgggtaatcatggcacagagtattgccacgttcagggaatgtctggagaaataatcctcccggcttctcagattctggtagaaattgattttctcatccaagtgtccgtaattgcggatgaccatatctgcgatggactgggtacgattctgctttctggtcttcaggatacgatcctgttcctcttcgatggcactgaccgcctgaatctgaaaccgttcgaactccaggtcctcctgagtcaggggtggaagcggttctgccggttccagtacatagacaccgatcaatccgaaattacgaatactttctattgcctgtaatgacaaaagggaatttctgtcaaacaaaagaatactcttcttattataaacaggtcttgccagacgcattcccgtcttcaagtcttccgttcttacaaaatgcatccctgtccccccttatctttagtcacttatagaaataaatatatcacagtgttccttaattgacaaggtaatgtttagtcctcacgcagagcctccgccagcttatgcaatgctcttttttccatgcgtgagacatagcttctggaaattccgagaacatctcccacctcctgctgtgtgtgttctttacagcccaggatcccatagcgcatcaccacaatccgatactcccgctccgtaagacagtggtccagagccaggaacaggcgcctgatatttctgtcaagctccagatcctccaccacgtccttctgcttctcttcgatcacgtccaacagatggatggcatttccttccttatcctgtccgataggttcatacagtgagacttccctggaaagttttttgcggctgcgcagcatcatcagaagttcgttatcaatgcatctgcaggcataggtagccagtcttccttttcctgagtcaaaagaattcactgctttgatcagtccgatacatccgatagagatcaggtcctccatgtcctcctcaacattctggtattttttggcaatgtgtgccaccaggcgcagattcctctccaccaggatctccctggcctgtctggattcttccacggtaccttccctgagcaagcggatataatacgcttcttctcctgcggttaatggctgctgaaaggtcttcaaaaaatccctccgtggacagttgcttatgatagtttatgtgattttctgtccacaagtgcctgtcagtctcccacgttcctcagaataaaaactgcgccatcacgtaattgctcagatccagccctctctttgtcagtgccaggaaccggtcttttttctggttctctttcctctccgtaacggtcaaaagaccatccgccacattccgggcgatcacttctccgtagacttcctccacagtcctgccgtattgttctgcaaaatccacacaggatactcctcttgtcagccgcagtcccagaaacatggtctcctccatccggtcctgtaccgtcagtgtctgctcctcttccctgctttccagcggatgtgccagataagctcccagactcttttcgttctgaaaccgcacattatcgataagggatgccgcaccgataccgaatcccaggtaatccctgcggatccaatagcccacattatgtctgcattcataaccatccctggcatagttggaaatctcataccgatggaacccatactttgccagcacctctatggtctcctcatacatggcacgctccgtctcttcctccggcaagggcaattctcccctctctgccatggccgcaaaaggggttccctcctccacgatcaggctgtaggcagagatatgctgcggcatgggttctaagtgcagcaccttttccagcgtatcccgatagcttgcaagcgtctgtcccggcagtccgctcatgatatccacattgatattcgtaaatcctgcctccacggcctcccggtacacctggcagaaaccttcaaaatcatggatcctgcccagatttttcagttcttctgcctgggcagactgcataccgatactgagacggttgattcctgccgtgtaaaaattccgaagtttctctgcgctggccgtccccggattcacctccatggtgatctccgcgtcctgtgccattgcgaactgctctctgatacggtccatcaactgcccgatctgttccccggacaacagcgacggcgtacctcctccgataaatatactggtcacggtacggtcactgtaatcttttgctctttccccgatctctgcaaaaagtgcagccatataggcttcccttgtctgctccgtggcaggggcagacaggaaatcacaatagctgcactttcttacacaaaagggaatatgaatgtataattccagttcctttttattcatattgctccttcaattacttcatcagtttttatcatccagcttcagaacactcataaatgccttctgcgggatctctacattgccgaactgacgcatacgctttttaccctctttctgcttctccaacagcttcttcttacgggtaatatcaccgccgtaacatttcgccagcacatccttacgcatagcctttaccgtttctctggcaatgaccttgccgccgatggctgcctggataggaatctcgaagaggtgtctgggaatctcgtccttcagcttttcacacatcctacgtcctctctcgtaagcggaatctgcacagacgatgaaggacagggcatccacttcctcgcggttgatcagaatgtccagcttcaccagattcgatctctcgtaacccttcagatcgtaatcaaaagatgcataaccacgggaacgggattttaaagcatcaaagaaatcataaatgatctcgttcaggggcagttcgtatttcaacaacgctctggtgccctcgatgtattccatgccgaggtatttgccgcggcgctcctgacacagttccatgatggaaccgataaattcggaagtcaccatgatctctgcatttaccaccggttcttccatatattcgatctcggagggatccggcagattggaaggattggtcaactcaattacttccccattggtcttatgcaccttatagacaacgccgggggcggtagtcaccagatccagattgtattctctctccagtcgttcctgaatgatctccagatgcagcagtcccagaaatccgcaccggaagccaaatcccagtgccacagaagtctccggttcatagaacagggacgcatcgttcaactgtaacttctccaacgcatctctcagatccgggtacttggaaccgtctgcgggatataatccacaatataccatggactgtacctttttataaccgggcagaggttctgcgcagggattgttgtcgtccgttacggtatcacccactgctgtatcttttacattcttgatggaagccgtgatgtagcctaccattccggcagaaagctcgtcacaggggataaactgtcccgctccgaaataaccgacctccacgacctcttccttcgctccggtagccatcatgcggatcatggtaccctttttcactgtgccttccatgacacggcagaaaatgataacacccttataggaatcatatacagagtcaaagatcagtgcctgtaaagggttgtccggattccccttgggggatgggatctttttcacgatctgctctaagacttcctcaataccgatgccgtttttcgcggagatcagcggagcatcctgtgcctcgataccgatgacgtcctcgatctcttcaatgactctctggggatctgcgctgggcagatcgatcttgttgatgaccgggaaaacatccagatcatgatccagtgccagatagacattggccagtgtctgtgcctcaatgccctgtgccgcatccaccaccagaatggcgccgtcgcaggccgccagagaacggctgacctcataattgaaatccacatggcccggagtatcgatgaggttgaaaatgtattcctctccgtcctgtgctttatatacggtacgcacggcctgtgccttgatggtaatgccacgctctctctccaggtccatattgtccaggacctgtgcctgcatctctctgctggtgagcagaccggtcttctcaatgatacggtccgccagggtggatttgccgtgatctatgtgtgccacaatacaaaaattgcggattttgctctgatctattactgccatactactgtcctttcctgacatattcttgcatctaacgattgtagcataaattccgcattcttgtctatgattttacttcgattcgttgtcttatcctgcttttatgtatcgctactctcccttaagcaccatatccagaatatgtgccagaggatcacaggcatttatggcctcctccacagtattgttctgggctcccagttccaccagaagtgtccggggacgcagatgcatattgtagcggtagcccttcagatagatcctgcgggtcagtcccgggtaatactccgccgccttcaactgcatctgaaaagaaaacgccagattggcctcctggttctcgttggccaggtagtcaatatctcccgtcttgcgggtcctgctcagaccgttaaagaacataaatcttgccgtgggtctcccttgaatatccgtcaccagctttgtctcttccgccacctcatcccggtgcagatcgatgatcacctggatagagggattctccgcaaggatctgttccactgccggaagtgcccgggaatatgcattgtctctggtctccacatcatattgaccggtattgtgcagcacccggtaaccatattgttctgtcaggatcttggtcagacactctcccactcccacgataccggtgttcacatctccaggaaccgaatccgcaaaagcctcctgggaatgggtgtgatagatcaggatctgtggtccgtcaccttcctgtggcaacgtcatatccattcccagcagtttttccacggataactgatcactgcctgccatggtattggcatctatggcataaaaattccgtaccagtgtctcataatccgcaagctgtgtgcggtcaatctgcacctgttgtaccgccggacgaaaattgctcaatgcagtcccggctgtcgcctccacactctccgggataagggccgtctgctgcgtttcctccggctgcggaaggagaagttcttcgctgatcagatcttcggtggtcagggtccggcaggtagtctcatcctcctccggattctgtgtcccctgctgctccacaataccatagcctaacagcggtactacttcccacatattctgctgcagcagtaatccggtactgctgctttctcctgacaaagcttcggaacaggcaaataccggaaactcattttctccccgatccgccatcaaaagcccacagacaactgtcagcaaaaacagtgcgatccgccagacagtatttttcggattcttcacggtccgcgctctccttccgcactttttttgttacgacagttcagcccgcgtcagtcgcaaagtcgccttgacctgctcttacgtcactttgtgactacctttgctcgtaatccggtgctcaactcatgaactgttaccctatatatatgcagttacgcccagtttttttccatggcaatattgattccctcggagaccgtgtagctgacccgtttgatcacagaatcgatatcctttccggtcatatacatattgttcagttctgcaaaagccatgcggtgctgtcccatatatttgaccgcatcgaactccttttccccgctcatcagcttctccagtgcatctcccacaatcgtggcggcatccaccaccgtggggatcccgatggcaattaccggtacacccagggtctcttcggtcagggcattgcggtgattgcccacgccggagccgggctgaatgccggtattggtgatctggatcgtacggttcaatcttctggtgctgcgggccgccagcgcatccaccgcgatcagcacatccggttgcgtctccttcaccacaccgcttatgatttctgccgtctccataccggtcttcgccattacccccggctcaatactgctgaccagattcatacgggtacagttgtaggctgctttgccgtaggctctgaccacgtgtctggtgatcagcagattgtccaccacctgcggtcccagagcgtccgccgtcacttcccggttccccagccccacgatcaataccgacagctcctccgcttccccgggcatcattttcaaaagttcctccgctaacgcctccgagatttccctgtggtaatcgtcatccggttccaccatggccggtgcctccatggtcacatagacacccatgggctttcccagtgttttttccgcatttttcgtatcgatggtcaccttggtaatgcggatatccgtctcttcctcatagtgctcgtccaccgacaccccccgcagtttgctttcctcttcattgacactttctcttgcctccagagccaggtctgttctgatctgaaaaatttccattttttcaccctctgtctgcctttcttatcaatacattttttacaaaaatccgcaaaatatgtattgacaaaagctcccagattgtctaaaatacaatagtatgtttacgttagtcttccgtgtctggctaaagtgaaacatttcttgtaaattataattttattgtatacattatggaggtgtacgacttggctaacattaaatctgcaaaaaagagaattttagtatcccgcacaagagctgacagaaacaaagctatcagatccggcgttaagaccgctatcaagaaggtatacgctgcaatcgagaccggtgacaaggaagcagctaaggctgaattaaccgctgctaccaagaccatcgagatggctacttctaagggcgtttaccacaagaacaatgctgcaagaaaggtttcccgtctgagcaaagctgtcaacggaatggcttaatttttcttgcactggtacagaatttaagacatacaaaagcgcctataccgtcatgtaggtgctttttttgtgccctttttcaaatgtcacttcttgctgcctcattccaggcagatccggctgactgtcttccgcccgtttcatatactttatacaccatctcgcttaaaagctcgatggtgtacatttaccaaataccgattcttgtgcaagcacaaatctgtacttggctcatcgtatacacaaaaaaggacctctgcacagtacactatgcagcgatcctttcttattttatatcttatattcttatgccttgcgttcttacagcttactgctgtgctacatccttcatggagaagctgattctgcccatcttatccttacccaggcatactacagtcactacatcgcccagagtcagaacatcttctacacggttgattctctccttggcgatcttggagatgtgtaccatgccttccttgccgggtgcgaactcgatgaatgcaccgaactccttgatgctgactaccttacccttgaagatctggccctcttcgaaatcggtggtgatgatcttcaccatctccagagccttatccatcatttccttgtcagtaccgcagatagataccttaccgtcatcggtgatatcgatcttcacaccggtacgggcaatgatctcattgatggtcttaccacgctgtcctactacatcaccgattctgtcgggatcgatctgaatggagatgatcttgggagcgtacttgccaacctctgttctgggagcagagatagcgggcttcatgcaggtatccatgatgaacagtcttgcatcacggcatcttgcaatagcgccttctacgataggtctggtcagaccgtggatcttaatatccatctggatcgcagtaataccttcggtagtaccggttaccttaaagtccatatctccgaagaagtcttccagtccctggatatcggtcagcagaacgaaatcgtcatcggtctcgccggttaccagaccacaggaaatacctgctaccatcttcttgatgggtacgcctgctgccatcagggacatgcaggaagcacaggtggatgccatggaggtagatccgttggattcaaaagtctcagatacggtacgaattgcataagggaactcgtcctcactgggcagtacggggatcagggctctctcagccagagcgccgtgaccgatctcacgtcttccgggtccgcgggaaggcttggtctcacctacggaataggaagggaagttatagtgatgcatatatctcttgcttacttcgttctcatccaggccatcgatcttctgctgctcggacagaggtgccagagtacatacgttacagatctgggtctgtccacgggtgaacatagcggaaccatgtacacgggggatgatgtctacttctgctgccagaggacggatctgggtgattgcacgtccatcgggacgcttgtgatctttcaggatcatcttacgaacggtcttcttctcatactggtatactgcctcacctaagatagccagccactcttcgttctcagcgaaagcctcggtcaacttgtcggtgatcacacggatattctcctcacgggtctgcttatcatcggtgaatacagcttcttccatctcagcgggagatacgatcttcttcatctcctcgaacatttcagcgggcactgcacagctggtgtactcatgcttcttcttgcctacttctgctacaatcttgtcgataaaagcaatgatggtctggttcacttcgtgagccttataaattgcttcgatcatggttgcttcaggaatctcgttcgctcctgcctcgatcatgatcaccttttctctggtggaagcaacggtcaggttcagatcacctttcttccactgctcctggctgggattgatgatgaactcgccatcgatcatgcctacctgggtcatagcgcaggggccatcgaaaggaatatcggaaatgcaggtagcgatagctgcaccgatcatagccaccaactccggacgacactcgggatccacgctcattaccatgttgttcagggttacatcattacggtaatccttggggaacaggggacgcatgggtctgtcgatgacacggctggtcagaatagcattctcacttgccttgccttctctcttgttgaaaccgccggggatcttacccacagcgtacatcttctcttcatactctacactcagagggaagaaatcgataccgtctctgggcttctcggaagcggttgcggtacagagaacagtggtatcaccatagtgcatgaatgcacatccgtttgcctgcttacctacacggttgatatcaaccaccagaggtctgcctgcaagatccatcttgtaactttgatacataaattcctcctatccatcgtactgtgactgttatctttggtgccacgctacgatatgaattattattctacgggctggaggattaccgaaactactgaaaattccatgttgctcccatgatccgcaacataatcttttcagcggtctcggggctcacttccatcccgtgtgttaccttttcaggcgcggtgaattagattttcaccgtgcatatgcatgtaatgagaaacaagagaagcggagcgccgatgtaatcggcagaccccgctcaccagtcagcattattttcttaagccaagcttctcgattaatgcacgatatctctcgatatccttcttcttcaggtactccagaagaccacgtctctgacctaccatcttcagcataccacgacgagaatgatgatccttggggttctccttcagatgctcggtaagctcctggattcttgcagtcaggaccgctacctgtacctcaggtgaaccggtgtcaccgggggttcttgcatactcgttcatgatggctgttttcttttccttagaaatcatttctttttcctcctgttttttaaacgccagataccaagactaaggtcggagtgtccgtaatctgggcatcggctaatcatactgtttcaatatatcatagtttctatcggttgtaaatatatttttctattttcttgtgacccgtttctgcaccttttcctcgtacatccggctgtctgcaatttttacataatctgcaaaggtctgctcggattccggatccgtcaccacggtaccgatactcatggacagcgggaacggaagcttctgggctttcccctccgcctccagtgttctgcggatgcgcagcaccagctctctggaaacctcatcggactggtaagtctggatcagcacgaattcatccccgccggttctggccggtacggcatcccggctgctgcactgcatcagggctctcgccgcggcacagatggccatatctccgtactcatgtccaaaagtgtcattgatgtatttcagacgatccagatccacgaacagaatcagcagtttgcggttattcagtctggaaacgcggaaggactcctctcccagctgctggtaccccatgcggttatacataccggtcagcgtatccatgatatacagggaagacagcttacggttcatataagccagcatttcttttttatgaaggttctccatggaacgggtcaacgcattcatgatctggaacaagtactgtttttccatcatgtataccgcattacggatagctacatagccaacggtacgctctccgaaatgtaacggcaggaacaaaaagttctgtcccggcttcggataatcgaaggtcgggaagatgccatccacttcctgtctgtccagatccagtctctggtccctctcgtaggcaaaggtcatctgcatctgtctcggataaccatgcaaggaaaatccctcgtccgaaggggtggcatccagatgaatactcttctccgtttcttttttataggcattgaggtgatcatccagcaccagatacatggcatcgcatttcagggacggaatgcactggggaatgcagtacatcatttcttctacggtattgcactgcatcatctctgcctccatagacaggacttcctcgtcgaattcctcactttccacgctgtacatgatctgatccttcagatgggtcctggcatccctgctgctccccttgccgcagccgcagctctcctgccacagcatctcggtattggtgaagttataccgggggacgctttctcctgcccagattttcagaaggatatccattcccttgtaagcagcttcctctctgatatgtcccacagtggtaatactcggcgtgtaaaatccggccttgtcgaagttgtcaaaacctgtgatccggaaatccttcggtgccgtaaatcccatctgggccgctgcttcgcataccgctaccgccacattatcattgatacagataatggcatccggcagctctttgtgggtgtcccacagatgcctatagccttccagtccgctcttgtagtcaaaggaaccgtaccagatgtcattcttatctattttgatcttgtgttctttggcatagtcaagcattccctgcagtcggcagctgctctcataattgctgttagcccccaccagcagccagaattttttgcagtcatgcacctcatgcatatgtgtgatcacctgcttcatagcagaataattgtcaatgcccacataatgaaagtcttccagctcgttggcaatggagactaccggaaggcgcgactgcttcgccttgtgtattacttccgccagcactgccggggaactgatattattcagttccagaagaataccgtcgaactccgacagatccggaaggttaaaaatattatattctgccctgttatatccggcatctctgttccagttgccggtactattgaaaatatatagatttacctcttcgttcgtttcttttattctctgtaaaatacctgccggccaggcataggtaaacaaccttctccagccgtcggtgatcaaagctactttccgcatattcctcacccattttcgtctctgtacgaagcccctttttttcgttcagggaccgccgatatatacaaaaatagtatcatagttccccgtgaaacgcaattgtaaaagaaaaggcactcgcatgtctccgaatgcaaaaaagcattgccccgcccttttgcgaaagcaatgctttttatcagtcgtgaatgacacggacacatttcacaggtgtacgatacttatagctgctgatcttgataccggtcttcgggctgctggcgtgaattacctgtcctccaccgatataaatagctacgtgattaatattacccttgccgttaccatagaataccagatcaccgggctttagctcggatgcactgatcttggtgccctcattggcctgtgctctggaggaatggctcagggtaatgccgtatttcttgaatacgctgagaacgaaaccggagcagtccgcacccttggtaaggctggtgcctccccagacataagggttacctacgaactgttttgcatattctaccagatctacgcggacatcggataccccctgtccgtagagaagctctgtcatggtgatggcggtatccagcttttcttccactgtgacataatcttgggatacataagcatcctcgccatcaatagaaatcttcacccagccgtcggaaccggtctccacatactccatctcttctccctgtcccacctgagtcacgatctcactggtggtattgggctcctgacgtacattcaggccatcggtattggcaatggctaccgtatgaaccagttccatggctcggattctggcttccggtccagtcagcaggaattccttgctgacataaccttccacttcaccggacttgatatgtgcccagtcatctacggtctcgaccacttcacaggccgcatccttgggaagcttacctaccagcttaccgtctgtggaagataccgctctcacattcagattaccggattccacattggccacaccgatattggtatagccccaggaagctccctgggcatcctgtgcgatctggatgtattcctccagtgtacgctccgtctccaggacagaagccacaccgccggatgccatgaggacactgctttctgcagcggaagcggaaagcggtgccgccagcatacacaatgccaggccggtggctacgatctttacttgtttttctcttgtatgttttatcataaattcttctttaaaatccttttacaaatatattacagaattgttacatcacaagtctgattatacctgtctgcaggcttcctgtcaacccatggaaaatttttccactactgtttcccgccgtcgttccttcctccgtaaaacgaaaaaaccggcgtatgagtgtctgtctgcacccgatacgccggatctcttgttccaggaatggaacttgttattttatcttctatggccaccgccgccatggctgacaccgctgctgctccgatgacttcctccgtgaccgccgctgtgtccgccgctgtgtccgctactgctactgctggtctcgatcctgcgggtcaccacgttcttacgcagatactggtctctggtattgttgatcttgggctttttgccatcaagatactgattgaccgtagtagtatcctttgctttgctctgatgcaggttcactgcggcatagatcagtgcaacgacaagacctgtcaggatccagggagaaaaggtcatcggcatactttccttactttcctccatggtcctggtcacataactgatacaattcttatacgctttgtaggggctttcgtctatgtaatcatccactgcgtacagggcctggtcgatctcgtaatcgccaaaataatcatagacatttccacaggtagacagccagcttcccttttgtccttcataggcattgtccagcagcagaactccgttgccgtgtaccttgtcataaccgaaattgttgtaatcatagaagttatccgccagatctctcatggctgtactccagtcggtactgccgacttccttcgcatgaaatgcctccgcaagacccggattttgcaaatcatactctacggattcggagatcgttacgatcacgatgtccgcctggatcttttcctcacactctgctatatattcccgcaggctctgctcctcttcgtctgtcagcatatccgcatagtcaaacacacgctctgtgggatcctggctgttgccccggacagtcttcggtgtaagcagatgaacgactgccgctccgatggtaataaccgccagcactccggcaatgatgaaccataccttaaaatatttcaggtactgtctcagtgcttctttcttaatatctttttccattgtcccgttatccttccctcataatctctacaccagactggcgattgcattcaccatgcatagaattgccgccagtgtcacaccaagtgttcccgcataagcccacacctttgctttggaaatcggtgcagtacctaccagtttaccggtctgtccgtttacatagaaaggatattctttgcctttgtagctatagtcatacttccatactggcaggagaccataacttacagaactgtccgtcacgttgatgttttctcccattttgcggacactggaatatccagaatagctgtcatgcagcatcttctgtgcatcctcctgcatcttggctttggcacggctctccaccagatcggaagtcatattgtagcgttcactatgaaatccagacagatattctggcttaaactcctgcagttccttgtaatcaaagggctccatcagatccatgacatcatccggcattcccacggaagcatccacaggaatcttgacaaaatcaatgtccatatcacggacaatatcataatatgaggtctcggtatactgtgtattgccggtcgtccagctgcgcaccttggtaccttcaccgtggaacgtgcagttggtattgtaatcgtagaaccagaacggtacataatcaccgtaaataccgttcattcttacttccgacagaaaatccgtcggtgcaaaaatacatttctcaaatttatcacggatcagcttcttgcagacttccttgcccatatggaatggaatcagcatatgcggtgtgtaggccccggaaatctgatcatccacgatcacataattgtcacaataaggacactgtgtagcggaggtgtttaccgtcatgggaatctcgccaccacagttgggacatacctttgtcacctttttctgcgcagcaccctcggctgctgccattctgctgaccggctgtccggctcccgctgcctggaccgttccttccgcagtgccgttttcctcaccgcttgtctcgatcacgccgtcctcgcgttcttcgctgtcctcactctcacagaaaggacagaacatcttctttctctccgggctgtaaactacattaccgccgcagtttttacatctaaagatcattttacccctcgccttctgccttttacgacatttttcttcgtagaaccttttttatcctaccatagattccatcgtatttccatatcgtaaaatacacataatcttttcttatcgttcgtttaccatgattgtctcatgctttcatcaggtctgcgtaatcctccagcaggaatcggtgatagatcacatggcacccttcatcccgaaaacaataacagtagggatctcccatttcctccgggaaacggatcatgacatcaaagtcctcgccccgcatctcttccacataaatattctcactgtaccgcaaaaataactgtcggatatcctccatcttacagtcatgctgcccgatcaggcggatcagttcatagatgaatcccttctctgcaaaatgctcatggacataagtactgccttcctccggaatacagaggcagaaacggtctcccttacggctcacagccagttttccaagctttattgtcatgctctccggctgtcctgccagtgtaacttccatctgttccgccgtatcctgtgtacccagcaagtgattcagtgtagataacggataatacaggcggatcttctctctgcggaagcctaattttgcctgttcctccagaaccacatccatgaggtttttttctaatttttcaaatgtcattttctttttcctataatttcccataatctgtcaaaaataaaaactatgcagcggagatttcctgtcctgcatagtttttattatacaatattcacgcatcagaatacaattctattctacggaaacagacattgccgttccattctaattcagaaatttgtccagctccgtctctacgatctgttttttcttcaccttgggagcacggatcacttttccctgtacgatgaccatatccacatttcgaagcaccagtagatcttctaacggattcttctccaccacgatcatatccgcgcatttgccgggttccagtgtaccggtgatatctccgatacccgccatctcggcgccgcggcaggttgcggtataataaaagacccgtaatggaatccaccatcacgggtcctgtgactcttttgaaagaatctgttatttattgtagcagacgatctgtccgaagtcagccttcagggaagcgccgcctaccagaccaccgtcgatgtctgcctgtgcaaacagctcgggagcgctggaagcagatacggatccgccgtactggatacggatagctgctgcggttgcatcatcatagatctcagcgatgcactcacggattgccttacatacttcctgtgcctgctcggtagtagctaccttgccagtaccgatagcccagataggctcgtatgcgatgacagccgttgctgcctgtgcagcagttacgttcaggaatgcgatcttgatctgctgacggatgaagtcgatggtaacaccctgctctctctgcgtcagagtctcaccacagcagatgatgggagtaatgccatgctcgaaagccttgagaaccttcttattcacggtctcgtcggtctctgcaaagtactctcttctctcggagtgtccgatgatcacatacttcacgcctgcatcatccagcattgcgggagaaatctcgccggtgaaagcacccttctcctcgaaatacatattctccgcaccaatcatgatattggaaccctttgctgcctccatagcgggaatgatgtcgattgcgggaacgcacagaagtacgtctacttcatcatttgctacgaggggctttaatgtattgatcagctctactgcctggctgggagtcatattcatcttccagttgccggcaatgatcttctttcttgccataatcatacacctcttcttttcttatattgtgtttcccacaggatgcatctgtgcctgcaggcaggttcgaatacattccgtgggaaagctttattatttctatttatttgtcgtctgctgctgccacgccgggaagctctttgccttccaggaactccagggaagctccgccaccggtagagatgtggctcatcttgtcagcgaaaccaagctggttaacagctgctgcagagtcaccaccaccgataatggtagttgcatcggtctcagccagagccttagctacagcgatggtacctgctgccagggtaggattctcgaatacgcccataggtccgttccatacaacggtcttagcagtcttaacagcctcagcatacagagctgcggtcttgggtccgatatcgcatccctctctgtctgcgggcatgttggtaacatcatatacctgaacctcaacaggagcatcgatcgggttagggaaatcagcgatggttacggaatcaacaggcagtaacagcttcttgcccagcttctcagccttttccatcatttccttacagtagtcgatcttggtatcatctaccagagacttaccgatttcatatccctttgcctttaagaaggtgtaagccataccaccaccgatgatcagggtatcacacttctctaacaggttggagataacgttcagcttgtctgcaacctttgcaccgcccagaatagctacgaaaggtcttacgggatcttctacagccttacctaagaagttgatctccttctccatcaggtaacctactacgttctgaccacccttagcggtgatgaacttggtaacacctgctacggaagcatgtgctctgtgagaagagccgaatgcatcacatacatacagatcagccaggtcagccagttctttgctgaatttctcaccgttcttggtctcttctgcgccacggaaacgggtattctgaagcagaacaacgtcgccttccttcatgttctcaacagccttggtagctgcttcgccggttacattgtagtcagctacgaaagtaacctctttgcccagcttctcggacagtctcttggcaacaggtgccagagattcgccttcgttggggccattctttaccttacccagatgagagcaaagaattaccttgccgccatcgcctatcagcttcttgatggtaggcagagctgcaacgatacgggtatcgtcagtgatctcaccgttctttaagggaacgttaaagtcgcatcttaccaggactctctttccctttgcgttaatgtcatctacagatttcttatttaatcccatggtattaacctccaattattttagtatctaaaaagggcccggtccttgtaagaccggaccctgataggtctttactcgttaacgcctgtcggcttatgctaactcgctgaagtacttgatggtacgaaccatctgagaggtgtagctgttctcgttatcataccaggatacaacctgtacctgagtattgccatcttccataggagcaaccatggtctgagttgcatcgaagatggaaccgtaggtgctgcctacgatatcggaagatacgatctcatcggtgttgtaaccgaaggactcggtagaagcagccttcattgctgcgttgatctcttccttggttacagcgcccttaactactgctaccagaatggtggtagaaccggtaggggtcggaacacgctgagcggagccgatcagcttgccgttcagttcgggaattaccaggccgattgccttagctgcaccggtagagttgggaacgatgttgcaagcgcctgcacggcttcttctcagatcgccctttctctgaggtccgtcaaggatcatctggtcaccggtataagcgtgaacagtggtcatgataccgctcatgataggtctgcaatcgttcagagccttagccataggtgctaagcagttggtggtgcaggaagctgcggagataacggtatcttcgggcttcagggtcttgtggttaacattgtatacgatggtaggaaggtcgttacctgcgggagcagaaataacaactttacgagcaccggcagtgatatgtgcggaagccttctccttagaggtgtagaatccggtacactccagaactacatcaacctttaattcaccccagggaagcttgcttgcgtcagcctctttgtagatggtgatggtcttgccattaacggtgatgctgtcctcgccagcctcaacggtgcttgcatacttgtaaacaccctgagaagaatcatacttcaacagatgtgccagcatcttagggctggttaaatcgttgattgctactacttcatatccttctgcatcgaacatctgtctgaatgcaagacgaccaatacggccaaaaccattaattgctactcttactgccattttagtttcctcctaaaattttaattttatatcttttggctttccgttattcacagattgtcaaaattttatcagcaaagacattttacctaattcctgattataattcaagatgtaaatgaaaaatatttgtgattttgtggtaaattttacagtttgtttagaaatgctatggtttttcccttcatttttgctataataggttcgtattatgataaccagaaaggataaaaatatgtctatcaaagcagattgtcatcttcactcttctttttcgggagattcccaggctccaatgccggagatgatcgataaaggtctcgctctgggactggagaccatgtgttttaccgagcataacgattttgattatccccgcaccgaggaaggaccgggaacgatctttttactgaatacggattcctatctgtacgacgtgctccgctgccgcgcgaaatatgaagggaaaatgcgaatcctcttcggcgtggagctgggattgcagcctcatctggccgaccgcaacgaagattttatttccgcctatgattttgatttcgtcatcggctccactcatctctgcaaaggaatggatccctattatccggaatatttcgagaaattctcctccgaggaagaagccatccgggcttattttgcagagacactggagaatctgaaatgccatgacgattatgatgtattgggacatctggactatatcgtccgtgtggctcccaccaaggacaagaactattcctatgacaaatataaggatgccattgatccgatcctagagcttttagtgcagcagggaaaaggtctggaactgaacaccggaagcttccgctacggtctcagacagcctcatccctgtaccgatattctgcgccgctatcatgagctgggcggtgagatcatcaccgtaggaaccgatgctcacaaacctcaggatgtgggatcctatctggatcttgcctccgagatcctgcagctgtgcggtttcaaatattacacaatctacgaaaagcgcagcccggaatatcacaagctgtaattttctttattccctatcctccaagctgaatgtgttccttcatcagctcgcgaagcaacgcatccgctgtccatgagacattatacggtgtcacaatcgccttcagggcaaccggtggtaagccggttgccttatattctgccaggaatgcatccacctgttgcgaatccattccggaaaacaccagcatttccattgcaaaatcaggaccgttatatatttttccattcttatgaaaaccgctgatttccgccagtgttccgatcttctgtccatagtccctgcggttcaccgccgtcacatccacacctattttctccgctgccacacgcacagcccggtctttttgtgtactcacgccaaacaataatatttttgccattatatttcctcacagtccatcacccggaagccgttcttttccagcaattgcgcaaatactccctgtccgggaatgagtttaccagtaaaactcccgtcataaatctgccttacgccgcagctggggcttcgtgactgtaagattgccagatcgatgccattctctttggcgatccgcagagcctcctctgcgccttcccgaaactgcctgtccacatttacgcctttacagtttatgacctcaccgctcacgatctccgacggatccctcggggtcggaagtcctcccagcacctcaggacataccgggatcacctcatgcccttccagatattttgccacacgctcgctgtaattatttttcccgttatatttacagttttcgcccagcagacaggcactgaccagtattttcatcgtaatctccagctttccgttattatgtctgttacagcaacggcgcgatcaggcgcatgatacactgccagcctctcactgccatatttttccttccatcccggtatttatcggtgacttcctcactatcctgtaacagcttatcaaaatccgcctcaatatcccggatggcatcacagccgtgcatccacacaccgttttcaaaatgatgataaaggctccggtaatccatattgatagtaccgacggtcgccgtatcctcatcacacagcatctgcttcgcatgcaaaaagcccggggtatattcatagacccgcacgccctggcgcaccagtccggaataataggatctggtcacaccgtatatgatttttttatccggaatgccgggggtaaatacgcgcacatccacgccacgtttggctgccagcccaagctctctcgtcatctcatcactgatgatcagataaggagttgccacatagaggcgtttctttgccgtcttgatcaggttcaggtagacattctcacccaccggctctccgtccagtggagaatccgcatagggctgcacatagccggatgccttctgcacatttccatcttccgcaccttcctgcgacgccttcagatacttttcataatccgtgtccgcctgtcccataacattccacatttccaagaacatcatggtaaaattctgtaccgctctgccggtcagcttcactccggtatccttccagtaaccgtaaggatgcgtgatattgaaatactcgtccgccaggttatatccaccggtaaatcctacttttccatcgataaccatgatcttacgatgatcgcggttattcatgaaaatatttaaaaaaggcactacgtagttaaatacccggcactgtacaccgatggcattcatgcggtctataaagcttttatccaaaaagccgatacagcccacatcgtcgtacagaatacggacttccacgccctcggcagcctttcttgccaatacacccttcagccgtgcaaaagcctctgcctcctctatggcatgatattccaggaatataaagtgctttgccttctccagctccttaagctgttcctcgtatcccagataagcttccggatagaatttcacagctgtcgtgtcatacaccggataattaccatacttccagatataatggcattgatttgccagcagaggatcttcctgctccagctgctgcaatattgtctcatcctgcacattcagaggaatcagttgttcatccacatcctcaaatttccggatgattttatgcatagcctctttatgcccgaacaatccgtaaatacacagaccgaatacaggaaatgccaatattacaataatccagggcatcttaaatgcggcattggtatgttttccataaatcctgagcgccactaccagcgcaaacaggctggtcagcagagagatcactgaagaatactgatacagtttgatcatcaatatcaatatccagccgatctgtaagagcacagccaatgctgcaaacgcaattcttcctatactgtttttcacattcccttttacttcagaacgcatctgctttttcttacccataatgtcctcttttctctttcgttctgccagatcataagtaatctcccccttacaggctgcctgcactgcgcacagacagccatgggtatattctatggtgccagggtcaaaaggtctaagcccacatgagcttgctcatatgtgggcgaaagaccttgggacccgccccgatatgagcataaaagtgggatgataatcccacgatatgcgaatattggggcggattgtgggagtgcgcagcacggaacaatccgtaggcatcaaagtcgaggacttttgcccccgacatcattctataggggattattttatggtataacatttttgcaaaaatctcaataggtcaatggactacaactgtcctcttttgtctgcctaaccacagtttctgtcacacagtaccaccactgtagacggcgtggtctgggcaggaatgcttctcgtggaagaggaatagatgaccaccagattatggttcgcgggactcgcctggaaatactggttgttcacggtacgcacatccactgtgccatccagattcagctgcaatgtctgctcctcattgaccagggaattgctgtagtagctcacatccacattccggtcgcttctctcttcagccactaccactgcggtatactgaggcggatagatcaggggcatgggtgcatcattgcgataccagaaggttgccatcattcccaccgacagtgtagtgaaatccaccacatacgtatccgggttgatgaaaaagttcaccgtgttgccgtccgtatcctcgattgtagcgaacaaaaggcatccatcggctctgcggccaccctgtcctgccggtaccagatccacaatggttcccttcatggagccgaaactgcttcttctcataggtctctgaaatgaaaaacgataatccatagtctctcctgtgaattataaaagctttcttctattatatgcacgcccccgctgttgatgttacgtgtcgtgataaaaatgcaggaccactattgtaacaatagtgatcccgatcttttccgctatacaaatctttgtatccgtaggacgcagagacctcctctttgagcgctttcctacagaataatggttccgccgcccagtacatgctcatcctgataaaataccatggcctgtcccggtgttgcggcacgtaccggtgcgtcaaaggtacagagcactttaccgtccggctgttttgtcagagttccgtattctcccttatggttgtaacggatcttcgccaatactctggtgggctctgtcagatcttccactgtcatgtaattcacatgatcgcacagcactttatccgtaaagagttcctgattggaaccgatgacgacttcattggtctcgggacggatggcggtgacaaacactctttcccccataggaagttccagtcctctgcgctgtcccagtgtataatgggtaatgcccttatgccggcctaagatcctgccgtcctccgtgacaaaattgcccggtcccggcaccttttcgccggcttctctgtcaataaaggaagcataatcattgtccggcacgaaacagatttcctgactgtccggcttatgcgccaccggaagtcccgcctcctctgccaggacgcggatttcatccttggtatattcacccaccggcatcagagtatgtgaaagctgatcctgggtcagattgtacaacgcataggtctgatccttggctgcggtaacggaattacggatggcaaaacggccattcggcagcctgtcaatcctcgcataatgtcccgtggcaatataatccgccccgatctccaggcttctctgcagcagggattcccacttcacataacggttgcaggcaatacagggattgggagtatggcctcttaaatactctgccacaaaatagtccatgacatggcatttgaattccttcttaaagttcatgacataataaggaatctccagtctctgtgctactcttctggcatcatccaccgccgacagtccgcaacagccgccgttggcttccttggccgcttcctcttcgtcctgccagatctgcatagtgacgccgatcacgtcatagccctgttccttcaataacatggctgccacggaggaatctactcccccggacatgcctactactacttttttcttcatagatcttaataatcttcctcttcttcgccctcactgatgtcattcttgggcttctgcagtccttcgatggtgatatggttcttctctgcataatcccacagtgctgcatgaatcgcttcctctgcaagcagtgagcagtgtacctttacgggcggcagtccgtccagagcctccattacagccttgttcgttacctgtaatgcttcctgaatggtcttaccctttaccagttcggtagccatggagctggtagctacggcagcgccgcagccaaaggtcttgaactttgcttcccggatgatcccgttctcgtcaatgtccaggaacattctcataatatctccgcactttgcgttgcccacggtacctacgccgctggcatcctcgatctcccctacatttctggggttctgaaagtggtccattactttttcactgtacatgtatctgttatcctcttctttctcacttagttgttcttctggcttttcaggaaatcttcatataaaggagacatatcccgcagtctctgtacgattttcttcacttcttccgccacgatgtccatctcttccttcgtgctttcctcagataaggtcagacgcaaggagccgtgtgcttcctcatgctttaagccgatagccagcagtacatgggaaggatccagagatccggaagtacatgcggaaccgctggaagcgcagatgcccttcatatccagcatgatcaacatggattctccttcgatgaacaggaaggagaagttgatattgttcggaagtctcttcgtgcggtgaccgttcagccagcagtgagggatctcgttctccagacgtccgatcagataatcccgcagttcgatctccttgcgggtcttggtatccataatacgcatagcgcgctctacagcagcacccagtcccacaataccaggaatgttctctgtaccagctctgcggcttctctcctgtgctccgccgtgtacaaaggaacggatcttcacacccttgcggatatataagaagccgatacccttggggccgtttaatttgtggccgctggcactgagcatgtcgatgtgcatttcatccacattgatgggaacctgtgcatacgcctgtaccgcatcggtatggaacaatacaccgtgctccttcgcgatctcaccgatctcggcaatgggttcgatggtaccgatctcgttatttgcaaacattacactgatcagaatcgtgtcagggcgaatggctgccttcagctcatccagactgatcagtccgtctctgtccacattcagataagtgatctcaaagcctcgcttctccagatactcacaggtatgaagaatggcatgatgctcgatcttcgtggtaatgatatgttttcccttggaagcataggcttctgcggtagctttcagcgcccagttatcggactcggaaccgccggcagtaaaatagatctcttccggctttgcacccagactgtctgcgatggtctggcgggcatgatccatggccttcttgctctcggcacccagactgtagatggtgctggcattgccgtagtattcactgaagtacggaagcatcgcatccacgacctccggtgccgttttggtagttgctgcattatctaaatatatcatattgcctcatttccgcatattttcatgcttatttcactgttattcatgatagcattcaccgcgcagttctgtcaacaaggtggatggaatatacttttgcaagatcttttatctgcaaaggatccaacgaaaagctatgaagcatgccaaacgtcatcctctgatcttcggtactctgattctgacgatcaccggtcttatcacccgcatcatcggttttttctaccggatctacctgtccaggctcttcggagaagaaggaatggggatctatcagctgctcagtcccgcactgtctctctccttttccctgacagctgccggctaccagaccgccatctccaaattcgttgccgccaatactgcggggcggcgttccgatgacctgaaaacgctgctgaccggggcaagcatcacgctccctctgtcccttggagtcaatactgtcctgtttctcgccgcagaacccataggaaccttcctgttaaaagaagcccgtaccatatccatgctgcggattctgtccttctctattccttttgccgcgctgcatgcctgcatcaacggctatttttatggaaaaaagaaagcttccgttcctgccctcacgcagcttctggagcagctggccagagtcggctgtgtctttctcgtcaccggaaccgatctgtctgaggggcgcaccccctccatcaatgcggccgtcttaggtctgaccgtcggcgagcttctgtccatgctgatcgctctgatctgcctgtacatacacctgtatccggatgcctctgttctttccctgcaaaatatctgtccttcttccacggtctaccgggatctgttgggcatggcactgcccctgaccgccaatcgtatcgttctgaatattttgcagagcatcgaagctgtctccattccccagaagcttctgctctacggttatgataccaccacagccttaagtgtatacggcgtactcaccggtatggccatgcccatgatcttttttcccaatgctctcaccagttccgtggcggtccttctcctgcccaccatctccgaaaatcatgccaaaggagaccgtggagccgtcataaacgccaccctgcgcaccgtaaagtattgcagtctcatgggtgcctgttgtctatgcggctttctgtttctgggtgactggatgggaacggaactgttccacagtgaactggccggtcattttatcgtgactctgggcttcatctgtccttttctgtatctggataccactctctccagcattttgcaggggcttggcatggcgggacggatctttttctccaacgtggtctgccttttaatccggctgttgttcgtattttttgccattcccgtgatcggtatgcagggatatctgtgggggattctggtcagccagctggtacttgccggaatctattttttctgtctgtatcacttcttccgaaaaaattaaaaaatacctccggtgtcatgcttacgcctgacagacggaggtaactattctgtaaataccgttttgcttcccacaaagtactggtactgctgtaagatctggtccttacgcatatcggagatcgccttctccacatccagggaatggatatcgctgttcctgccaatgtagccgaaatcgtcctgtttgtggaacgtaatggagatgtcctctaacgttgcgttggatttcttctcctgaaccggagttttctccttcgccgcaccggaattcccggaatttatctgttccgaagatgctacatgggattctgccccggtctcttccacgatcactgtcttcgccggctgcggcatctgtatgctgtaatcctgcattctaccgattccgctgatcctgttcactccgcctattccgccgattcccatgtattcacctccttgtccttcttttttctatatcgcacatgccatgcgaaattccagctttatctggctgtattttcagttataatatcgactgtttttacgaaaacttaagtcttccggaacttaattgtgattcttgtcattcaggacactctttaattcatccataaaggtgttcacgtccttgaactcccgatatacagaagcaaatcttacataagcgaccgcatccagatcctttaacttattcatcacaagctcaccgatggtgccgctggggatctcccgttcttccctgttgaaaatctcgttctccacctcatccaccaaagtcgtgatctgctgtgcgctgaccggacgtttatgacaggctctgagcacccctgcctcgatcttggcacggtcataggcctctctgttattatcctttttaataatgatcagcggaatcgtctcgatcttctcgtaagtggtgaatcgcttgccgcattcatcacatacacgacggcggcgaatggagttgttatcttccgccggtctcgaatcgatcactctggtattttcatggctacagaacggacatttcataggcatcctccttataaaaaccacgtgttatttatgttaagattatagaagattcagcagttaatgtcaactaaaattatgtccggtccaatctgtctgatgtccttatacgggatgacgatattcggctcacagcgcagaaatgaaagccactggttgcatcccggcaccatgatcttacagatgcatccgctgcactcatcgaactccagatcacatacatgccccagctttttacagtctctgacattgattacatctttgcattttaactcggaaaaaagcatactctgctcctcccgttttctttctatttattatatgataccgctccgtttcccgttcgggaaaaactggaaaatctttcttgccggtatagtcactgactctcctgtgaatactgtagttatcaaaaatcagcaacgattcagaaaacttgggaggtctctatggtacagggaaaagtagaaatctgcggtgtcaatacagcaaaactgcctttgctaaaggcagcggacaaggaagctctcttcgcaaagatccgggagggagataccgccgccagagagacctacatcgaaggcaacctgcgtctggttctgagcgtgatcaaacgcttttccggcagtgcggaaaatgtggacgatctgttccagatcggctgtatcggtctgatcaaggccatcgacaattttgattccacgctgggtgtaaaattttccacctacgcagttccaatgattatcggtgagatacgcagatttttacgtgataacaatagtatccgtgtttcacggtctctgaaggacaccgcctacaaggcaatctacgcccgcgataccctgaccaggaaaaatctgaaggagcccaccatggaagagattgccgcagaagtaggtatctccaaggaggatatcgtctatgccctggatgccatgcagaatcccatgagcctctacgaaccggtctacaccgacggtggtgacaccctctacgtcatggaccagatcagtgataaaaaaaataaggaagagacgtgggtggaacatctctccctcagtgaagccatgaaacgtctgaacgacagagagcgtcatatcatctctctgcgctttttcgaaggaaagacccagaccgaggtcgccgacatgatcggcatctcccaggcccaggtctcccgtctcgaaaaaaatgcattgaaagctatgcgaggctatcttaccgcatagaccttgatcctcgtattctctgtaacgtatgatacaccagccaaaacatccagtatccgatgattcctcccagcacattggtcaggatatcgtccacctgaaaatatcccctgccggtgatcagctggatcgtctcaacgcccaggctggtcacaaaagccgcaaagatgttcctgaaaaatcccctaagccagggaaatgcccaggggcacgcaaagccatacgggatgaaaagcagtacattttccaccacgaaggcgttatttctcgtattgatcccccaggtggagaaaagctccagatccatggcacggttccggctgccatcctctctggagaaaaaagtaatcaccagtatgatcataaggtacaaagaaaacaccatgagacctgccatcggaaaggcttcttttcccttccgctccctcctggcattcattgcattcaggatcagtcccatgacggcaccggccatcacaccatagggcagatattgtatggcaccgttcagatcccttattatatatttccaaatcattctttcttcatcctatatctgtctcttaaaattcccgttttacatctggtaagtgtcccagcgggaaggcgcctcgtcccatagctttttgttctcaaataatctgtcgttcatccagccgaccgcatccaccactccgtcctcgtcaaaggagaacatggccctctgcttcttctcctccggtgtctttaaaaagttaaagggctccggccagaccgtcacgagaagctttttgccgccttccggatcctcagtctgctccagacggtaacgcatcccctggtggcatccggtgaattccgtcttttttaaatattccatggataatatatcatcacgctgtatcatgtatttgtcctttttggttacttccgattccgttacctgaaaactatcctgtctgtattatatggttcacgaactgctctgttgccacgcagctcccacaattctgcacatgttatatagtatcatgtatccgtcccgaatgcaaagtcaaatatgcaggctgatctcctttttcagctgccgcatgatctttttctccagtcgggaaatataggattgtgagattcccaacagattggccacttccttctgggtcatctcctgtccgtccactgtccccagtccgaatcgaagtctgacgatggtcttctcccgcttggacaatttgctcacggcattcatgagaagcttccgctccacctcattctctataccgcgatagatcacatcctcatccgtccccagaatatccgacaacagcagctcgttgccgtcccagtctacattcaacggctcgtcaatcgagacttccattttcgtcttgttattccggcgcagatacatcagtatctcattttcaatgcaccgggaagcataggttgccagcttgatattcttctccggattgaaggtgttgatagacttgatcagtccgatggtgccaatggagatcagatcctccacccctacaccggtgttatcgaattttttggctatgtagaccaccagacgcaggttatgttcgatcaggatggctttcgcctcatcctcgtattccgtccccagatcaccgatcacctgattctcctgctcactgggcaggggcggcggcagtacctccgcgccaccgatatagtggacatctcctttccggtgcagcagataaggctccctgcgcatcattttaaactgcatttttcccggtattgctatctttaagaccatatttactcctatctgccacattgtgccttgccggattgtccggctcttttattttttccttcttcctccgtgctttgttcgtctcctgcaacagcgcaggaggtaacagcatcgggatctcttctcccgcgatctcctcactcactgccaggtatacatttctgtattctcgttccacaccctgctgtatgagcgtcatctgcggcaccggatatcccttaaggatcccgctctttttccctacactgtgataaggaatcacccggaatccaggcagtccctccggccacagccgataaaatatccgtgcgtccagcaccgataccggtgctccgctgataggttcggtcagggtattgccggagtctaccaatgcatgaatgcgcaacggtccctccgctccctgtaacactacctcacaatagcaggcttgttccgcttcctttttgcgcccccgcacaagtatccagccggagaatgctccgactcccagggtcataccgatcccaggcagataatttcttcccatcgggaatccccgaagcagtgccgccagaatgcctccgatcaggaaggtggacagcatcagttttcggaaatagttccacaacgtcccaaggctgcgaatgtgaaatgtcacatacagcataagtattgtccccggcagaaaacaaagcaacagcttcccggcggctgttcctttccataaaaaaggaaacagataccagaccgctccgacccctgctcccgcaagcagccggtaccacgtggcagtgtggcccatgctgtgatccaccaggcaaagcagcagcagattcatcccgaaattgaggaggaacagactgtctaagtagagttcataatgcatcacacccctccttcagaaacattataaagggtggcatcagcggattttgtcaaattttcatccgccggaacctttttctttccattgttttcgacatcgtccctggggaagtctgcgaccgccatcactccccggactccgctgtctcctccggttcttcggtcttctccagtcccagatagggcagaatattttcgtacagctgccttatgatcggtgctgccacctgccccccgtagtagatgccctggggattattgataatagcaatggcgatgacctggggatcatccgccggagcgaagccgataaaggaagatatgtaacgtccgcttcctctgggcagggtctggctggttgcagtcttgccgccgacgcggaagccctgtacctgaccgtttctgccggagccttccgccactaccatttccagaatgtagcgcatagtagccgaagtctcctccgagacgatccccgtctgcaccggataggaaaaggtctcttccacctccccgtcacggttcaacgcctcgatgccgaaatgcggggtgatccggttgccgccgttgataatggaggacgccgtggtcagcagctggattgctgtgatctggaaagattgcccgaaagccacggtagccagctccacatttcccatatcctcttttttatgcatgatagtcccagcttcccccggcaggtcgatgccggtgcgctgttttaggccgaactgttcaaaataatggtagtaattgtccacaccgagccgtaggccgacggaaatcaatgccgggttacaaggggtctggaactactgtcagagttcgggttggtggcatatttttttaacgtgctggctactctaccacctcccaatagcattcgctatgttcgaacttttccttgatataaacgatcctgccctgctcctttaactgttggatactgtgccaggtatagctgtaggtgttccccagccgctccgccatctgtggaatcgtaatgtatttttcacttcggatcagttccagtactttctcgttataagctttccgattgcggtcatagatggtttcttttttataagtgaaggaaaaatggaataaactgtagtccgattccacaatgctgtacagttcaaatttactccgcatcagttccctgctcatggtgacatccatatccccgttgttatgaatctctatgacctccacacagccatagagaatttccagaatcgcctgctcgttataatttttgttttctatggtatcccggatctgctgtaagcggcggtactgatccgccagactcttctccccgtctttctgtccctctatcttttcttccagttcccgaagttccttttccagtctgtccttgtagattccaaagtcctcatcggaaatcactccgttcattaacttatgaaacaatacatccttatttcgtaaaaggagttcacgctgggtttccagtgccttcagtttttttccattgtcggaattgcataatgccttttcaatggtatgaatcgtatcgttgattaaaccggaagagatatggaaaaggtaggcatatttttctttcagtgctgccgccagttgcttctctaactctttctccgctatcaccatattgtcacaggcgcttcgggttctctgaaactgctcgctgcatttccacgtgatgactttttcggaattaagtttgtagtgcattctgtagtatggcttcttgcaatttgcgcagaccagtcggttactccatttgtaggtacctgccagccccttgcagcaccccatctggaaccgccttgcatctatgatctgaacgatcttctcatggtattccctgctgacgatgggaggaatcacgttttccttataaatccagtcctcctgcgggagtttcacacgctccttggtgtagaagttgctgacttccttatgtaaaatgcagtctccatgcaacatcggagaggtcagcattttcttccatgtattcgccgcaatacgcacagaaggcatcttgtgataccctgtggttcctttgctccgcacccctcggtcatacatgatgttggctaaacggtaaaaacctatcccctgctccaccagtgacaaggcgtagcgaagttctgtggcttccttttcgttgactgtccaccagacacgcttggtgttctcgtcgataaactccacattccgatcccagccgtataagggtctgcatatatgcagtgccttggaacccgtggcgtagatctgtctgttgctgtgaatatctctgattttcttggaagtgatcttactctgctctgcatccacgatggcctgcacagaatattttatatcgtccctctcatggtcatagatgtggtcatccagataaaaatacagttgaaacttcttttgcagatgcagtttcacaaaattgtgccattccgcctgatctctgcaaagtctgtccgaacatttcacaaccaccagatcgatccgatccgccttaatgtcccgaatcatccgctgatattccagacgatgctccgcctccgtgccggtctccggctctatatactgatccacaattgtaaggtgattgtcctccaccagtttcctcgtgtatgccacctgcacatccagtgcctccatctgtaccttcttctccgtagacacccggttgtagattgccacccgtgtctgcggcgaaaattttgaaagctcgctcatttctgttttcctcctttttcttttgcatacaacaactccacaatgtcctcatattccttctccgataaacttccgtcctcgtacagtaaccgtacaattccacactgcacctctgtttccttccgtaaggaaacctcccggttctttgctgctctcttagcgccagatccagttgccattccatcctccgaacgaggtttttaccagtgtatgccattgaaacgctgacctacacaaaatgcaagattatttccgctattttccgaatgtttttattctttcatagcagtgcatcgttaattatttaacaagtaaatatacctcttaatttatttaatctagcgcgcaatacaaatgcgttccgttttcaaaaggtgtgctgttaccgctacgggtatggcttcggtggggacgatgtaaggtagttcggaaataaactgttctggggtagggacgctatgcgatcagggggaacgctgtgggaaaatcgatgaacgtatcggggtgaaaagtgaaaaaaggtcagtgcggtggaaaataagtgactattgcgctttagaaaactaacaacctgtctgaaaatggtctactacttccaaaaatgagaatgtcgggtcacatgacagattggctcctgtggttcacagtgctttcatcacctgttcggatggtgctggtggattcatggaaatgctgcgtggaaaacttgaaaatatttttctgaaatgctttattactgttttttgctttgtctgaggttggaaaatcacatggtagatgggtgtaggtgttgatgggtggggaaattactaaccagtcgggaaaaggtgataaacggatttttcagacactgaaagaaaaatcccttgaccttccaaaagaagaaagtcttgggattttttcaaatatttacctgtttttggtattactgtcaatgacagggagaatacaatagaagacctttttattactcttctggaggtaacttttcctccgtttcttctgcttctggctcttttataattttcaaatttctctttgcaacatagccttccctctggacaccatcctcgtctgtgaacgtaactttgtagtagtaatttgtgttttcaataatggttgcttctatattttccttcaactgggcaacaattttagctcctttttcaggaagttcttttacattactttctacataagtcatagctggaagacccaaattttcctgaagataaggctgaataaaaatcccccatataagtaaccaaaagttaattacaataaaatattttttgtatttttctgccgcccaatttgcaactctctcttggaaaccaacagggttattcatctggtcatttattgtgtcttgaatttcctgttcacttgcaaagtctgtttccaactctacattttctgagatgttctcttcctcttgaagagattcatacgctgcatcgacagcatctttaaaagttccgtttttttgcagtgtttgagaaaaaattttgctgtaatcaatgctctctaactgactaatctgttcagctataacactatccgtaaaaagtttcattgattcctgaaggttctggattgaacgtgccgtatcaatagtggttactgacatcaatgattttgcaatattttgtatgctatctaggcttcttctatattcttccgccatgtttattgctgaaaactgtcttccaatctctttaaaagattccattgattgtttgtatgactctgatacctcaaaaggagtataagcagctttcaatactgctgacgctgattttgatatatctacattctcataccctttccacaattctgccattctactgctcataagtcctgctgctcctattaatgccgatgtatcaagggtcatttcagacaatgttttagttaatggcattaacgattttctcattctttcaagtgattctaaataagaatcatatggtgttttcgagttgtcatttttcatatagctatacctcccttgaaaattccccaactactgttcttgtttccaattatacaacagatttcaacaaagaaaacgtcatttttctgccaaaaaaacgtcacaaaaaggactagcattgctgccagtcctcttatttactgaatcttccaataattatttttactgaatgaagattgatatcctttataactattaaaattcttctccctttttacaaaagtgtgtctgatgcatattaactcataattatacgaaataccactcttttatttattttctattcacttcttactaatgggtattcatttttgctttaagttgtcgtgcaatttattagaatggaattttgaaaaggctatctcacttgggaggtgaggtagcctttttaatttgccactgtatttttaataaccaattacatcttttgatacttcattaattactgattgaggtatcgtatcaatgcttactgtatagactttgttcatacgaggattatatatacctagattctttatgctcttaaactctttatgaatcgagtgcatacccatgatataatataccaacaactgcaatgtgtattttggctttggctcatcctttgacactttaaaatcccataatgtatcttttgttaaatagtctccatcaccagtagatatagtgtctgtgtatccgccttcaaatgtaaatccatcttttgttataggtccatattctttccaaaaagataaactacgattaatcatggttacaatgttttcaatcgtatctttatcggggttaatttcttctaccggcttataccctattatgccagctctaaaacaaacatcatatcctaccaatttgcaagcatttgttatggattttttatcaagtccttttatatctgctaatagacttgtagcgtttttcattgacgattgctttttattccctgtaaataaatccaaagccaaagcacccttcaaagatattgaaaaggcttcctctttttgggcacccatcaaaaatcgggtcatataatcaactgcaagaccaactaaacttgcatggatattctcattctcattcaatgtaattccatcatcaagttgagttaccacaagttcttttttgtttatgtatccaccacggggttgttttatcatgctaattcgtttggttactgaatacattcgtttgtacctccaatattctcattatgcatatcttatcatattttatcacatgacaagaacattgtgaatgatttgctatattatattcgattattttcgctctttgatgactgattcaatgatatctatgtatttttgaggtaagttgaatgcttcatacaattcttggtcggtgtagatgtggtcaaacttgcctgatggtggagcgggaacgaaacggaagtaatcattggtgagtattccagttaattttgaaatattgcatgcaacaaaaaatcttgtaaacttcgtgtttagccatgatataaaactttcacactcggctctattatctgaactgaatatacattcacttgctccagatggtgatttttcaccttttgatgtatctagtattctacttaaccctataactgttgaacttccgttatctgacataaatcttgaaccactgcctgctacttgattatttgtccatacttgatatttatttgatgcatattgcctaaaaacaaaatgtttatattggtgtagactatcaacaatttctgaaccaatattaagaaggctttcacgccccaataatggtctcattattgatgaattgtaatattcttgcactctacatttattgattacttcacaactgtcatgagtgttcttatcaataataaaccatgtaataccatctatttggtaaatgtcaaatacctccatgctttgtggatagaagcaaacataactcatgtgtggtacatacatttcacgaaactgcttataattgatatttttacttgcacatccactataatcatctgctgtggtttgccatttagctggtgttatcattactgtatatttgttcgatattttataacctaggtctacaaagtctaagtccattcctttattatatggtgggttacctatgactacatcaaatttcatttgtccgaactcctttttcatttcatctattaacatcttatgattgttatttaggcaagctgtcttgtattggtcaaatactccaaagcatctcttctgtcaacgccgtacattctatcagacctccgacaaacgcctgctctgccttgagagaattttctatttccatgattccttgcttatctttcgtgtatccatatactttcatactgctgccctccgaaaagaaacggacaccccattacagggtgtccgacttctccttatcctctttctgttttccatccgccacaggtgctgttggtttttccagagatgccaccactaccgcaccattttccagtttcgccccggcactgatgatatgcatatccaacagcgtttttactttttcctccgtgaagctggttctctcatatcgtgaggaaatcacatcatacatggtatttcccttttccttatgtgtaccgatcacaatatagaaaaggttggctaaacaatcttcctcgaccatgggaattaaagtgttggtgtggattttcttcatcatgttggtggtgaaaaagttctttttatccattaccagttcccctgcttcggataactccagaccatacacctcatccgtagtaatgcctttcagggcatctttgatctgcttctctgtcagttccacgacttcccccttgggtaagctgtaggcttcataacagattgctcttgttcctaaaaagatctcgttggttactactaattttctgcacataattttttcctcctgcgtttcgcatttactattttgtttcggacattttcttttctgtcctccttacatttaatacaataacgctgggaaaatgttttggcagtggcgagaatagccagagatttaataaggtgattagtgatgatgtagaagcttcatgccctctacaaaataaccaattttgaccctgtcaattttggtgtatatttcaaaaaaaataaacatcaaaaaaaaagcaaccgccctcgctaggaataggttgctttccctgtatccaccttctcaaatctgctgaagccggtaaccgctgtccttgcaaatggatcttgtgtctaaatctatcagcttatctacggtacccttatctttacagcagtattcacactttttatcgcatatatttatcacttgctgttgtgccatattttcttttatgtcactgcaatctctcaaccaacattccgccgatttccggaacgctcccactgatttcgttatcgcaaaatgaccgttcccttttaatgcccttgttacctccatcagcagttcgtttgcaaagtgttctctgttttttcctgcgctgttatgtaaatcaataaagttctgaatctcgcgactggtatcaaaataatctgttccattttgcaaattatcatgtacatactgtaatgcagcaatgaccacattttctgccacggggttcttcaagtacatcgctaagacttcgtcataggaaaggtacagatcctcaaagcaccaataggatgtagcaacaaactcagcgccttttttcatgcacagcctggttccccatttcacaaagtcatgtgcaataaaccctttggtattgtttgccacacagtcaaccgctacaaatactttatctcctgcctgcaatttgggaaatatgcttaacacctgcgcctttaaggttgtattccccgaagcagtctgtccatcactcccgattggaaatgatactaacagaaaggaatccacagatctgaatgtctgggctacacattgccagaaatcacgggctgaatttgaatcctctgtaatgatatacaacaattatgcccacccccgtacataacactcatattccaactgcagttccccatccttcttgcacaacgtcccgaaatagttcggtgacaactcgattcccataggttttcttaaaaatatcaggtatctgttgtcccctctgtccgcattgataatttctaccatctgttcatccagtataagctctgctctgtctattatgataagcttacccttttgtaaggaaagcttgtccttattatcctttgatacaataaaaatattgtcagcattatacggcttaaagctggcattattattatcgttgatgtagcttttcaacatagtgcacagtaaagattttcccgttgcactatccccatgcactatggtcttatttccccggaattttaagttatatttatttccgtttacatccgtaaatttcaaaacattgctttgccaatcataacactgttgcatgttacctccccataaactacaccatgaaaagtaagtctgttattctttcggaatcgttgatcaaatactctctgttaccgcattcatatatttcatcctcatgctccaggacgattcctatgtccatattagtcttatcaatataacagaaaagctgctctaacgcattctttccgcattccgttgcattaatcgctctgactgtcggatataccttctggttctcttgcagaaaaatgcaattcaatatggttttgcaccccgttgacaagtcctgaataccagtaatgccgtaaggagtttctattttcccgatattctgatccaatagctttgcatggtcaacttcttccatgaccttaatagaattttcggaaaggctttttgcagatacattgttattaaaaaaagaatcattgtctatgatgatttcgttgtctttaaaatatttgcctgaggtatatagtctaaccatacttcgccgttctccttttcatttattataccgcctaattcacaaaattacaaaccaccgttttgaaattccctgtttctccccactcgcaccccagcatcagatccagaccctctggttacaactgttctccatgcactgtacaaaagtctggctgccatgcccggcgatcttgtgacaacggatcctgcggtcatccacgatgataaatcctggacaggaaaaagtgctttccggggtcactactcccgcctccagtcccgcagcggccgtgatgatcttgaaggtggatcccggttcgtaggtgtcgttgatacagccgtttcgccacatggcattcagcttttcctgtttctgttccgccgtcagtgtgtccgggtccaccgccacaacgctgccgtcctccttcacttccgtcagctccggtaaggtataagggtcattcaaatcaaactccggataattcaccatagccaggatctcgccgttctgcggattcatagccactatataaacactgtccgcctccttggtggcacaggcctgcgccgccagctgtgtagcatactcctggatgttccggtcgatgctgatacgaagatccatgcccggcaccggttccacccgacgctcccctgccgtatccacctcgatccccttggcgtccgtgatcgtcaggatcattcccggatccccctgcaggatctcttcatataccacttccagtccgatgattccctgattgtctcctccggtaaaacccagcaccttgctagccagatccccgtaaggataatatctcttgtaatcttcgtccacttttaccccggccagatcatattcccggatccggtctcccacggtcttatccacgttgcttttcacccgctcgatggaggaatatttctccacccgctttctggcctcttcctcggagattcccagttccttcaccagtatggcgatcacctgctccggctcctcgatctgattgtggatcaccgataccgtacagaccatcttgttgtccgccagcacgaccccgttgcgatccagaatccgtcctctcgccgccttgatgctgcgctctctttcgtgcagccttgtggccgcttcctcataatattccgcccgccataccatcagatacaatagtcttcccaacagtccgcagagcactgccgcacatacgaaaaatatggtcatgatcttcttccgatgaaagaaacgattctgatgatctgccataaaaaaacctcacaacaagagctttttacattttattgctcttgctgtgaggctattcgtcagattaccttactattcattctgctggttcagcagattattgttgaccgggctgtcccccagggaatcatcgccgccgacatccgctcccgtaacagggtcaatcagtccaccgtcaatcgggcttaccagataaccggtggccggatccacaggataatttctccaatcctcggaaggtgttgaatcatcaccgccctgaccgtcgccggttccatcaccactgcccgtctgatcgtctccggtctgtccgtcgccggttccgtcaccattattctgatcctcaccgtcctcgggcttctgggtatactgattggtgatctcgatctgtttttctgccagctcctggatctccttctcagacagctcctcggtcatgaaaatattcaggtacggcaatacttccgtcagaacatttcgtacaataccggttgcgaacttcgcatcatcctgcggagatgcattggcacgatccacgaccacatagatagcgatctggggatcatccgccggtgcatatcccataaaggatacgacgtactcaccgtttttacggggaatggtctctgcggtaccggtcttgccaccgatggcgtagcctgcaggtcttgcggttctaccggttctgcggtcaccaccctcttccattacggtagcccggcagtactgtctgatcttcgccgaggtgctctcggaaatggtctgacgcagtactctgggctcgatgttttccactgttgcgccgttagaattggtgatcttatccaccatatgcggctcataataataaccgccgttgatcagggaacagaatcccgtgatcatctggatcattgttacattgaagttctgtccgaaactgttggtagccagatcggcgcttcccatctgatctactgggaacaacaggcttgcggttctcgcttctcctgccagatccacgttggtctttaatccaaagttaaaggtctgttggaatttggcaaactcttcttttcccaaagtagctgcaatcttcatcagcgccacgttgcaggaccaggcaatggaatcctgtacggatacatctccttcaccgccggaacgatagctgtgacacttgatcgtatgtccgccgacttccagagatccgttacactgatagtgctcgttgccggtgatagcaccgctctccagtgctgccgccacagtaaacggttttgctgtggaacccggctcgtaagtagtggagatacaatagttcttccacaggtaattcaggttgtccagcaattcgtcatccgttaaggcatcaatgtcttcctgcgtaaaataggtatctgtcttggtcagaacatcataaccgttggcattggtcaccatctcgatcttacgggatcccaaaagggcgtccgtattcctggtatcgttcaggtcataggtcggataacttgccatggccagaatattaccggtattaacctccataatgatgcagcccacattttccgcaccgttaccgggatgtaccgcatccttatgttcctcgttaaactgcttcagatatttctccacaataccctggatattggcatcaatggtactgtgtatcgtattgccgtccacggccggtttgatggtccgctccaggttggcatcatcattcagatatccatactctcttccggtggttccgttcagcacatcattgtaatactcttccagtccgtactgtccttcgttgtccgatctggagaatccgatcacgtccgccgccagggaaccattgggatagactctcttgtattcttcctggaaccagacgcccttgatcttgctgtcctccagtgctgccgcctgaaaaccgctgatctgatcataggtcagccttctgagagggacataccaggaagaatccggatgactgatcacatactgtctcactgccgtcatatccagatccgggaaatttgcggacagcgcctccatcgtcggttccagataagtctcacggcttaacattacataggaatcaatgaccagattatataccttctcgctgactgccagttttgttcccttggtatccacgatgtctccacggcggaacggcaatgtcacggagtcgtatttctgctgtgacaaaacctgtttttcgtaggttgctccatccgctttcacgatccaggacagtcggacagacagcagaataaatgccagtatgatcagggcatacaggcataaaagttttttctgcatctttatggaaaatttcttaggcttctgttccttcacgctttctgcctcccagacttagttctggctggtatccgcctgacgcatatagtcgttgctgctgtttgcgtaggtgattacctgtccttcggcagcataggtcattccaagttcgccgatggcaattctcttgacttcttccagattgatattgctggtaatccggctgtactcttcatcgtttgacagcttcagagagttcagttcactctccattctggacacctcagtgatcttggtggtcagctccgactgcatctggatataatttaccagacagaaggcacaggcaatcaatgctcccatcagaaaggtgacgtagccgatgctcatatgtcttgctttttctctgttttttctcgtctcatgagacatctgtctccgaggctcctccatctgcctgcggatctgtaagtctcttgctgtattatcatatatgtaaggagtattgcttactcttcttctctgtgccatactctttctccccgctttcactactaaagtcttttattttttctcaaataccctgagctttgcactcttggatctgctgtttacttccagttcttccacactgggaagaatgggttttctggtgatcacctttcccttggagaccttaccgcatacgcacaccggaaattccggcggacaggtgcagggattctcattcctgcggaatgcgttcttcacgatccggtcctccagggaatggaaggtaataatgcagaaccttccgccgggattcagcagatcgatcagctcgtccagcgcctttttcagtacttccagttcctgattacattcgatacggattgcctggaaagtctgcttcgaaggatgtccgttctgtcgcatctttgccgggactgcggctttgatgatctcatttaattcaaaggtggtctcaatgggcttgtctgccctgtttttcacaatgtgtttcgctatattcttggcaaaaggatcttcaccgtaatcccggatgatgtgatacagttccatctcggaataattgttgacgatatctctcgctgtcagggtctgcctgcgatccatccgcatgtcaagaggggcatcaaaccgataggaaaatcctcggtcttcggtatccagctgataggaagatactcccagatccagcacgattccgtccacgccggtgacaccatattctctgagagcctccactgcatttacataattgttgcggatcacggtcactttatctccaaacggctgcaatcttgcggatgctgccgcgattgctgcatcatcctgatcaataccgtagaaatgtccgtttttcaggcggctgcatacttcgtaggcatgtcctcctccacctaaagttccgtccacatagatgccgtccgggttaatattcagttgttcaatggtctcatgcagcatcacagaataatgattgaattccacgacggtcatcctttctcggtcacgtttttcacccgttaaatggtcagtcccagtccttccatggcgctggtgatctcatccatatcggtatcggagttcatattctcccatttatccttgctccagatctccacacggctgccgacgccgaccagtaccacgtccttttccagtccagcgaactctctgagtgctgccggcaacaggattcttccctgcttgtccacttctaccgtagctgcaccggccaggaagaaacgggcgaattgtcttgcttctttattgatcagaggtaatgaagtcagcttctgttcaaaagcgttccagtcatcgttggcatacacaaataagcagccatccattcctttggaaaccacaaattcctctcctaagacttctcggaattttgccggaataatcaacctgcctttcgtatctaacgtatggttgtactcgctcataaacatcgcactcaccaccattcatccaaaaggggactgccacgaaaaggaggtcatttttctaaaaatctaccactttgtggcacttgcctccactttctcccacttttattatgattttatactaaaatagggtattttacaagagaaatcaagtagcttttttcgacagcaccacgcaaaaaagcgccctgtcctacgacaaaggcgccttttactactatatctggtataaaaataagagcaaacacaatatctatgtatttgctcctgtttcgatattcttaataaatttttaaaaatttttaatatttttccactttcggctgtttttccaggcggatacgtaccacaacgtccgtcaccactgcgaagatcaccatgcacaaggataatacctgtgatacggcgagggtcgttccggggataaacagggtatctgtccggataccttcgatccagaatctgccaagaccatagcctccgaagtacagcagacagatctcaccctcaaactttttgtgcttgcggtacaccagcataatgatcaggatcatcagattccacaggctctcgtagaggaaagtgggatgtacctgaatgtaattggtcccatcgataatgtgagctgctacattctcagaaatatcccggctgcgcacagcttcgataggaagccgcatggccagaaaactgtccgtatattccccgaatacttcacggttcataaagttaccccagcggccgatgatctgtcccaggatcaaccccggcacacacagatctcccagccggaacgggttgatcttcttgatcctgcaataaatgagcagtgtcaggaatgctccgatcacaccgccgtagatcgccataccgccgttacgggtattgaaaatgcttaacagattgtccttgtaatagtcccaggcaaagaccacgtaatagattctggctccgatcacggaaaagatcacggcataaatggcgaaatcccagatcgtatccggattttctcctgtcacctttgcctgatgcaccgccatcagaatgcctgccagtaccccgattccgatgatcaggccgtaaaaggcgatttcgaaaccgaatacggaaaagcttctgggaacattctccaggtaaatgcctaaatggggaaatgcaatatctcctgcattcatcataatatttatttcctttcttggtactatccggcttctgcgcgcttcgcgctcccgaatccggcacatacattcgcattccgggctatcgccctacttgctcatggctccatactatccggcttctccgcgcttcgcgctcccgaatccggcacatacattcgcattccgggctatcgccctacttgctcatggctccatactaaccggcttctccgcgctctgcgctcccgaatccggcacatacattcgcattccgggctatcgccctacttgctcatgtatgtttgatccgctaatagacagattactctgcctgcaagcagtctcgtaatctgtctattgcggatcttagtattacacgttgaatctaaataggatcacatcgccgtcctgcactacataatccttaccttccatgccgaccagacccttttcacgggcagcggccagagagccctgctccagcagatccttgtagtttactacttctgccttgatgaagcctctctcgaaatcggagtggatcttgccggctgcctgaggtgccttggtgccaatcttgatggtccatgctctggtctcatcctctcctgcagtcaggaagctcatcagacctaagatatgataacttgccttaatcagtttctccagaccggattcctttaatcccagatcgtctaagaacattgccttctcatcatcatccagctcggagatctcttcctcgatctgtgcacagatcacgaatacctcactgtgttcaccggctgcgaactctcttacttttgccaccatctcattggatgcgccgtcatctgccagatcatcctcggctacattggctgcatagatcacaggcttataagtcaacagattgtattcctttaacagagccagttcatcctcatcggtaacatccaggctctttgccatcttaccgctctccagatgctccttgatacgctcaagcagtgccagctccttggcataggtcttgtccattctggctgccttgactaccttggacagtcttctctccagtacttccagatctgcgaagatcagctccagattgatggtctcgatatcacgcagagggttcacgctgccgtccacatggatgacattaggatcctcgaaacatcttaccacatgtacgatagcatccacttcacggatattgcttaagaactggttgcccagtccctcacccttggaggcaccctttaccagacctgcgatatccacgaattcgatcactgcgggagttaccttcttggaatgatacatctcgcccagtgctttcagtctgtcatccggaactgttaccacacccacgttagggtcgatggtacagaagggatagttggcggattctgctcccgccttggtcagggaattgaaaagtgtgctctttcccacgttgggaagacctacgatacccagcttcattttatctttacccgttcaaaaatccctctataaacggaatttttgcctttctgtttattagttgaacaatataatctaaaattatagcataatatgtgtttttttcaaacacctaaatacttttctttcgaaataaaaatatgctataatatgcaatatcataaaccaaagaggaaaaattaatgaaaagaatacattattttgatttgcttagatgtacctgcttttgcttcattattttttatcatctgctctttcagctctatctctccggaatctgtcctgtagagagactcaatcctctgttttccaacagcaatatgcatctggcaaccctgggtgttgctgtatttttcatgttatccggtgccagtctctcctataccgcgaaggagaacttcagcctcgcaaaatattataagaaaagatttctgcgcatcctgattcccttttatattctttacattgtttatttcctgtttctccttttccagagccattccgtccacaatatttttcctgaaggaattcctgcgtggagaattgtttttacttttcttggaatggattcctgggtcagcatgcacgggatcagcaccttttcccttaccatcggagaatggtttctgggatgtcttattctgttgtatctgatctttccattgcttcgattttttatgataaaaaatgaaaagttcttttttatcatcgctaccgggatttatttgattgttttatttcattacgatttctccgtccccatccatatgaacttcttcctgaagggctacgagttcgtaatcggtatgatgattggttattatcatgaaaaattcaatcctaaatggattttcttatccctgccggtggtgattttctttgttctgtgcccttttgcacttcccatcagcaccggtttgaaaataacgatactggccgttgccttctggatttccgctgcatgcctagaaccggttctcgaaaaaggaaacggccgatttctccgtacgataagtaactactcttatgaagtatttctggtccaccatatcattatctattttatcactccgagggctattccctatatgcgcggtatggtgggtgttttaggtttgtttctcgttgaattgctgctgatggcagtgctgggatttcttttgaagtccatctccgatcaatgcattgccgctctaaccaatcttactgctgttgaaaataaacgttaatcccctgcagtaatccttccgccagttgatccagtatagcatcgctgtgatcggaatatgcatttcccagttccatatccacggaagggatcgtactataagaagtctgggtcaggtcaatgctcatgtttccttttccatagatcgttactccctgtccccgcagcccttccaccagatccgctcccagagcatcgtgctgctgccagtgggatgccaccggttccatactcttcagtacttccggcacagagatgtaaaagcatcccttgtcgtaattcttgctgtcaccgctgtcccagtgcagtgcaatatggcagtctgccacgttattgcagatcacggtcctggccacattgtccaactgcacatcctctccgtccctgagcatcagtacatcatagccagaggccaacagtttgtcccgcaggatctgtgccatctgcaaagtaaccgttcgctccggtgtcccgtcctgaaatgtcatgcctccggacactgccgcagcttctgtagctcccgctgccgtactgcctcccgtagtcttggccgaaccgtccggatggcacaacgtctttactttggccccaccggcggtgccatgtcccgcattcactccgataatgattccctttcgtccacactcctccggtgcccggtacaataccgccgccccggtattgatcttcgaatgatccgcatattcccagtccggatccagagtgatctgttgtaagtcggtatattccaccggctggttctgtatagcctccggctgaccggctaccgtttctgtctgactgcctgcggcctctgtcggcataccgctttgcgacaccgcaacctctcccccaggaactttgtcggtccccgaagtcaccatttcatgtcctgcactattcgccgccccttgcggcacagacgtttccgccagcgtttctctaccgaattcctctgcgtttttctcattttctgttgtctccgcggatgctactacgctctcgggaaccacaggatccacgttttccatagtttccacgctctccgtcccctcagtccctttctgtgcaccacaggctgtcatacttactgcaagcgccagaccggccactaccgccgctatcccatattgttttctatgaagcatttccttattactcattactcctccgatatgaaaagaaccacagctgtggtttcagctatggttcttctgttctctctattacgatcttgggaaaacatcctccgattaaccgcgcagtttgaagtgctctaacaactcgttcaaagtagtagcggaagcggaaagctcctcgctggtagcggaagtctcctctgctgctgcggagttggactggataacatcgttgatgtcctccacacccttcttgatgttgttgacagatactgcctgtctgtcggatgcagtacggatattagcaacctcctggatgatctgatccagttcggtcataaccttctgcattgcttcgttggtctccctggtaaccctgttacccactcctacttcgttcatggattcttcgatcagcttcttagactctactgcggaatttgcactctcttctgccagctgtctgatctggtcagccacgactgcgaaacctcttccggcttcccctgctcttgctgcctcaatggaagcattcaaagacagcagattggtctgggatgcaatattctcgatatctgcgatgatcttctcgatattctgggtcgtggtatcgattttcttcatggcatctaccagctcatccatcttctgctggctgttggctgcctcgatacctacctgttttgccttatcgtgaacgatatcggtagacttggtgttctccattacctgattcgttacttcttctacggtagccaccagttcttcaacagctgcagcctgactggtagcaccttctgcaatatcctgtgcactgacagccagctgattgcttccggcagacacctgttcggaagatccctgaataccgtgcatagtctcactgaccttgttcaccatatcatccagttcatccagtacattgcggagctgtcctacatacgcatcggggcagttgctatgtacatcaaaattaccctcagcaaaatgctctacaatatcctgcagatctgatacaacctttttcaaaataccggctgcggtctcaaaactgtcggataagcgtcccagctcatcctcggactcataaggagtgccgatctcaaagtcaccggaagcaatcttctcagatgccactaccagactttcaataggctctaccaacattttggcaagcatctttgacatagctgcattaaatgcaatagctaatacaactatgatcacaacaattacgcttcccacatagttttttgactgtatcaatcccacaactgacaccagtgccagcaccacatataaaacgtccataatgcggaacacaaaagaaagcttatttttaatcggtttctcccttagcatttcttccagttttttcatttgtttcctgctccttccgttaattaacctacatacattttattttaatttcctctggttgtttcgtcaagatttctctgcttaaaattatgtaaaaatcatgtatgggatgactggctcatctccagaagcttatcccgcatttcattttcgatccgctgtaagtcttcctctgcgctctgtcttctggcacggccttcctcctggatcttcatgacttcatccagtgtggtcatcagtgtctggttcgtggtcttgagggtctcgatatccacaatacctctctcagattccttcgctgtctccacggatgccactttcagtgcttctgcatttttcttcaacagttcattggtcatatccgatactgcacgctgtgccttggctgcatcggtggcatgatccagaccgatggcaatgaccatctggctcttccacagagggatcgtattcaccagtgtggactggatcttctcggacatagcgatatcattggactggatcagtcggatctggggtgccatctgcagagaaatggctctggtaagttccagatcatagatcttcttctcgaatctctcacacattgctgcaaaatccttcgcagcctgcgtatcctccggcagtccgctcttctgtgctttttccagaagttccggcagttccacgtttttcgcctgtgtcagtttctttttacctgccagaatgtacatggacagttctttaaaataattcagattcagctgatacagcttgtccagtaccgccacatcttttagcagcaccacctgatgatttcccatggcatcacagatcttgctgatgttcacttccgctttatcatactttgctttcagattattcagcttatccccgctctttttaaacaagccgaagaatcccttgtcttcctctgtatcaaaatccctgagctgtgccactacatccgtcaacagctgtccaacctcgcccatatccttggtccggacattgctaagtgctgtctcagagaaatctgcgatctttttctgactccccgcaccgtactgcaataccgcctgggtattggtcagatcgatctgtcccgcaaaatcatctaccattttctgttcttccggtgtcagttccatctccggaacagcctgctcctctaccagttcctccggcttcttctccacgatctctgcctttgcctccgcaaagggatccagtgtaagggtaggtgcctcttttgttgctgcatccagatccatattcatacttataaccccgcctttccatactctctcatgattttttatttaccatcagcattactttcctgctgtcatacatttttttctcttacaaaatccgattctgtcagcccttccttagccaacatcgtctgcaatacctgtgcatccgctgacgcatcaaaggctgcatcccggaacagattgttcagcaatgtaacgaatgcctgattgatcatatccagtgtcttttcgatctcttttttagcatcgagaatatcttctcccgggctgctgatctcgtcaaattccgcatactgctccaccagtttcaacatagtaggcaggtaataatccatcagtttatgcatccggtgcatctgctccggatgctcctgcactcggtcaaagatctccttcaacagattttccagccggtacagcttctcagagatagcttctccttcgatcctgtcattcagatcccgcagatgacggatgtattccattccttctgccacaatactgtgcagttcctgctctctgcggttctgatccgtatcctgtgtatcggtgcccgctgtattctgttccttctcctgctcactgatcttcttctgctccagataggctttctccgtctccagatactgacggtagatcacattattgagcataaagcaggtctctttatcatccagatgtccgtccggaaacattccggcttttaacatcttacgaagatcccttctgacatagcggacactttttccggtatagcgggccatttcgttgatcacaccatacattttggtgccgcacagttccagatatttctccgcgcgttttaatcttctacgctgtccgttgccataagagatcatctctaaaaataccagagacaatacccccggaaggatcgccgcactcagagatgctgcctgaaaagctgccagtaacagctgtaccagaagtcccagtccgctgaaccccagtccgatcccgccgaacacagtgcacaatgttccggacacgtttcccttcttttccattttgaccagagaagtcatttctgccgcagtagcttttctgggtgtcaccggctgtgcctgattccgtgcacggttctgctctgcctgaaccttccgttgttcttcccactgcttttcccgctctctgcgctgccggtgccattcttcgttctgcctgcggcgctcctcctgctgtttttcccgctgcttccgttctgcctggatctctgtctcagtcttgacttcctcccgccttttatcctgccagctgcgctgggaattccacacctttttttccgtggcttccctggacagatttgcctggaaatccgcctcccgcaaggcatcgttgaccgtatccgtcaccagcgtgttcaacgcatgaaaatctccggtcttcatcgcttccgcaatggtctctttgaatttttcccctagattattctgcacttcactcataattaatattttctctgatttttcagttcatcatagagcagacagtagttctcataacgtatctgcgggatctctccctctgccacagcagccttgataccgcataccggctcagagatatgggagcagcctccgaatctgcaatatttttcaaaaggggcaaactccggataaaattccgccaactgctccttctccaaccgaaacaaccccagagagctaaatcccggggtatccagaatatacgtatcctgtgcaatggagatcagttcggagtgcctggtagtatgctttccccgctcgatcttctcactgatggagccggtctccatcactgtgctggactgcaggcagtttaccagagaggatttaccgacaccgctgggacccgccaccgtagtggtcttgccacgaagcagctcctgaatggtatctatcccttcttgtctggctgcgctgaccgtgatcgtacggaatcccgcctgttcgtaaatggcacgataatcttcctttttgccttcctcgtcaatatcctgcttgttaaaacagataatgcagggaatgtcctgctgctgcatcatgaccaggaaacgatccagcagattaaaattcggctgtggcttcgtgatggcaaaaatcaccagcgcctgatccacattagctaccgccggacgaatcagttcactgtgtctgggaagcaattccctgatatttccttttttctgtgcctcatccaggacatccatctccacgtcatccccgaccaggggttttctgtgatccttgcgaaagactccttttgccttgcattcgtacaccgtgcccattgtatggccatcgtccgctacatggacgtaatagaacccggcgattccttttataatcttgcccttcatagcttcccgcctttgatcttattcctttacgaactcaactcttctggtaaaggaacggtcttctgtcgttccgggaaccgtcacctgctccccggtatccgggttcgttgtggtggtcggttcgcttgtcacctgatacgtcatggtgagcgtaccaccggaggcagtcataccgttgaaattggtagctaccgggaaagtgctggtcttggtatccagcagtacgttattgtcatccgtcaccagtttgatgctgacttccattcccgatacatagccgggtgcttccgaagtcgtcggtgccgcaatgctgacattacacttgtaagtcaccttctgagctccctgactgaccttgatatcaatggaagttccctgatccacataggagccatgggaatagctctggtaacagatcatgccttctcccacttcgtcactgtagatataggtcacactgcctacggtcagtcctgcctcgatggcttctaccgtgccgtcctgctcggacagaccgatcagattcggcacacggatcttggtatcttccttacccagacttactgtcacagtgatcacactgccctttggtgctttgttgccctcggagggggtctgggaaatcacccgaccggactctaccgtatcggaatagttctctgtcttgttgaccaggaatcccttgcttaccagctgtgtattggcttcatcaaaagtaagatccaccacattgggtacttccacaccctgagttcctgcactggctttcagggttaccttgctgcccttatcgatctgtgctcccacgctgacatctgtattgataacaacaccttccgctaccgtgtcggactcctcataagtcacctctgtgaggattcccagactggtcagggtgctctttgcatcttctaccttcatgccctttacatccggcatggagaccttttccacttctgtggcatccgtctcttcggtcgtaatgatcggtcctgagtcagagtcgctgcttccttcatttttgccgccgaagatcttcactgccagaacgatcaggataatacagatcaccacaccggctacaattgccaggattgtggtcacacgctccatcttggggtcgtagtcgtaattatcctcgtcttcgccatcctcatcgttttcatacatggcttcggtatcggaacgcagacgcatggtctcatcatgatccggttcttcgtattcccgtcctccctgataagggacttttcgtttgatctgtgccatatcctcatcggagatcatccgggtaccaccttccatatccggatcggtgttcaccacgaaatcttcctccgggttgatcagagactgcttcagatccgcgatcagttctgccatattctggtatctgcggtccggagacttctgacaacatttcagtacaatactggctacgctggaagggatctccggtacaaactccttcggagacggcatttcttcctgaatatgcttgatggcgatggcaaccgtagtctccccgttgaaaggaactcttcccgtcagcatctcgaacatggtgatacccagcgaatagatatcactcttttcatcgctgtacccccctctggcctgctctggagaagtatagtgtacacttcccatgacattagaagtgatggtattactggtagctgccttggcaataccgaagtccgtcaccttgactttgccgtccttggagataataatattctgcggcttgatatcccgatggataatatgattattatgtgcagcctcaatacccatgcttacctggatggcgatacttaccgcttccttgtaagacagtctggccttcttctcaatgtactttttgagggtaataccctctaccagttccatgacgatataatagattccgttctcttccccgacatcatagacattgacaatattggggtgcatcagtcctgctgccgcctgtgcctcgatccggaatttggatacaaaattagcattttcgctgaattcctgcttcaataccttgatcgccacatagcgattcagcttgtgacattttgctttatagacatctgacataccgccggttccgattttttccaggatctcatagcgatcgccgatcatcattcctattttgatcatacttgctctccatttccaaaaaagctgggtaatttatgcgcacggctcgatcagtatcacactgatattgtctctgccgccgttggcattggccgcctccaccaggctctctgccttctccacaaggtctctggctccgctgataatcatgcggatttcctcgtcttccagcatatttgtcagaccatccgagcacataaggacgatctcaccctcctgtaattccacggtaaagaaatccggctccactttgtcttccgcccctaccgctctggtaataatatttttatccggatggttccttgcatcggcacgatccagttctccgatccgtaccatttcttctacatacgaatgatctcttgtgatctggcggatcttgctgcccaccacatagagtctgctgtctcctacattggccacctgtaagaatctgcccatgcaggatgccaccacaaccgtagtccccattccttccagtttttcatcctcgctggctctcttgcggattacatcattggcttcctcaatggctttgcggaagatcagggtgggattcttctcaaaagaattctccatctcggcaagcatggtctctaccgttaccttggacgcatagtctcccgcattgtgaccacccataccatctgccacgataaatacattcggcagatttcccaccggtttttcagaggtatagatatagtcctgatttacttttcttttccttccgatatcggttatggaaaacgtcttaagcacgtcaaacttcctcctgtgagagttcccccgggttcttcgcctcctgcgtatgacggcgtcttaactgtccgcaggctccgtcaatatcccggcccatctcccttctaattgtaacatgtatcatcttactttcaagtttatttttaaatgcctgaatgtgcttcgtatccgactgcacataatcccgctctttaatggggttgaccgggatgaggttgatatggcagcacaacggcttcgccagggcgatcagttccctggcatcctcttccgtatcattcacaccgcccaccagactgtattcgaaagtgatccttcgtccggtctgtttgaaataatactgacagacttccatcaactctttgatagaataccggttggcaatgggcatcagttttcttcgtttttcatcggtggtggcatgcaaggacaatgccagtgtgatctgcagcttttcatccgccagctgccgcattctgggcacgattccacaggtggacaccgtgacatttctctggctgatgttcagaccgttctcatcggtcagaagatgcagaaatttcaaaatattgttataattatccatcggttccccagtgcccatgactaccacattggagacccgctcccccgtcagtcttgtgatggcgtaaatctgatccagcatctcggaaggagtcagattccgttccagtccgtccagcgtggacgcacagaatttacagcccatacggcatcccacctgtgaagaaatgcacacactgttgccgtgcttatactgcatccagacactttccaccacattgccatcagataattcaaacaggaattttttcgttccgtcgatcttggactcctgtattctgacagggtttacacaggtgtattcatatttttccttacattgctccctgaattttgcggagaggttggtcatttcatcaaagctcctgaccagcttcacatgcatccattcatacatctgctttgcccggaaggccttctctcccatgctctccagctctgtcttcaattcttccagattcagggatttgatatcttttttcgtatccatttttcgttctcttacttcttatctctcacgcttttctgcgcagtcttgcataatagaatccgtcggtctcatccgttcccggcagaagctgtctctcttcttccagtacaaacgggaaattctctgtgatccagactgccatctcctgattttccccgcggtggatcgtgcaggtactgtagagcagtacaccgtgcggcttcacatactgccatccggctgccacgatctgcctttgcagttctgtgatggattgcaggctttccggtgtggcatgatatttgatatctctcttttttcccataacaccaagaccagagcaggggacatccatcagcaccacgtccgcatatttttccttctccggatcatgcaccgtggcatcatacacctgaacctccacattcctacggttcatgcgctccagattctcccggatcaggtccgtcttgtattccgatatatcacgggacacgacgtggcctgcttcccctgcaaattccgccgccaggatcgtcttgccacccggagccgcacacagatccatgaccgtattacctgggcatatacctgccgcttccactgcaagtgcggagctggcatcctgcacggtaaatttgccttccgcaaagcccggaagttcacttacattttccagattctgtgccagatacacataaggaagttccctgctttgctgcagacgtacaccggttttctcaattttctccgccagtgactctctctccgcttcggtcagttccgtggagaaccgcagggataccggatgaatggaaaggagtccttttaaaagtgtttccgttccttctctgccatatgcaggcagccacagattcacgatccattccggcatggaatattttatgctcagatatttcaccgtatccttgggatccggcaacggcatctgttccttgctgcgggaaatattacgcagcaccgcattgacgaagcctttcagggtacggaagcctcttttggccgccagcttgcaggcctcattgcacaccgcactgtcgggaactgcgtccatatacaggatctgataagtactcatgcgaagaagacagcggatcagaggcttcatcttccggaccggaacagaagaaaaccgatccagataatagtccagctccagctgtctctctatcgtaccttccgtgactcttttgataaacgctttctctctgggatccagataatcgtatttatccagaaccgctttcatcaatttatgggaaaaatcctgccccttttccagactgagcaggatctccactataatctctcttgtatcggtcgttgcatgatcactcaagattagtctctccttctgcgattgccgccgtacagcaggatcagtctgagcagctgtaatgcggaggaggccgctcctgccacataggtcagagccgctgccgtcagcacctttttgccgccgcttacttcttcactgcctaataacccgtattcttccaccttcacgatagctctgtgggaagcattgaattccacaggcagtgtcaccagttggaaaataacggtcagggcaaatgcccagataccaagctggatcaatgtctggttccagctgagcagtactcctaaaaagatcaggggaatgcttaaattgcttccgatattcaccaccggcaccagtgcagcacgaatgctcatgggggcatagccatgggcatgctgaatggcatgtccgcactcatgggccgcaacactgaccgcggtcaccgaggttccgttaaagttgttgtaagacagtcgcaccgtatccgtccggggatcgtaatgatcaccgtcatcggagttcaggcactcgatctgtacattgtataagccttctctgttgagaatgttgcgggccgcttccgctcccgtcaatcctctcatattccggactttgctgtatttgcgcatggtggaattcaccagtgcgctggcacccagacacaataccagtccgaccagtaccagaaaataagtaggatcccaataataaccatatccgtaatagccaccgtacatacgaaagtctcctttctgtcaacaccgcttacccgatcgttgcttttcatttcgtcgtatcctaacgctcgcccagaagctctcccggctgtacctttacccccagcaggaaatcgtgagttgtcatacgctttttaccttccagctgcagttccatcacctttaaggagccttccgatgcagccacttcaaaggaatccttattcaccgtaaggatcgtgcccggtgcttccttatgcgcagttgccataggaatggctttccagattttcagctgttttccatgataatgcgtatatgcactgggccagggagtcagtccacggatcaaacgatccagttctgccgctgttttcgtaaagtccagctttcccatctctttggtgatcagggccgcgtagcaggtcttggtatcatcctgcttttccggtaccagtttgcctgcctccagcagaggcagtgcctcggtgatcgcttccccgcccagcaccatcagtttgtcatgcaaagtttcaaaggtgtcctccgaagtaatggggattttcttccggtacaacatatcgccggtgtccagtcccgcattcatctgcatgatggtcacaccagtctcggcttctccgtcgatgatcactctctggataggagatgccccgcggtatttcggaaggagggatgcatggatgttcagacatccgtattttggcagatccagaatctcctgagacaggatctgtccgaacgccgccacgatataaatatctgcgggatattttttcagttcctcaatggcttccggtgtcttgatccgacggggctggaatacaggaatgccatgttttaccgcacattccttcacgggaggaaactgtaattctttgcttctgccctttggcttgtccggctgggtcaccactgcggtgatctcatggccctgtgtgatcagtgcctccagcgctcccacggcaaaatcgggagttcccataaatacgatctgcatagtctgtctcctttccggaaagcttactcttcttcctcatcctcgtaggtcatatcctgcagcggtccttccgccttttccacatagagatgaccgtccagatgatccagttcgtggcagatggctctggccagtaattctgttccctctacttcgatgggcttcatattcacatccagtgctaccgctttcacataattgggtctggttacgatgccgaacttaccgggtacgctaagacacccttcctgtccggtctgctctccactgctctctacgatgcgggggttgatcagaatatacggatcctctccggtggtatcgatcaccacgattctcttcaggacacctacctgtggtgccgccagccctacgccattggcatcgtacatagtctccaacatatcctcgatcagttctttggtccggggtgtcatctccttgacctctttgcaggtcttggtcagtacttcatccccatattcacgaatgtttctgattgccacagttctttacctcctataacacgcttaccgggtcaaaatcaaattgtatactcatctgtctgggctgccactgtctgagagtttcctccagtctgtcctttacttccaccaggacatcatactccgcatgcttcacatagaacacataccggtagatatcattgatcttgctgatgttggcaggggcaggtcccagtacctgtatcttcttattggactgttctttttgctttcctgacaaaaagtccatattagactttaccacatctgtcagtctcagggcaagctgttttacattttcttcctctttcccgtagatctgtactgccagcatatgagccaccggcgggtagccggacagctctctatacagaatctcctcctgataaaagctctcgtaatcctgagccgcagcacaggtaatggcgtaatgatccggctgataggtctggatcaccgcttccccggggagcacccctctgccggcccggcccaccgcctgggtcagaagctggaaagtccgctctcccgcccggtaatccgacgcatttaacgacagatccgccgccaggatccccaccagtgtcacctttgggaaatcatgtcccttgacgatcatctgggtgccgatcagcacgtccgcttccccgtttgcgaaggaggataatattttctcatagctgtccttcgtccgggtggtatccgcatccatgcgtaacgtccgcacaccggggtacagctcctttagcttttcctcgatctgctgggtacctgccttaaatcccagaatatatttcgatccacacttgggacaaagcttcggcatcggctgtgtataaccacagtaatgacagatcagccttcctcccttatgttccgagagagagacatcacagtgcggacacttcatgacctcaccgcaggaacggcaggacacaaatcccgcgtagcctcttcggtttaaaaacaggatggtctgctggcccttgttcagccggtctgtcatcagttcctgcaattttctgctgaaaatagaacggttaccctcctgcagttcctgtctgagatctaccgtgtacaccgtgggaagttccccgccggtgagccgctttgtcagttgaaacagccggtattctcccctaccggcacgataataggcctccagggaaggtgtggctgaacccagcactacactggctccgtacagttctgccacttccagagcagtctctctggcatgatatttcggagtactttcacttttatagctgttctcctgctcctcatccataacgatcagtcccagattcggaaacggtgtaaaaagtgcggatcttggtccgatgatcacatcgatttctccagctttggcccgttcgcactgatcatatttttccccgggggacagtgtggaattcatcacgctgacccggtctccgaatctctgatagaatctgagcagtgtctgatacgtcagggcaatctccgggatcagcacaatagcctgccgtccccttgcgatcatctcttcgatcagctgcatatatacttccgtcttgccactgccggtaatgccgtggatcagataggtctgtctccttccggcatcaaaatccgcaagcacttccgtaacgatggtctgctgttcctcactcagcgtattacgcactgcctctacggactgcattttgactggattgcggtagctttcagagctgaccagttttgccgcgccgctttttacaatactgttcactgtggcagcactgacacccagtttccccgtgatccactcatagggaatcgtttcctgctctgacagggcttttaacagtcttgctttggccacctgtcttttccgttcacattctcctaataatgacaaaatctcttctctgttcatcagacgtaccagctgtctgtgttccagcttttttaccgactgttttgccggcaatactgtcttcagtgcctggatcatggtacagccgtaattccggcggatccaggcagccaggacaatcattttgtcctccactccggtctctttttccggcattcctgcgatatccttgatcttctccggagcgaactgacatgtttccccaaaagccaccacgtaacccttgatgagacgattgccgttgccaaacgggatcatgacacaggctcccggctccagtctgccccgcagactctccggcacccggtattgaaaggttctatccagtttttcgtgggagatatctacaatgatatccgcatataacgtattcaatctgttttcctcattattttgctgcagatcccggaatatgtccttccgccagaatatcccgaatcagatctctctcatccatgggatgcttcaccccgcggatctcctggtaatcttcatgtcccttgcctgccagcacgataatatctccgggttctccgtgttcgatagcataagtaatggcttccttacgatcgcagatctctacataatttccatccgtttttgccatacctgtcttgatatcgtcgataatatcctgcggttcctcaaaacggggattgtcggaggtaatgatggtcagatccgccagcttgccgctgacctctcccatctcaaaacgacgctgtctcgaacggttgcctccgcagccgaacaggctgatcagtctgtgaggttcatattcccgcaacgtggtcagcagactctccagtgccatggcattgtgggcataatcgatcagcagggtgaactgatcggataccttgatcatctcgatacggccttttacctttgcctgcaacagcgcctttttaatgttttcctcatctaccttgaaatgacggcagatggcaatagccgccagcgcattgtacacgctgaatttgccgggcatgggcacttccacatcaaaatccatcagtccggctacgtggaaagtcacgcccagttctccgggcttatgcaccagtttccgttcttccgcccggagcatacagtgctctcccattccgaagctctccagtgtgcaggtatgtccttccgtcactgcctgccagtgctcatcgtcaccattcacaatacctaccttgcactgtttgaacaataatcccttgcagtgcagatattcctcgaagctggcatgctcgttgggaccgatatgatccggttccagattcgtgaaaataccgtaatcgaacacaaagccctgcgtacggtgcagcatcagcgcctgagaggatacttccatcacaaccgtatccagtcctgcctccaccatacgggcaaaatactcctgcagcagataggattccggggtggtattgttggcatggatatgttcgtctccgatgatcacttcgatggttcccaccagtcccactttatagccggcattttccagaatggactttaccagataggtggtcgttgtcttacctttggtacccgtgataccgatgactttcagcttttctgccggatggccgaaccaggccgcagaaataaatgccatggcatatctggtatccgctactttgaccaccgtcacatccacattctccggcagttccacgtctttttgcaccactagtactccggctccctgctctgccacctgtgcagcaaaatcatgaccgtcaaaatttgctccgccgatgcagagaaataagcatcccggaacgaccttgcgggaatcatagaccaccgcagggatctctctgtccagtgttccctgtaccagctcatattccaagtgctccagaagctctgttaatttcttgttttccatcttattcttatccttttccatagaggtatccgcctttctctcaggaatctttttcacatactgtattttattttactcttttttctcagaatgtaccacccttaaatttagttgcatcttttgctttttccgaagcaatggtataatattactgatttttatttaagggggaattctcatgaacggtttctatggatctgcattcggaaatatccttggcacactttattttcttctatttcaatgtgtggggtttctgtacataaaacgtatttttcctaaaaagggacttctgttccatctgctgaccggcagtgtatccggctctgttctgttgcagtggattcctgctctgtttgccttcttcttcggtttttccatgacagctcatattatggctctgcttttcgtagtcatttgtctggtcctgctatatgtcttttaccatcctgccacggcagtatcttcgactgctcccaccaaagactaccggcagctgttgcgcagaaattatgcctttcttctgctggcaggcggtacctttgttctgttttgtattttattatccacccacaccatcctgccgaaagacgacggtcttcatgtggggcagtgtacttatggggatctgcagatgcacctgggaatcattacaagtattgccaatcaacagaccttccctccttactactccatctctccctgggataagctctgctatcctttcctgtgcgacagtatttcttccagtatttacctgtttggtgcatccctgcgctatgcttatatgctccctatgtattttgcctttttccaagtcataacgggattttatgccattgccgatgttctgttccatgatcgcgccaaatctctggctgcctgggtcttatttttctataacggcggtcttggcttcgtatatttcattgactggagcagagaaggcggttataaattcagtgatatttttaccggctattacactacccccaccaatctggtcgaccggaatatccgctgggtcaatatcatcgcagatatgctcctgccacagcgtgcaacactctttggctatgcggtcctgttctgtgccatctggctgctgcttcgggccatccggaacggggaaaaagaatgttttctccctgccggcatcctggcagggacattacctatgatccatacccattccttcgttgccatcctgatcttaagtgcctgttggatgttgctgtgcctttaccggttcgtgccgcataatacttccccggtagagcatccgggagccgttctgctcggatgtttcgtgacctgtatgattcttctggaaattctgaacgaaagttctgctgccgttgcacctgtactgctctttcgttttggcatccttgttgcggcatccctcgtgctatacggtctgtccttactgtaccggtgcttttccggtaaaagtacaaacaatgatacactgcagaagtttttgaccacctggggagttttctttggtgtgcttctgcttcttgcacttccgcagttattggaatggacttttggccagacaacgcaatccggctttttgctggggcattttaactggggaaatcagggcgatacttatttgtggttttatctgaaaaactggggtgcgatcctgctattgttcgtccctgccatgattcattgtaaaaaagaagattttgatgtgatgtccggggcatttctcctgtggtttgttgtggaaatcatttccttcacccctaacacatatgacaataataaactattatatataacttatatatttgtctgctgcctcagtgccgattacggaattgatttcctgcgttctctgaaaagagcctcttcacgatacctctgcatgatcggcatggtatttctttgcaccttttctgccgttctgaccctgtgcagagaggtaatatccgattataccgcttattcttccgcacaggtggaagctgcagcattcgtcgagcaaaatacctctcccacatcccgttttcttaccaacaacaggcatgtaaatgaaattgccgcccttgcagggcgcaatgtgttaaacggggcgggaacctttttggcaatgcacggtctctatcacacagaatatcacgaagatttccggacaatttatgagactcccgctgtttctgcagatctgatccgtacttacgacatcgattatattgaagtctcttcctgggaacgggcaagttacgctgtcgatgaaaactacttccgttccgcctggccctgtatctttgacaacggagaaattcagatttaccagatcaatccataatttcacacttggaagtcgcaagaccctccgcatcactgtgggatgcacttccgaagttctggatcaggccgatcagctgtccggacataagcacggtaaacaacgaatatccgatacgtctcaccggaatgtagcttaaggacattaccagtacgatcagatccgacatcagatacacccactggatcttccagccggtagcatgggaaatactcatagccagggcatcatctccgctgggggctccgccgatgcgcacgcacagtccggcaccgacaccgacgaacaatgctcccaccagtgctgccagaaggggcatatttgccagttccggccacagatgaggaaattgctcgcagattttataggttcctgagaatcctgcggtagccagagccgaataggcgataaattccttgcctaacagcttccatcccaggatataacataaaatattcataatccctccggtaaacgccggagagattcctgtccaatgctccaacagcaacgtggctcccagcacaccaccctccgttactccggagatggagtgcacgttatataatccaaatgccagaataaaacttcccaacaaagttatggcacaattttttaaggtaatatttttcagtgcctgtctccattcgtaaatctgtgttttcatttttgtgctgctattccttctatatttttataatttttatctatatgatgtcggggtcaaaagcccccgactttgatgcctacggattgttccgtgctacgcactccca

SEQ ID NO: 5578 - DNA, 1794 bp, Unknown
  gut microbiota DNA sequence
ctcaccccgagatgcttatgtcatccctacttcttccaatctggaagagatcatccaacataccacggagcttctgcgactaccggaacctcccgacagcattctgtgctttaacagccttatcgccgtcggcgtcatccaggcaatccgtcagttccgcctgcgcattccggaggacatttctattgtctccttcgacaattacccttatgcacctctgatcacaccatctctgactgtcgtggatattgatatgtacagtcttggcacccgtgccggagcatctctgctgaaaaagatacagaacccggagatgctgatccagacctataccgccttgccacatttgattcaacgagacagcacggtgttacacagtgaaacataattcgtatatatccttaaatcttgcggaaaatgttccgaattttaataaagaccatagcttttcacttaacatttgctcattagaattaatcagcagactggctccttcatcatatgcgatatcaaaacaatattcttcctgctcaatctgctttcgtatagaaatcatttataaaatctccaatctgatggtttccatcaccatgtttgtctttggcagttcatatgcatattccataatttgtgtcatgtccattttatggatcagctttctatagttacttattatttctttgtatagatcaaaagaaaatttgcgcttattacgtattaattcaatcagcagtctctcttcattataaattgttatatccactccatcatactctatcgttgtcttccccatttcaaaagcattactgttctcataaatctgcttcacccgtacatcttcaatttttctattacttttgggcgttgcgacataataatgatccggtatggtgtcggtcagtccataataataaaatgcgctgttaagtgtcagtattgcattcggatcttttttcatgatgatctctaattccggcacatacctatcctctgaatagagaccattttctgttataaatagatgaccttcctgtatgtttttttaattcgataatctgtaccatatttttccagacattcatgatatgataataacatattcccctcctggttttagctattgtaggtaaaatatattttttacctgtttctatttcaatatcatcataacttattatatttgtccctatttacctttgtgtgtctaatatcaagacagtataattatgcatttcacgaattgcgtatgcagttagaaaatcaagtagtccaaattcaaatacaatcctaagaggcttttcagataatctggagagcctttttatatttttagaaacgttaagttattattttgttcttgtgtctataaatattataatgtctatacttcatgtagttgtacatttaaggcaatgaatacacatcttaggtaatgtctatgaaccattttttcaacacctcaatatagaaaatataatttatttttgaaaggaacattttatggaaagcaaatcacagacattagtttggctgtagtgctttttatcaacatgtgttagactactgttatacaaaatcgatatttgtggaggtaaagagtgtatgaaaaaggaactgcgtattctggttattttaattgctgtgttattggtaggaacagtaggttactatttcatgccaaagaaattcggtaagaatgtaaatccttctgaggtagaccatataaatgtgttcgatggaaatacaggaactggttttactatcaccgattcagaagatatcgaatatatagtg

SEQ ID NO: 5579 - DNA, 376 bp, Unknown
  gut microbiota DNA sequence
ttttctggatcaaaacgtaaaacaggtgaagttcattgaccggacgttcaattgtgaccacaagcatgccatggagatctggcggtatatttatgaacatgacaatggcgtcaccaactttcatttcgagatttccgccgatattttgcgggaagaggagattgccctgctgaatcgcttccgtccgggactggcacagctggagatcggggtacagtctacgaatccggagacgataagagccattcaccgtgtcatggatgtggacaagctggagaaaattgtagcggccattcacagaggacagaatattcatcagcatctggatctgatcgcgggtcttccctatgaagattatgagagtttcagcagatcc

SEQ ID NO: 5580 - DNA, 1889 bp, Unknown
  gut microbiota DNA sequence
tattcgctgttccggccagaaacggcccgatcatggactctttctgtgcgatcacctgtggaataccgccctgtgtgatcacataaccgcctccggcaccggcttccggtcccatctcgatcagccagtccgcttcggataatatctgggtatcatgatctaccaaaatgatggaattgccatcagcaattagatcatgcatcacggcattcagtcccacgatattcgaaggatgcagaccgatggagggctcgtccaacacatagagtaccccggtggtacggtttcgcaccgcccgggccagctgcatccgctgtctttccccggtggacagggaggctgccgcacggtccagagacaaataagaaagtcccagatccatcagccttttcgccacagtctggaaagattcacagatggattccgccatggggcgcatctcttccggcagagaatccggcactcccgctacccagtccaccaattctttcaggggcatctggcaggcctgtgccagccctatccccctaagtctcggtactctggcagcttccgaaagtctgctgccgccgcattctgggcagatatcctcctttaagaatttttccacacgtttcatgcccttttcatcttttacctttgccagagcattctctaccgtgtataccgcattaaaatacgtaaagtccagttctcccgcctgattggtcttcttcgccttatagaaaatatgtttcttctccgcgggtccgtgataaacgatctctttttcccggtctgtcagttcccggaagggtacatctgtccgcactcccatttcccggcagacatccgtcatcaatgaccacatgaggctgttccagggtgctaccgctccctcatcaatgcttagggaatcatccggcaccagagaatccagatccacggtccgcacacttcccgtaccaccgcacttcggacaggctccctgggaattgaatgccagttcttctgcactgggagcatgcacctttgctccgcattcgggacacaggatctcctgctccgccgctactttcagggtcggcggcacataatgtccgttggggcagcgatgggaagccagacgggaatacatcagacgcagactgttcaaaagttccgtgccggttccgaaggtactgcggatccccgggatgccgggacgctgatgcaatgccagcgctgccggaacatagaggacttcatccacctgggctttcgccgcgccggtcatacgtcttctggtgtaggtggacagagattccagataacgtctggagccctccgcatagaggacgcccagcgccagtgaggattttcccgagccggatactccggcgatccccacgattttgtgtaagggaacatccacatcgatatttttcaggttatgaacctttgcacctcttaccttgatatgctttggttcattggtttcgtattccatgacagcattcctcatcttttgatttcatttattaaaacagatccagcatattgtccagatagatttcttctctgacctgcagctggtactccggtttcgtcatataatacagtaaaaattccagaaccagtgcactgcccagtccccggccctcgatcttataattggaaaatcccatgggcaagtagatcttctgaatatcttccacgctgataaatcccggatttttcatggctttggagaaacgatagccctcctccgcccccggcgaagtacagctaaaatccggctcctctcccagattcctgcggctgacggcttcgtaacattccttcctgtccttacagccaaaatagcagcattcattgcacaaaaattccactttttctttctgtggttctgtcagcatatttaatttttc

SEQ ID NO: 5581 - DNA, 646 bp, Unknown
  gut microbiota DNA sequence
atgcagatgacatcgtgcttcttgcaaagagcaggcgggcatcagagagactcttggaaagcagtacaaaatatcttgaggagaggctgaaacttacagtcaaccgagaaaagagccgtactgtcagcgtgtttgcaatccgaaattttaaattccttggctttgcattgggaaggaacggaaaaggcatttatgtcagagttcatctgaagtcatggaagaagttcaagtctagactgaaagagttatcttcccgtaaacgatggcagtcaatcaagctaagccttgagaaaatcaaggtgtatgcgaggggatggcttaactactacggaattgcaagtatgaagaacaacatagatgacatcaatggatggctctatcacagaatacgtatgtgtatatggaaacagtggaagaaaccgagaacgaaatataagaatctagtcaagctgggaattccagaacactatgcggcaacaatagcaaacagtcgcagaaagtattggtatatcagtaataacaaagctgtgatttgggcgctgaataaagaaagactgataaacagtggcttttacgatttagccacagcctatcagtctgtgcacgtcaactattgaaaccgccgtgtaccgaacggtacgcacgg

SEQ ID NO: 5582 - DNA, 8586 bp, Unknown
  gut microbiota DNA sequence
gtacgattgttgtaggcttctacgataccgtggatcttttcggtggtagccatgacattggacagagaagcgtcatggttcataaagtcgatcagggaagcaatgaacttgctcatatcggcttccacgaaataaggtctggtgtagatctcaggcggtagataggtaagattcgtagtaatgaccttatcgaaatcaccatgctcgtaagcaacgtcgaaattcttcagaccgtcggtgaacaagccgaaagtacagcagatatatacgcgtctggctttcatggcctttaactgttttgcagtatccagcatacttccaccggaggagatcatgtcatcgatgatgatgatatccttaccttcaatattgtcacctaagaattcgtgagccacgatagggttcttaccgttgacgatggtggaatagtcacgtctcttgtagaacataccggtatcgacacccagaacgctggcaaaataaatggcacgatccagagctccttcatccgggctgatgactaacaaatgatccttgtccacgatcatatcgtcttcggaatttaacaaggacttgatgaactggtaaggggtggtaaaattatcaaatccgttcagcggagtggagttctgtactctgggatcatgggcatcaaaagtgatgaagttatcaattcccatatcccgtaactcttccagtgcataagcacagtccagggattctctgccgctgcggcgatgctgtctgccttcatagaggaaaggcatgatgacgttgatacgtctggccttgccgttgcaggcggcgatgacacgcttcagatcctggtagtggtcatcaggagacatgtggttggtatagccgttcatgttgtaagtaatactatgattgcatacatcggtgagaatgaacagatccttaccgcggatggtctcgctgatctgcgctttggcttcaccgcttccgaaacggggcacatccacgtctacgagatagttgctctcgatatagccgtgaaaggcaggatcgtttttcactttgtcattatggatactcttacggaattctaccatgtagtcattgatgcggcgtcccattttttctgcggaaggcagagcgatgatcttcaaaggagccacgggcatggcattttccagttcgtgtaaattaggcatgatgtccctcctggacgagctttattgttcgtaaaaatatgcagatcttccttcgcaaaagcgcatcttcgatgcttaattttgcggaactattctgaatataacaattaatttataacattatgctagtgacacgtcaaggaatttcttgtacaatggataggagaaagatggttaggtgaattagaatgaagaaaaaagaacatattgtaaaaacagtaaagccgggaagcatcgcggaggaactggagatcgctcccggagataaagtactggccatagataatacagagatcgaagacatttttgattatcagtttctgacacaggatacttatattgagatgctggtagagaagccggacggagagcagtggctcttagagatcgacaaggaatttgatgaggatatgggcatcgaatttgagaacggtctgatggacgaataccgtcattgccataacaaatgcattttctgctttatcgatcagatgccgaagggcatgcgtgatactctttattttaaggatgatgattcccgattatcctttttgcagggaaattatgtgacgctgaccaatatgtcggatcatgatattgaccggatctgtagataccatttatctccgatcaatatctccttccagaccatgaatccggaactgcgctgcaaaatgctgaacaaccgttttgcgggggatgccctgaaaaaggtggacatcctgaatgaagccggaatccgtatgaatggacaaatcgtgctctgcaagggcgtaaacgatggcaaggaactggaatacagcatccggaagttgatggaatatctgccaaatgtggaaagtgtctcggtggtgccggtaggattatccaggtaccgggaggggttatatccgttagagccgtttaatgcgcaggatgccggtgagatcattgatctgatcgagaaataccagaagatctgcatggaaaaatatgggacacactttatccaggccagtgatgaatggtacattctggcgggcagagaggtgccggaagaggaacgttacgacggatatctgcagttggagaacggtgttggaatgatccgcctgctattggatgaattccacgacggactgaagaggcgtaccgcagaaaaggaagcgggaaaaaagccatcctgggaaggcaccagagagatctctctggctacgggaagactggcgtttccttatttaaagaagatgtcggaagaaatgatgtcggaataccccggcctgcagatacatgtctatgaggtcatcaatgaatttttcggagagctgatcacggtgtccggacttctgacgggacaggatatcgtaaagcagttaaaggacaaaaatctgggagaagcattgtatcttccccggaatgtactcagaagcggagcggatctgttcctggatgattatacgctggcagacgtggagggggctttacaagtgcccgtgaatattgtaaaatcaagcggatatgatcttgtggatgccctgcttggagaagatgcatctgaatagattttaagatggtaaataagaaacggaggaaattatggcaaagagaaaaaccaagcccatcgttgcggtggtgggacgcccgaatgtcggtaagtccaccctgttcaatgcactggctggcgaaaatatatctattgtgaaagatacacccggtattaccagagaccgtatctatgcggatatccactggctggatatgacatttaccctgatcgacaccggaggtatcgagccggacagcaaggacgtgatcctgtcccagatgcgggaacaggcagagatcgctatggagactgcagacgtgatcattttcctggtggatgtaaagcagggactggtggatgcggattccaaggtggcagacatgctgcgccgttcccacaagcccgtggtactggtggtcaataaggtggacagcttccagaagtatatggcggatgtctacgaattctacaatctgggtattggcgatccccatccgatctctgcggtgaatcgtctgggaatcggtgacatgctggaggccgtaacggaatattttgataaggaacaggcagaggaagaagaggatgaccgcacccgtgtggccatcgtcggaaagcccaatgtcggcaagtcttccctgatcaacaaactgctgggtgagaaccgtctgatcgtttctgatatcgcgggtaccaccagagatgcggtggataccgagatcacttataacggcaaagaatatgtcttcattgatactgccggtcttcgccggaagaacaagatcaaggaagaactggagcgttatatgatcgtccgtaccgtcagtgccgtagagcgtgccgaggtggtggtactgatgatcgatgcagaggaaggtgttacggagcaggatgcgaagatcgccggaatcgcccatgagagaggaaaggctacgatcatcgtggtgaacaaatgggatgctatcgaaaaggatgacaagaccatttataaatttaccgaaaaggtgcgtaataccttatccttcatgccctatgcagagcttctgttcgtctctgcgaagacaggacagagactgcccaagctgttcgagactatcgacatcgtcagtgagaatcacgccatgcgtgtggctaccggtgtgctgaatgagatcatggcagaggccgtggccatgcagcagccaccttccgacaagggtaagagactgagattatattacattacccaggtagcggtaaagccccctacctttgtgatctttgtcaatgataaggagctgatgcatttctcctataccagatatattgagaatcagatccgggagacctttggcttcaagggaacccccctccggtttatcatcagagaacgaaaggaaaaagatcaataatggaacgtgttatctgtttactcatcggttatgtgttcggcctgtttcagaccgcatacttttacggaaaggcaaagggaatcgatatccgtaagtacggaagcggcaatgccggtaccaccaatgctctgagagtgctgggaaccaaggcaggactgatcgtactggcgggagactgcttaaagtgtatcgttgccgtatgcatcaccaaggcattgttcactaccggacatccggagaatatttatctgctgtgcctgtacaccggtgcaggagccatcatcggacataacttcccgttttacatgggattcaagggaggaaaaggaatcgctgccacagcaggactgatcctgtcgttccatccttattttatcgtgatgggcgtggtattgttcttcggaaccttcctgaccacccattatgtgtctctgggatcattgcttgtatatgcaggatttatgatccagatggtggtctgcggacagacggggctgttcggcaccatgccgcagtcacagctatatgaaatgtacgccatcaccgcatttttaacagtcatggcatactggaaacacagacagaatatcgtgcgtctgatccacgggaacgagaggaagacttatctgttcaagaataagaaatcagccgaagcgcagacagaaatctcaggggaggacaaataagctatggcaaaagtatgtatattgggtggcggaagctggggcatcggcctgtcagtggtattacataaaaacggacatgaggtgacggtatggtctgcggttcccgcagagattcagatgcttcaggagaatcacgagcataagatgctgccgggagtaaagcttccggaggatatgatctttacgacggatgataaacaggccatcgagggcaaggacctgttggtcatggcagtggcaagctcctataccagaagcacagcacaccgcatcagcccgctggtggcacagggacagaaaattgtcagtgtctccaagggaatcgaggagcataccctgatgacccaggcgcagatcatcgaagatgagattccgcaggcacaggtagcggtgctgtccggacctacccacgcggaggaagtcagccgcgggattcctacaacgatcgtagcgggttctaagagcaaaagctgcgcggaatatgtgcagaatctgtttatgaacgaagtgttccgtgtctataccagccccgatgtactgggaattgagctgggcggtgcactgaaaaatgtagtggcactggctgccggtatcgcagacggactgggctacggagataatacgaaggctgcgctgatcaccagaggcattaccgaaatcgcaagacttggtactgtcatgggtggtaattttgagaccttctgcggtctgaccggtatcggagatctgatcgtgacctgcgccagcatgcattcccgcaaccgtcgtgccggtatcctcatcggacagggcaagacctacgaggaagccatgaaggaagtacagatggtggtagagggcgtgtattccgccaaggctgccatggaactgtcgaaaaaatatgatgttcagctacctattatcgagcaggtaaatgaagtgctctttgacggtaagcctgcggatcaggcggtaaaagaactgatgcttcgtgacaagaagctggaagtatcccacctgccctggccggaagaatagacccggaggcggctcctgccagcagcaaaattttaagtgttgacagaaaaacgcagactggctataataaggtcatgtttagcgcaaacataggataagaagaatgcaatgaagggaagaagtactgttcctccacttctgacagagagcagccggtcggtgagaggcgcacagaagcagagcaggaatacatcccggagcagccggtggaaagagaaggatcagtagattttatcagaggatcccgaacgagtagatcaggacggcaggcaccgatatcggccggagtattgatagatacttactgagctgtcagatgtgagtctggcgggaacattaggtggtaacacgagtgattaagctcgtccttttgaacaaaggggcgggcttttttagtgtctttcgagccggttcccgggaagtgtataaagacatgtggaataaaacaagtcagtaaaggagaaaaagaaaatgacagtatttgacgaattgaaagcaagaggactgttggcacagctgacagatgaagaggagatcaaggaactgatcaataacggaaaagctaccttctatattggttttgaccccaccgcagacagtcttcatgtaggacacttcatggcactgtgcctgatgaagagaatgcagatggcaggtaacaagcccatcgctctgatcggtggaggaactgcaatgatcggtgatccctccggcagaagcgatatgcgtaccatgatgaccaaggagaccattcagcataacgtagactgcttcaagaagcagatgagccgttttattgatttcagtgacggcaaggcactgatggtcaacaatgcggactggctgttgaacctgaattacgtggaactgttgagagacgtgggagcacatttcagtgtcaaccgtatgctgaccgcagagtgctacaagcagagaatggagaagggcttaagctttcttgaattcaactacatgatcatgcagagctttgacttcctgaccttatatcagaaatacggctgtaacatgcagttcggcggtgacgaccagtggagcaacatgctgggtggtacggaactgatccgcagaaagctgggcaaggatgcttacgccatgaccattaccctgctgttgaattccgagggcaagaagatgggtaagacccagaagggtgccgtatggctggatcccaacaagaccactcccttcgagttctaccagtactggagaaacgtagcagatgccgatgttctgaagtgcctgcgaatgctgaccttcctgcccttagagcagatcgatgagatggacaaatgggaaggcagccagctgaatcaggcgaaggagattctggcatacgaactgaccaatctggtacatggcgaggaagaggctaagaaggcacaggagagtgcaagagcactgtttaccggtggcaatgctgcagagatgcctaccagcgagctgacagaggctgattttgtggatggtaagatcgatattctcggtgttctggtaaaatccggtttgtctgcatcccgcagtgaagcaagacgtgctgtagaacagggcggtgttgtcgtagcggatgagaaagttaccgatgtaaagactacttacgctcccgagcagtttgatggagagggcctggtagtccgcagaggtaagaagaacttcaagagagtcgttatgaagtaataaaagataagaataacagaaaattctaaggatgggatctttcacgtaaaaacggtgtgagatcccatttttattgatatttttcttgcatttatggatatgatatggtttaatatggttagtgtgttaaaaaaatatcaaaaggcggtaattatgatatgagcagcatgagagggatcgatactccggtaagacagcggagaagaagggtatttaaggaagtggctaatctggcttacaattccacaaatctgaaggatgatatggaggcgctgccttataagatcgtagactatgaagagtcggagttctgggagagcgtttatcgtgacagagcgatcatccgtgagcgcatccgtctggccatggggatgagtttacgcccggagaaccgcgaacatcccggacatctgacacagggattggaagagagtaatattgatgaaaaatattatgagccccctctgatgcaggtcattccgtcggcttgtaatgcctgcccggagaaccgttatgaggtgaccagctcctgcatggggtgcctggcacatccctgccagagtgtctgtcccaagggtgcgatctctatgaaaaacggcaagtctgttattgatcaggagaaatgcatcaagtgcggaaagtgtcgtgaaatctgcccttatgatgcaatttgtcacaaagagcgtccctgtaaggctgcctgcggtattggagctattacatctgaccatgtgggaagagccgtgatcgacaatgagaaatgtgtatcctgcggtcagtgtatggtaagctgtccttttggagcgattgctgacaagtctcagatcttccagttgatccgtgccatgcagtccggccggaagatcatagcccaggtagcacctgcatttgccggacagtttggcccgaaggtgacacctgagatgttcaagacagcgttgaaggaattggggtttgcggatgtctatgagacagcgttgggcgctgacatgggatgtatggcggaagcggagcactacgtgaaggaggttgctaccggtaagcagcagtttgccctgacctcctgttgtccttcctggtctgtaatggcgaagaat

SEQ ID NO: 5583 - DNA, 37498 bp, Unknown
  gut microbiota DNA sequence
tgaattaacccctatggttgcaacggcccgtctgatcaaacaggaacatccggatgcatccgtagtattcattggcccttgcgcttccaagaagctggaagccagcagacgtaccgttcgttccgatgtagactttgttatcacttttgaggaactgaccggtatgttcgaagctaagggaatcctgttggatgagatcaaggccatggatgagatgaaggatgctaccgctgccggaagaggttacggcgtggcaggtggcgttgccaatgctatcaaggagtgtatcgaaaagtattatccgggaacaccggtgaacattcagcatgcggaaagtctggcagaatgtaagaaagccctgctccttgccaaggccggcaagatgaacggctgcctgatcgagggcatggcctgccccggaggctgtatcgccggagccggcaccaacatcgccatccccgtagctgccagagccgtggacaagttcaagaacgaagctgagaagaaagtgcctgatgaaagtgtggatcaggaaatggtggaactggaaaaagaataaacactgcaacagaacagatatatcccgaaaacgaaaccgtcacattaccgtggcggttttgttgcgcgcatagagataaaattagagaaactattcagaatagttacaaatggcatattgttatttcgggaaagatactataaaatagcgtggagaacttttaggagaaactattttatgaacattcaggacagtattatatttttcatggaaatcttaggaaccatcgcttttgcagcatcaggtgccatggtggggatccggaaacggatggatattttcggcatctgtgtgctgggcgtggtgacggctgtaggcggtggtatgaccagagacgtgatccttgggaaattaccttcggcactggagaaaccggtatatgtcggtgtctcggtggctacagcactggctatttttatactgctttatatcaaacaggatcttttgagcggcagactgggaaccttttatgacaaagcgatgttaggcatggactctgtaggactgggaatttttacttccctgggtgtgatgtctggcatcgacaacggctatccggacaatacctttttgctggtatttatcggcatgctcaccggcgtgggcggcggtctgatgcgtgacatgatggcgggagaggaaccgtatattttcgtaaagcatatttacgcctgtgcctctctggtaggcggtatctgctgcgtctggctgtaccgtagtatcggcagacttcccgcggtatttatcgctgcctttgtggtcatggcgatccggtttctggcggcacactttcggtggaatctgccccatccgaaaaccttgtcttaactgttgcagtttttgaaaaaaggcggtagaataaggaagtagttctgccttctgagagagggcggacaggaatatataagcaggaaaatgtatgccggaagaccgtagcccggatatgcacagatttcctgcggaaatgaggagaaaatgacaaagatcagaacaagatacgcacccagccctaccggtaaaatgcatgtaggtaatctgcggtccgcattatatgaatttttgattgcaaagcatgccggcggagattttatgctccgcatcgaggataccgaccaggagcgctatgtggaaggtgctaccgagatcatctatcgtaccctggagaagaccggactggtacatgacgaaggcccggataaggacggcggttatggtccttacgtgcagagtgaacgtatgaaaaccggtatttatatgaaatatgccaaggaactgatcgataagggagaagcttattactgtttctgtgacaaggagagactggcttccctgaagaccgaagttgtggatggtaaggagatcaccgtatatgacaagcactgcctgtccctgtccaaagaagagattgaggcaaatcttgccgcaggcaagccttttgtcattcgccagaacaaccccaaggaaggcaccacgactttccatgacgagttatacggagacattacagtagataactcccagctggatgatatgatcctgatcaaatccgacggttaccctacctataactttgcaaacgtggtagatgaccataccatgaatatcacccatgtggtacgaggcaacgaatatctgtcctcctccccaaaatatgtacgtctgtacgaagctttcggatggcaggtaccggtatatatccatctgccgctgatcaccgatgagaaccacaagaagctgtccaagagaagcggacatgcttccttcgaggatctgatcgatcagggattcattaccgaagccatcgtgaactatgtggcactgcttggatggagcccggaggataaccgcgagattttctctctggatgaattgatcaaggagttcgattaccatcgcatcagcaagtccccggcagtcttcgatatcgtgaaattgcgttggatgaatggtgaatatctgaaggctatggatttcgacaagttctatgagatggcagagccttacctgaaggcagcgattagcaagcctctggatctgaagaagatcgcagccatggtaaagacccgaatcgaagtattcccggatattgccggactggtagatttcttcgaggagcttccggaatatgacgtggcaatgtatacacacaagaagatgaagactaccgcagagacttctctggaggtattgaaagatctgcttccgatcctggaggcacaggaggattacagcaatgacgggctgtatcagactcttgtaaaatatgtggaggaaaaaggctgtaagaacggctatgtgatgtggccgatccgtaccgcagtatccggcaagcagatgacacctgccggtgctacggagattatggaagtcctgggcaaagaggaatctctggcaagaatccgcaaaggaatcgagttattacaggcaaatgtctgatctgacatgcttaaatgcctcccagcaggaggctgtcacgttcggagagggaccgctgttattactggcgggccccggctccggcaagacatttaccatcacccagaggatcctgtatctgatccgggaacgccggatcaccccggagaagcttctggtgatcacctttaccagagaagcggctctatccatgaggcagcgctttgcgcagatatctccacaggaagtgcataccgtcaattttggaacatttcattctgttttctatcaaatcctgctccagtcgggcagaatttcatcaggcaatattttaaacgacagacaaaaaagagatcttatccttcccattttgaagaaaataacagactgtaaaaaaagatccgtagcggaagtaacggagcttgccgggaactatcttgctgccatcggttattacaaaaataccggcgatattgagaacagcagaaagaagcttccggaagaagaaaaacaacatttttccaggatctatgaagcttatgaggaggcgagaaaaaataccggaggccttgattttgaggatatattaaaggaatgtgaggagtttctgcaaagggatccggggcagcgtacatactggcagaaccggtttgaatatatactgatcgatgaatttcaggatatcaattacagacagtacagtatcgtgaaaattctggcggaaaaacatagaaatatttttgcagtgggggatgatgatcaggccatttacggattccgcggagccagaccagcctgcatgagacagtttgtagaagaatttggtgcaaagcagatccttcttcggacgaattatcgcagtcatccggatatcgtggaggcatccctgacggtgatagatgagaataaagaccgttttcataaggatctggagccttgcgaggcgcatagacggcaggcagggggtcataagactgacgccggataccggaaggaatatcgggtaaaaatcagggaattcagtgaggcttcggaacaaatgagttatctggtacaaagcttgaaaaatcggataaatggggagacctgtgctgtattgttccggacaaatctggccatgcagggcgtggcggcgagacttaccggggaggggatccctttttccatgaaagagaaggggagaaacatttacgaccattttatcgcacaggatcttctgtcctatctgcggatcgcgcaggggtgtgctacaagagcggattacctgagggtgagcaacagaccatatcggaatatttccagagaggcttttggtgccgaagcatctttaccggctttgaagaaatattatgaagatctggctgcgggaagtccggacgcggggcagcaaaaggcgcagaaagcggtcggagtatggatacgacagatggaatttgtaaaaaatacggaactgaagcttgcaatggcatttttgcgtaaggcgtgcggctatgagagatacctgcgggtgagagctgcacaggagggaaaaacagatctgacggaatggcaggaagtgctggattttatcacggaggatgcgggacgataccgaagccttgaagaatggcaggaagcacaggagctttaccgggaacaactgcaatgcagggaaaatgtaaggagtggcatgcagaagaagcaggaaaaacaggaaaacagcgggatcactctgctgacggtacatgcggcaaagggactggaattcgaccatgtgtggatcccggactgtaatgagaagacctttccccacggaagctcccgggagccggagcattgtgaagaggaacgacggatcttctatgtggcgatgacacgggcaaaaaaagacctggaacttctctgccttacaggcacgagagagcgtcccaggttcccttccagattccttattcctctgaatcgttatcatcgatgatctcgtcaaattcacagctgtcgagatactcatcaaaagcatcggcaaccttttcgtagacatcatcatcttcaatgtatgcgagaatgggttcttcattcgggtcatccggattctcggaatatccgtagaaccatacttctccgtcttcgttttcgccgtcctcgtccagaggcaacagtacgatatagtccttggcctctacggtgagaatggtaatgatggcacagttgacaacagtgccgtcttccagctccagctcaacggtcatttcttcatcttcatagctttcttttttacccatgggaatcctcctgttatgtttattgggtgtaacagtactttgttcctttattataaccgcttacggatattcttgcaatgcttgtttttcttacacttacagactataataaaaatggacaaagagactttaagtgatagaaaactggaagatggggtatgacaatgacagaaaaaaagcatgcaataaagccttaccctctgggggcgcatgtggaggacggagccatccgttttgcctatgcgtccgggaaaaaggattgcggcattctcatatatgacagaaagagtggaaaaaaaacgcacagggttccgtttcgacaggaggaacggatgggaaatgtgtactgtaaatatctggaactggagccggaaaatgtcgggtatcagttctatgaaggggagcgtactgtgccggatctgcatgcacaggggttcctgcgtaagcctgcttatgggaaaatacgtaagcctgcggatcgcattgcagtatttcccaacgaagatttcgactgggaacaggatatgcaccctatgcttccctatgaagacagcacctgctattgccttcatgtgcgtggctttaccatgcatgcctcatctcaggtaacacatcgaggcacctttgcaggggttgtggagaagctggactatcttcagaaaatcggtgtgacaaccgtggaattccaaccggtctatgaattcgatgagacaccggggaagacggtgccgaagacctccggagagcttgcggccgtggcgggggaaaagaacggagaaggtaaattgcccggctaccgggtgctgaactattggggctatcgggaaggcttctattatgcacctaaggcagcctatgcggcaggggaagacccggcagaagagtttcgtcttatggtaaaagaattccataagcgaaaaatggaagtggtcctgcagttctatttcccccggggaatggatgcggcagagatcgggaatattttaagattctgggtattatcctatcatgtggatggttttcatctgatgggggagggagtaccggctcagatgctggctggagatccggcattgtccgggacaaaactgtggcattattcctttgatacggagcaactctatgatccggcagtgaagccggaataccggaatctggcggaataccgggacgattatctgtataccatgcgtcgttttcttaagggagatgacaatatgctatcgggcgtattgtatgagatgcgtcatatccccgccaatatgggacggatccattatctgtccaattattacggccttacgctgatggatatggtgtcctatgatcacaagcataatgaagccaacggagaaggtaaccgggatggcaatgattataactgcagctggaactgtggggaggaaggaccgtccagacggaaaaaagtgcaggcacttcggaaaaaacagttacagaatgcattttgtatgttgctgttgacacagtccaccccgttgattttcatgggggatgagtttggcaattcccagcagggcaacaataatccctattgccaggacaataaaatcacatggctgaactggcaggacagggagaaaaatgcggaattattgaatttctggaaacagatgatcgctttccgtaaggcacacccgatcctgcatcctgaggaagagcttcggatcctggatacgttatcctgtggttatccggatctgtcctatcacggacagaatgcctggaggccccagatagagagctataaccggcatgtaggcattatgtactgcggaaagtatgcaaagacaccacagggtggggaggattctttcctctatgttgccatgaatatgcactgggagccgcagaaactggcatttccaaagctgccgaagggtatggaatggaatcttgtgctggcaacggagaaggcggaagatactctgacagtgcaggagaaagaagaacagtccagagagcagacggggatcattgcccccagaagtattgcagtatatgaaggcgttgtgatggcagaatcacaggacaaggagaaaaaagtttcggcaagatctttaaaaaagaaaacagatgttgccggagaaagatgatagaacgaaatgaatatctggaaacattttaaaacgatcacacatcataagatccttgtggcaaagggctgctttaaggtaggtctgtataaacagggattgttgcatgatatgtccaagtatagtcccacagagttctgggtaggggcaaaatactatcaggggacacgcagccccaacaatgcggaacgagaagatatcggttattccagcgcctggctgcaccataagggccggaataaacatcattacgaatactggatcgattacagcatgcaggcacttcccggtggaatggctccggtgccgatgccggataagtatattgcggaaatgatcatggatcggatcgctgccagcaaggtctatatgggaggcgaatacatggacaggtctcctcttgattactattatcaggggacagatagggcacccattcatccggagacgaaggcaaaactgctatatgtgctggaaatgctggcagaggagggagaggagaagaccttccggtttatcaaaaaggaactggtgcagcagaaacggtgtatggactggcaccagctgaagaaagcggaatagaatagtaaaaaacagtggtaagcagaggatcctatgaactgtatcattctgttattgttactattttgtggtggaaattcctgcagcaacggctgtagctgtataggaaacagcaatcgcagttcctgcggaaacaacaattcctgtgggaattccaataactcctgcggaagcagtagttcctgtggcggctcgaatgcctgcggcgcacgtcatctggaggacgagggatgcggtggagacagagaccgcagaccgcccagaccggatttcccgaatttcacaccggtggatgatccggcattttccaggagaaatgacggaagatgcgagacctgtggatgtgagcagaattcctgaaaatatgggtaacaggaaagcccctgaactgtcttggcagttcaggggcttgttttgtctgaaagactagttggacataacttctttccagtatttgttgtagagttcttcgccgtcctctccgaggtacaggaaggtctccagattgttatactgcgtcagatccgggaaagcaatgggagaattcttcagatcttcatcctcgatcagctctctggcggcggtattgggagtaccgtaggtgatgtactcgaaattcttcagtgctacatccggacgacacatgaaatcgatgaatttctctgcattttccttgttgggagcattcttcgggattacccagccatcgatccagacattggtgccttcctcgggaatgacataatcgagatccggattttcgccgatcacataaatggcatcaccggagaacattacaccgatcgcagcctcgccaccgatcattttatcacgtacctgatctactacataggcctgtaccagaggcttctgggcaatcagatcctctgtggcaatctgcagttcggattcgtccagactgttggaagagaagccgttctttttcagtgccaccatgaagcagtccttgatggaatccatcatcagaatattgtcagcatatttttcatcccacagatctgcccatttggtgggaggggtatctaccagagtcttattatagatgattcctacagttccccagcagtagggaacacagtacttgttgccgggatcgtaagcggcagcctgctcataatactcggcaccgatgttttccttggcattggggatcttgtcataatccagttcctggatcaggtcgttttcaatcattttctgtaccatgtaatcggaaggacataccacatcataagcggaagaaccagcttctaccttgggatacatgatctcgttggtctcgaactcatcgtagaccactttgattccggtctctttttcgaacatggtgatcgtatcgggatcgatatattcaccccagttgtagacgatgacttcaccgttttcaccaccggcggaagaggacccgcagccggtcagagcagttgcggtaaggataccgcacagaagcagtgcaataaattttttcatttcttttcctcctgaatctattttcaaagaattatttcttcttctttgccatgggcatgtagttcaccagtaaaagcagaaccagtaccgtcacaaaaatgatggtggacaatgcatacatttccggcttgatgcccttctttacttcagtgtagattttggtggacagtgtgtcgacaccgggacctttggtaaagtgggtaatgataaaatcatccagtgacatggtaaatgccatcaggaaaccggaaaggatacccggcaggatatccggaaataccaccttgaaaaaggcgtaggtctgggaagcacccaggtcaagggcggcctcatacgtgctggggttcaactgcttcatacggggcattacgcttaagatcacataaggaatattaaacgtaatgtgtgacagcagaatcgtaccaaaaccaaatttggctccaagacttaagaacagaagcatcagggagataccggtaacaatctctgcgttcagcatgggaatatttgtgattcccataaggatcgtacggctggtacgcttcatggattgcatggcaatacaggcaatcgtaccaatgaaggtggcaatcagtgcagacaacacagccagcgccagtgtattccacagagcctgcatgatctgttcgttctggaacagggcaacataccatttggtcgtaaaacctccccattttgcacgggtcttgctggcgttgaaggagagtacaatcagggtaacgatgggggcatacaaaaagataaagatcagccccagatatattttctgtgccgttgttttgatcataatgtgttcgcctccccctctttatccgtgattacggagatcaccatattgaagataatgaacagcatcagtacgatggaaagtccgcttcccagattccagttgccggtctgggtaaattcctgttcgatgacattaccaatgagcaggattttgctgccgcctaagatcttactgatcacgaaagtggtcagggcggggacaaataccatagtgataccgctgaacatgccgggcagacttaaggggaagatgatccgtacaaaggtctgcacaccgttggcaccaagatcataagcggcgttgattacgctcttgtcgatcttgaccagtacattataaagaggcagtaccataaaaggcaaaaagttgtataccatacccagtacgatggcagagggtgtattgataatatttaacgccggcagatgcagggtggagaggatgctgttgatgacacctgtcttctcaagcagtgtctgccatgccagggtacgaagcaggaagttcatccacatgggcaggataaagatcaataccagaaacgagttctggttgacattcatgttacacaggatcatggcaaggggatatgccagaagcaggcagatcacagtgctgatcacggataacttcagcgcttcccacagagccttggaatgctcggcggttgcgatcgccagaatattatccagcgtaaaagcaccgctcttatcggtcagaccatagtagaagaccatgcacaggggcacgatgacaaacatggctgaccagaagataaaagggagcgataataattttttattcattgactccaatcgcctcctcatcctcggattccggcttcttcatgatctggatgttgaacggatccactttgatgccgactttggtcccgacaggaaccattttcgtggactgtaccagccactcgaaaccgttggccataacttccatttcgtaatggacacctttgaaaatggaatgggtcagtgtaccctggataataccttcttccggtgataccagctccacgtcctcgggacggatgactacgtcgacgggcttgttttctccgaaaccggtatccacacattcaaagcgggcaccaaggatctctaccagacgatctctgatcatggttgcaccgataatgttactgtcaccgataaagtcggcaacgaaagcgttttccggctcgttgtagatactttcgggagtgccgatctgctggatatagccctggttcatgaccacgatggtatcggacatggtcagagcctcctcctggtcgtgggtgacatagataaaggtaattcccaactcatttttcagacggatcagttcgtactgcatgtcctgacgcagtttcagatccagtgcacccagaggctcatccaacagcagaagcttgggctcatttacgatagcacgggcaatggcgatacgctgctgctgaccgccgcttaaggaatccggcatacggttctcgaaaccgtccagattgactaacttcagggcatatttaattttatcattaatataagatttacttttaccgctgatctttaatccgaaagcaatgttctccgcaatggtcatatgagggaaaagagcatacttctggaatacggtatttaaattgcgcttattgggtggaaggttagtgatatcccggccttcgaaaatgacctgacctttatcaggggtctcgaaaccgcccaagatacggagggttgtagtctttccgcagccactggggcccaacagagtcagaaactcgttctcgcggatgtacagattgagatcatccagaaccatctgattgtcaaatgattttgagatgttcactaaattgactaaagcatttttcatcaattttttccttcctgatgtaaaaaatcctgcaaaaaatcctcgaaaaacctaaatgaaaattttttgcaagtcgaattaatattatacgtaaatacacggaaagtcaatgtgaagttttgcaatttctggcctaatttacataaactttaccctgtggaaaaaacaggagtatttttcggcaattttgcagaaaaaatgtttcacaattttcagaattgtgctatatttataaacataaaaaaagacatagaacgctaaggaggatccggtcatgagcaaggaaaaatatgttgcctacatttccagttacacacagggggacagtcatggcatcagaatatatgatgtggatatgaaaaacggccgtttcaaggagaaagataaggtagagatcacgaactcttcctatctgaccatttcccacaacggaaagtttctttattctataacggattttggtgtggaggcttataccatccagccggacggagatctggagctgatcaactttgcaccaatcaatggtatgagaggctgctatgtttctacggattatacggatcagtatctgtttgtagccggttatcatgacggtaagctgacagtactcagactgaaagaggacggttccatcggcgaaatcactgatgaaatctaccacaagggtctgggcagtatggcagagcggaatttccgtccccatatcaactgtgcccgcatgacacatgataataagtatcttctggtggcagatcagggtatggatcatgtcaatgtatatcgttttgatgtggagaagggcaaggtaaagctggaggatatcatccgcagtgagatggaatccgcaccccgtcatatcaagatttccgaggatggcaggtatatttacattctccatgaattaaagtgttatattgatgtatatgaatatgcggacaataataacgaccctacctttgagaagatccagacggtagagctgatcaagctgaccagaggcaacaccaacagtgccagcgccttcagtttttcattggattacaattatctgctcagttccattgcaggggataattctgttatcgtatttgatgtagacaagaagacaggacttttgaagaagaacttcctgctgccgatcagcggtgagtatcccaaggatgcagagttcttcccggacaataagtttctggtgtctttgaatcatgaaagtaatacgatgaccttcttccatattgatctggagcatggaacgatgatcatgaatggaccggcaatgaaggtcaatatgcccaactgtattttgttccataagttggggtaggtattattttagtaataaccccccgcagcctcggctggggtaagaaacgcggtacgctttcgctctgtcgcagagcgtaacggcacataagcggtcagaatacgcccgctaagtgctgacgtctgcttacggcctgcttattcttacacccatccggggctgcttgcttattttaataaccttgtgatatgagatgggatttggtaaaataagaacatatagaaattgggaggtagaagtatggcacagatcagaccatttagggcatatcgtccctgtcaggggatggagaaaaggattgcagcgcttccttatgatgtatataacagggaggaagcgtgtgaagtggtgaagaagaatccggactcttttctggcggttgatcgggcggagacgcagtttggcgaggaagtagacacatatgcggactgtgtgtatgagaaagcggatcagctgcttcgggagaaaattcaggaaggaaaatttgtacaggatccgacgccatgtttctatctgtatgaactgaccatggacgggaacagccagaccggtgtagtggcttgtgcctctattgacgattaccggaacaatgtgatcaaaaagcatgaaaataccagagcggataaggaggaagaccgtatccgccatgtagatacctgcagtatgcagacggggcccattttcctggcatatcgggcgaaagaggaactgcagaacaagatcggagagatcaaaacacagacaccggtatacgattttgtcagtgaggacggcatcgaacatcgtgtgtgggtgatttcggaggctgcggatgtggcaatgattgaagaggcgtttgcaaagatcccggctatttatattgcggacggtcatcatcgttgtgcctcagcggtaaaggtgggattaaagcgcagagagcagcatccggattatacgggagaagaggaattcaattatttcctgtcggtgattttcccggatgaagaactgcagatcctggattataaccgggtggtgaaggatttaaacggtatggatgtcgatgcgttcctggcagccatcgaagaacattttatgatagagaaaaaaggacgtattccttaccgaccggagaaaaaaggagctttcggtatgttcctggaagatgagtggtactgtcttacagcgaagaaggagattcggagcgaagatgctgtggaaggactggatgtatctcttttacaaaattacctgttgaatcctgttctgggaatcgaagatccaaagaccgataagcggatcgattttgtgggaggtatccggggacttgcggaactggagcggagagtacataccgatatgaaggtggcattttccatgtatcctacttccatcggggaactttttgcagtggcggatgcgggacgtctgatgcctccgaagtctacctggttcgagccgaagctgcgcagcggtctgtttctgcatgagatagagcggtaatacctacgaccggataagcaaaatagtgacagaatagaatgcagcagactacacgccgcagaaaagagggaatatgacaaacaaactttataaactgatgaactgggcaaagatagaagaaatcacttatgctgaatgtgataatccccatgaactgttaggacctcataagcagggaagtaaaatgctggtacaggcattcttcccgggagcagaaaaggtgacgatccactggaagaagacaggacaggtaggggaagcatttctggcagacgtacccatggaactggcagatgaggagggctattttgccgcactggtaaatgcgggaaaaatggcaccctatgaatatgtagtggaatatggaaagacagaagagcgtgaagcccacagaatgatctgtggggatgcgtaccggcatgtcccgcagatcacgaaggaagatatggatcggtttgccgcaggcattcattatacaatctatgaaaagctgggggcacaccctatggaactggatggggataacggcacgtattttgctgtgtgggcgccgaatgccatgcgtgtcagcgtagtaggtgatttcaatgaatgggacgggcggatccatcagatgagacgactgggtgattccggcatttttgaactgtttgttccgggggcggaggtcggagactgctataaatatgaactgaagatcaaaggcggattgacctatctcaaagcagacccttacggtaatgccgcacagaagagaccggagacggcttctgttatcactgacctgcgagacttttcatgggatgacagtgagttcttgaaaaaaagggaaagctaccagtgtggaaatgctccggtcagtgtgtatgaaatgtatctgggaagttttgtgacgccggacgagggacaggattatgcgaactatcgtgagatcgctccgaaggtcattgattatgtaaaaaaaatgggatacacccatgtagaactgatgccggtcatggagcatcccttagatgcttcctggggatatcaggtgatcggttattatgcaccgactgccagatacggtacaccggaggactttatgttcttcgtgaatgaactgcataaggcgggaatcggtgtgatccttgactgggtgcctgcacattttccgagagattcttatggattagctgcatttgacggcacctgtctttatgagcatcaggatcccagacagggtagtcatccacactggggcaccctgatctacaattacggtcgtccccaggtatcgaactatctgatcgccaatgcgctgttctgggtggagaaatatcatgcggacggtatccgtatggatgcggtagccagcatgctttatctggattacggcagacaggacggagaatggattcccaatatgtacggtggcaacgagaatctggaagccattgaactgatcaaacacttaaattctatcctgaaaaagagagatcccggggtattatccatcgcagaggagagtacggcatttcctatgataaccggttctctggaagaggggggacttggttttgatctcaaatggaatatgggcttcatgaacgattatctggattatatcaaatacgatccgtactttagaagccaccatcacggagaacttaccttcagcatgatctatgcctacagcgagaaattcatgctggtattttcgcatgatgaagtggtacatgggaaaggaaccttacttggcaagatgcccggagacagagcacagaagcttgccaacttacgtctgacctacggctatatgatggctcaccccgggaaaaagctcctcttcatgggacaggatctggcggaagaaaaagaatggaatgaaatgcgtcaggtggaatgggcactgcaagagcagaaggaaaatgcaggagttcagaggctggtgaaggatctgaatgcattatacagagagaataaggcgttgtacgaatgtgacgatcaggcgaagggattccagtggatgaacgagatctctgccaatgaatgttatgtaagctttgtgcgtaaaggcgaagctgcggaggagatgcttttggtcgtagcaaacttctccggtgtgcccagagagatcactacaggagttccttacgagggaaaatacaaggagatcctgaacacggatgctgtctgctacggtggtacaggtgtggtcaatgaccgcatgaaacgggcagaggatttggaatgggatgataaaaagcagtccgtcaccgtgaaacttgcaccgttgtccttaagtattctgcaatttatcccttacacagaggcggaactggaaaaggtgatcgagaagcgtatccgtaaaaatacgcccattcgtaagacaacaaacaagactgcaaaaaagaaacaggagaaataagacaacatggatctgacagataacgtaatccaagaggtacagcaaaaggaaggactgatagcttcttttctggatactcttccggagaaagcattgaacttaggcatccgtatcggactggcactgatatttttcttcattggggtacaacttatcaagctgatccgcaagatcatccgcaagtccatgaacagggcgggagcggaaacgggagtgatccagtttgtggattcttttgtgaaagcttctttatatatcatactgatcctgaccctggcatcctccttcggcgttgatgctgccagtatcgtggcacttcttggctcagccggagtggcagtgggactggcagtgcagggaagtctgtctaatctggcgggcggtgtgctgattttattattgaagccgtttaaggtgggagattacattgtggaaggctcctccggtaaggaaggtacagtaaaagagatccagatcttctatacaaagctgttaacctatgataatcagacgattattcttccaaacggcaatctggcaaataacaccattgtaaatgtcactgctgccgaatccaggcgatgcgatgtgaaggtgtctgttgcttacagcgcagatattaagaaggcaaaggaagttctgacaaaggttctctctgaagatcccgatactataaaggaaagagagcattttgtatttgtagatgaactggcagactccggaatcaatctatgtgtacgctgctggttcaaaaatgaggatttctggcagggaaaatggcgtattaccgaacagtgtaagtatgcacttgataaagcagaaattgaaataccgttccctcagatggatgtgcatatgcgttaattaaaaatagatattgaattttacagactataatgataatattaccgttgtgattcattgttttaatatttacatttttaggaggaaaaaattatgaaaaagtttctggcacttgcacttgcatctgtcatggctgtttctctggtagcatgcggcagcaccaatgctgacaccaatgcagaatccagtgcggcagctaccaccactgcagcagctacagagagcggcagtgaagaacccggtctgaagatcgctatcgtatccagcccctccggcgtggatgacggttccttcaaccaggacaactacaacggtgttttgaagttcatcgaggagaatccgaatgcaaccgtaacccccattcgtgaggagaccggtgacagtgcagcagctgttcaggcagtagctgatgttgtagctgattatgatgttattgtatgctgtggtttccagttcgccggcatcggtaatctggcacaggagaatccggataccaagttcatcctgatcgattcctggcctaccattgacggtaccgaagtaactgctgatcaggtgatcgacaatgtatacgctgcttactatgctgagcaggagagtggtttctatgcaggtatggctgcagctctgtctaccactacaggtaaggtagcagtagtaaacggtatcgcatatccttccaacgttaactatcagtatggtttcgagtgcggtgttaagtatgtgaacggtaccgaaggcatgaatgtagaagtagtagagcttccttcttacgcaggtaccgatgttaccggcgctaatgtaggtggtaactatgttggtaacttctctgatgaagctaccggtaaagtactgggcaatgctctgatcgctgaaggcgtagatatcctgttcgtagcagcaggaggttccggtaacggcgtatttaccgctgccaaggaagctgacggcgttaaggtgatcggttgtgatgttgaccagtatgatgacggtgcaaacggtgacagcaatatcgttctgaccagtggtctgaaggtaatgcatgatactgtttacaacgtactgaacgaagtaaaagatggttccttcaagggcgctaatgtgactctgaccgcagcagatgatgctaccggttttgtaagtgaggaaggcagatgtcagctcaccgcagaggctattgagaagatcaatgcagcacaggctctgttaaaggaaggcaagatcgttcctgcggcaaactttaacggtgtaactccggagacctttacctggtaggaagaatgaatttacaagaaggtgatggtgaggaactgtcaccttcttatttatttacatgagtagaaatgaggatgaacatgtcggaatatattgttgagatgaaacacatcaccaaacgcttccccgggatcgtagccaacgacgatgtgacgatccagatcaaaaagggtgagatctttgctctgttgggagagaatggtgccggaaaatccaccttgatgagtatgctgtttggaatgtacgagccggatgaaggagagatctatatccggggagaaaaggtgaaactggaatcccccaaccatgccaccaaattaaacatcggtatggtacatcagcattttaaactggtatccaactataccattgcagagaatattgtgatgggtatggaaccggtgaagaaggtattgggatgtattccggtagtggatatgaagaaagccaatcaggatatccgcgaactttcggagaaatacggactggcagtgaatcccaccgatgtgatcagcgacattaatgtctctacacagcagagagtagagatcttaaagatgctttacagagaagcggagatcctcatttttgatgaacccacagcggttctgacaccgcaggagatcgatttcctgttggatattatcaaatctctgcgggatgacggcaagactatcatcctgatcacacataaactggaagaaatcaaacggatcgcggacagatgtgccatcctgaaccacggacgtctgatggatgtcatggatgtggctaccacgtccaccaaagtcatggccaacaaaatggtaggccgtgaagtgaattttgagacagaaaaagagcctgcaaaaccgggtaagaccatactcagtatcgagaaactgaatgtttacaataaacaggatttccaggtggtaaaggatgtatctctggaggtacattccggtgagatcgttgcgatcgcaggtgtggcaggcaacggacaggtagaaatcgcagatgctattgcgggactggtaccggtgcgttccggcaagatcctgttaaacggcagagacattacgaacctgtctatcagagaacgaacgaccgaaggaatttcctatattcccgaggatagacagaattacggactggtcatggattttaccctttcggagaatctggcacttcgtaattattacaaagagccgttctgtcataagggagtactggatcagaagatttttgaagacaacagtgaaaaactgatagaaaaatacgatatccgaagcggccagggcagcaagacagtggtacgttccatgagtggtggtaatcagcagaaagccattattgccagagaagtggaacaggattcctccctgatgatctttgtgcagcccacccgtggactggatatcggtgccatagagaatatccacaagcagatcattgcagagagagacaagggcaaggcaatccttctgatctctctggaattggatgagatcatgaattgtgcggataccatcgcagttatttataacggaagcatacagaagatcgccaaagccagtgaactgaccaccaatgaagtgggagagttcatgatgggcgtaaaaaacaaggagaaggaggcataagaccatgaaaaaatttacaaaattatggaatgcggtaaagattcctctccttgcgatcctttgtagtcttgtggcaggtggtgtgatcatcgctgtgaccggttccaatccctttaaggcttattacgcacttctacagggaggcggactggcacccaagtcctcctacgccagctacaagagtatgctgacggactttatgagttatgtgaactattttacccccatgatcttcgcggcactggctgtggcggtagcactccgcgccggactgtttaatatcggcgtctccggacagatgctggcagccggatttaccgcaagcatcgttgtgggctacagcagtctgaacgccgtgctggcaaagccgttggtagtaatcatcggcctgatcgtcggtggtctggtgggagcactgatcggcttcctgaaataccggtttaatatcaatgaggtcgtttcctctattatgttaaactatacgttccagtatgtgatcagtttcttcatcaatacctttttcgtggatccggtctccagacagtcaaaggaaatctccgcagcttccagactgacactgatggataccatggtgggcaatctgaaaatggatattccgctgggaattattctggctctgcttacggtggtggctgtatggttcctgttagagaagacaaagcttggctatgaactgaaggctgtgggctattcccgcagtgctgcaaaatatgcaggtatcaaggtaggcagaagcatggtactgtccatgacgatttccggtgcactggccggacttgccggtgtgacttattatctgggctatgtgggatccattcagccaaaggtattgatcagtaccggatttgatgccattgcggtatccctgcttggtaacaacaatcccttcggtattgtattttctactatgctgatcaccctgatcagcaagggaagtacttatatgaaatctgcggccggcgtggatgcggagattgcatccgttatcaccggtatcatccttttgttcagcgcatgtaatgcttacatcaagtggaaaatggagcgaaacagaagagagaaaaccaacaagacaaaggaggacaaataaatggatattgtgatcattgacggtttatcctttgcactgcctttatttattatggccatcggtggcatctactgtgagaaatccggtgtgaccatgctggcggtagaaggcttacagggttttggcgcctttatcggtgcgttcgtggcggttgccattgcgggaaactttgtcggagactctccggcgcctttctacattgccatggttatggcggctgtgggcggaagtctgtttgcactgatccatgccatgttatgtctgaagttcaaggccaatcaggttatcagtggtgtggtagtcaatattctggccatggcgctgaccgcatatttaacgaagctgttcaacagagtggtatttggtgctacgtccgataagttcgtactgactgtttcttccagaattaccatcccgggaatctctaagattccggtactgggagcggtatttaccaatctgtatccttttgaacttgtgattgtggtagtggctttcgtggcatggtttgtgatgtataagacccgcttcggcatgcatctgcgtgcctgcggtgacaatccccatgcagtggatgcggccggaagacaggtgggacagatccgtctggcagccattatgatctgtggtgcgttgtcgggactgggaggtatctgtttcgcgtattccatttccgcaaacttttcctccagtatttatgtaggttacggttatctggctattgcggcactgatcttcggcaactggcgtatcctgccgactctgggagcgtgtctgttgttcggatttgccagatccggtggataccgtctggtacaggtactgcagatgcccagcagttatcaggatctggtcatgatcctgccttatgtactgactttgctgcttctggtattcttctccaaacagaacggtgcaccgagagcactgggagtgatctacgacaaaggtgcaagataagcagacatttgcagaacgtagctttgcatggctctgaagagttactacaaaaaaagagaaagcgaaaagctttctcttttttaatacatataagctgaaaatgggactcgaacccacgaccccttcattacgagtgaagtgctctaccaactgagctatttcagcggactaggttattatatatgttcttgggaaattttgcaactgtaaaatttattattttcgcagaacgtttcacaaagccgtaaattatgtaggagaccgtaagacgaaaacgcctgcggatctccgaaaggtcagttgcggtgctttttgctgtaatgttccagagactgtgtcagcaggtagagcagcatggcaatcacacatagcagtaagatggaactgattaccatatccagctggaagacctgggaaccgtagatgatcaggtagcccagtccccgtctggcggcgagaaattccccgatgataacacctaccagggacagcccgatattgactttggtggtactgagcagggtgggaatggatcccggcagtaccactttgaaaaagatatccctgcggtttccacccagtgtgcggatcagaatctccttttccggatctacctgatgaaaggcggtgtaaaagctgatgatggatccgaatactgccacagagattccagcaatgatgatggtgttgatcccggtgcccagccagacaataaacagaggagccagagcggatttcggaaggctgttgagcagtaccagataaggctctaagatctccgacagctgcctggaaaaccacagcagagtggataacagaagactgacgaaaaataccagcaggaaactcaggatcgtttctaacagtgtgataccgatatgcatcggaagggaccgctctgtccataattctccaaggcacagaatgactctgtggggactggagaaaaagaaactgtcgatccagtcaagatctgcacttacttcccacaggagtaaaaagattcccagaagaaaaaagcgcaggaaggagacctgtctgtgatggcttttgtgttttcgaagatattgttcctgaacggtcagaggttgtttaatttgtggtctcatccgttaattcctcccagagttgtttgaaataatatggaaattctggcgcatttctggcagccagcggtgatgcatccggaagcgtgagccggatggggagaacggccttgatcgtcgccggcctcgcagacagtacatagaccttgtcggccagactgatggcctccgacagatcgtgagtgacgatgatcatagtcttaccagcctgccggatcagccggcagatatccgcggataccatgagcctggtctggtaatccagggcgctgaagggttcatccagaaggagcagctggggatccagggcaagggtgcggatcagggcagcacgctgcttcatgccgccggacaattcgctgggacgtttatcctgaaagctttccagaccatagtcggacagaagctgtttcacatagtcggtacgctctttggtaagagcatgatggatctccagtcccagagtgacattctggtagatggtacgccattcgaagagatgatcgtgctgcagcatatagccgacacggggatagtgaaaggatccgtcgggattgttgactacgatggtgccggtctccggagcaagcagtcccgcaatgatagacagcagcgtggacttcccgcagccgctgggacctactaaagcgacaaattccccttcctccacctgaaaggagacatcttttatggcaccggtctcgcccgccagattatgataggagtaacctatgttttttaattcgatgagagctcccataaaaaggcatacttccttaacttgaatatttattgttatagtatgaatttaaaagaaaaaagtgtttttgctacccgaaagtgatgaaattcactgtattgcattaaagtgtcgtttgtgatatgattaattgcaatcaatgtctatgagaaaaattgtctgataggctgctgacagaataaaaagatgggagaatgaccatggcacaattatggggaggacgctttacgaaacagaccgatcagctggtatttgatttcaatgcgtccataacattcgataagagattgtttcatgaagatgtcaccggaagtatcgtacatgccaccatgctggcaaggcagggaatcctcaccgaggaggagagaaagagcattatcgaaggactgaccggtattttagaggatgtggatgccggaaagcttacaatcgacgaaacccaggaggatatccacagttttgtagaggcaaccctgatcgaccggatcggtgatgcaggcaaaaagcttcacaccggacgcagccgtaacgaccaggtggcgctggacatgcgtctctataccagagcgagagtggcagagacagacggacttctggaaaagcttctggaagccattctggacaccatggagaacaacttagagacctatatgccaggattcacccatttacagaaggcacagcccattactctggctcatcattatggtgcctattttgaaatgttcaagagggacagacagcgtctggccgatatttacaaacgtatgaattattgtcctctgggagcaggagcactggccggtaccacgtatccgttagaccgtgagtataccgcaaagctgcttcgttttgaaggaccgacattaaacagtatcgattccgtggcggacagagattatctgatcgagttcctttccgcactttccacgatcatgatgcatttaagccgtttcagcgaagaaatcattatctggaattccaatgagtaccagttcgtggaactggacgatgcctattccactggaagcagcattatgcctcagaagaagaacccggatatcgccgaactggtaagaggcaagaccggaagagtctacggtgccctgatggcgttacttaccaccatgaagggactgccccttgcttataataaagacatgcaggaagacaaggagatggcttttgatgccatggataccgcagcggactgtattgccttatttaccggcatgataaagaccatgaagttccgtaaggaccgtatggcaaagagtgccatgaacggatttaccaatgctacggatgccgcagattatctggtaggtaagggcgtacctttccgggatgctcacggcattatcggacgcctggtactgtattgtattgaaaaggatacttccattgatgccctgagcctggaagaattacgttccatcagtgataagtttgatgaggacatttacgatgccatttccttaaagacctgtgtggaaaagcggctgaccatcggtgctcccggtgcggaaatgatgaagcaggtcattgagaaaaataaagaatacctgaaaacaaatgccatagaagtatatcaacaggctttggaagaccgcattcagtaagtggaaactgaacaggtcttttgcagataaaataaaaatgcacaaagatgaggaggaaatgaaaaatgagtgaaaaattacgtgtaggtatcctgggcggaaccggtatggtaggtcagagatttatctctctgttggagaaccatccctggttcgaggtaacgaccattgctgccagcccccgttccgcaggcaagacttatgaggaggccgtgggtgaccgttggaagatgaccactcccatgcccgaagctgtgaaaaagctggtagtcatgaatgtcaatgaagtagaaaaagtagccgcacaggttgatttcgtattcagtgcggtagatatgaccaaggatgagatcaaggccatcgaggaagcatacgcaaagaccgaaacccctgtggtatccaacaacagtgcccacagatggacccccgatgttcccatggtagtacccgagatcaatcccgaacatttccagatcatcgaggcacagaagaagagactgggaaccaccagaggatttatcgctgtaaagcccaactgctccatccagagctatgcaccggttctgaccgcatggaaggaattcgagccttacgaagtggtagcaaccacttatcaggcaatctccggcgcaggcaagacttttaaggactggcccgagatggtaggcaatatcattccttacatcggtggtgaggaagagaagagtgagaaagaacccttacgtatctggggtaaagtggaaggcgataagatcgttcccgcaacttctcccgtgatcacctgtcagtgcatccgtgttccggtattgaacggacataccgcagccgtatttgttaaattccgtaagaagcccaccaaggagcagctgatcgagaaactggtcaccttcagcggtgagcctcagagactgggacttcccagcgcaccgaagcagtttatccagtatctggaggaggacaacagacctcaggtggctctggatgttgatttcgagaacggtatgggtatcagtgtaggtcgtctgagagaagataccgtatatgattacaagttcgtaggtttgtcacacaataccttacgtggagcagctgggggagcattgctttgcgcagaacttttgaaagcacagggttacatcaccaaaaaataaagggtgagtggggttatgaacgagttacgctatcagctggatcttatgcgcgcaatgaatcagaaactgagcgctaaggagagaatgtatcgtctgttgtgcgataccatggattatgcttatatctactattcttttgaaaagaatacggtcactacgctgggaaaatgggatgatttctttgacttccagattctggacagaagagattttgtaaaatttcaggagatggtggacgaaccgtatgtgctggcacttcgggaaatgctgtttttggaaaagagcggtcgggagacggactctgtggaatgtatgcagaggggaaagaagacctggctgcagttttccagcaggattttctacgaagatggcaggccgacggatcagattattgtggtacagaatatcaccaaacagaaaacacagaacgaagagcttctctacatggcatattatgacagtctgaccggactgtacaaccgtaattattttgtgcgtcttctgaccgaatttcttcgtcgggccaaagaggataaccggctggtcagcgtgcttgttattgatattgatgatttccgcaaggtaaatgacggactgggaatcgtggcgggggacgaactggtacagcagtttggctcttttctgaaggaatttaacggggatgatgtgatcgtctgccacctgaccagtgatgtctactgcatggccatttatgatccttgtgggaacaaaagtgtggaacatattcataaggagatcgttaagcgcaccagggagccgttttatctggtgggcgggcaggtcctgaacatcaccgtaagtgtcggtgtggcggaatatccggaggctgcgacttccgcactggaactgatcaactgtgcggaaatcgtaatgttcaagggaaaagccatgggcaagaaccggatccagtatttcgatacgccgatcctgaacgatttcctgaaaaatgtagaactggacagcaaattaaaagaggctgtttttgagaataattttctgctgtattatcagccccagtattatgcgggcaaccgtaaactgcggggcgtggaggcactgatccgttggaaggatggcaacggcagaatgatcagcccggcaaaattcattcccattgcggagaagaacggaacgatcattcctatcggcaactgggtactggaacagagtatccgtactttttccgaatggaggaaccgttacggagttccttttgtgctgtcagtgaatatttccgcgttgcagtaccagaaggaagattttgtggaaaccctgctgaatatcattcataaatacgatgtggatccggatgaaatcgaactggagatcacagaaagcattttgatcgacgatttcagtgcagttaccgagaaaatgcagttgttgaaggagtacgggattcgcatttcactggatgacttcggaacaggattttcttccctgtcttacttaaagaagctgcctatcaatacgctgaagattgataaatcatttaccgacacgctgctgacggattctgcgacccggattattacggagtctattgtaagtatggtgaaatccctgggatttgagtccattgcggaaggcgtggaggaagaacagcagtataaatatctgcgggtcatcgggtgtgatatcattcagggatatctgtttggaaagccgttgtcacaggaagagatcgaacaactgttgcagaagatgtactgatctgctgggtcagaaagaaagaggctgccatgctgactggaagggaacaggaaacagcttttttggaaaatcattataagagaacagggagtcagatcctggtggtgtatggacagagaggcgttggcaagacggctctcttaacctcttttacggagaaaaaacagacgttgcgttatagcgcgggaaactgttcttccagagaacaacaatatttgtggggacgggaactgcgaagccggggaaaggagattgcagagtatccttcctggcgggaattgctggaatgcatgacaatacagaaaggcgaaacgacagcagataagaaagtacttatcatagagaattttcagtatcttttaaaaggggatactttgtttttgcaggaactgatccggttcctgaaggagaaaaaagaagcactgttagtgatcctgaccacctatgcctccggctgggtggagaacagcatgatttccaaagtgggaaatctggcattttccgtcagcggatttctgaaggtgaaggaactgcctttttccgccatgcgtaagatattttccgactatacggtacaggaaagtatttcgctttatgcggcattgggagggctgccgggactgtggcggctgctttatccgcagaattcggcagaagaaaatctgatcaggctgcttttacagaggaacagctttctgccggagcttatgataaaatggctgtcggaggaatcgcgggagacggcagtttatgacaccattctggcaatgctggcagacggaagacatggaaaactgaacgatatgtatgcacataccggattttcccgggccaagatcagtgtatatctgaagaatttgatggaactggagctggtggagaaggtgctgcccggtacatatgagatctgtaatgcgtttgtccggttttatttttgctttctgtttccgcatcagacgtctgagcggacagaaggcagtacattttatgaaaaatacatccgggaagaatataatgattttcaactgttgacctatcgccggatctgtcaggaagtgctgcagggacgtttccggacggttgaactctggaacagcagacaggggaaaatctattttctgtgcagggaggacaccggcagaaagatcgtggtggattattccggcacggtatgttatacttcgaaagattatgatgtgctgcaggcatccatgaagagggaacatgtgactgcagacagcattctgatatttagcgagaatggatatgagaagacattaacggaaagaacggtacagatactggtgcattccgtggatgagaactcgtaagacaggaaagatggtattacgtgggtaaaaatttatttattgcagagaaaccgagcgtggcaagagaatttgccaatgctttaaaatacaatatgcgttccaaagacggctatctggaatcggaagaggctatcgttacctggtgtgtgggacatctggtgaccatgagttatccggaggtgtatgatgaaaagttccgtagatggagttttgacaccctgccttttctaccgacggaattcaaatacgaagtcattgaaagtgcgaaaaaacagtatacgatcgtaagttccctgctgaaccggccggatgttacgacaatttatgtctgcaccgactccggaagagagggagaatacatctatcgtctggtggagcagatgtcgggcgtacaggacaaggaacggaaacgtgtatggatcgactcccagacggaggaagaaatcttacgtggaatccgggaggcaaaagatctctcagcctacgacaatctgggaaatgctgcctatctgcgggccaaggaagattatctcatgggtatcaatttttccagagccctgacgttaaaatacggcaacacggtaaaagggtatctcaaaagagaccgggcagtgatttctgtgggtcgtgtcatgacctgtgtccttggaatgatcgtgaacagagagcgggagatccgttcgttcaccaagactcccttttaccgggtgatcggtaattttaaattacaggagaagccctttaccgcagagtggagagcagtggaaggctcgaaatattataattctccggcactgtataaagagaacggcttcaagaaaaaagaggatgccgagcgtctgatcgcagagcttaccgcagaaccggcaggcccggtgactgtcaccggcattgagaagaaaaaagagaacaagaatgcaccgcttctgtacaatctggcggagttacagaatgactgttccaaatactttaagatcagcccggatgagactttgcggatcgtacaggaactgtatgagaaaaagatgaccacttatccccgaacggatgccagagttctgtctacggcggtggcaaaggaaatccacaagaatatcggtggcttacgcagctatgctctggccactccttttgccaaagaagtgttagagcaggggacctataagaatattgcgaagacacgttacgtgaatgataagcagatcacggatcattatgccatcattccaacgggacagggactgaacaatctggcaggtctgtcccctacggcggcaaaagtgtacgaggtcattgtacgccggttcctgagtattttctatcctccggcagtctatcagaagttctctctgacagtgaaggtaaaggaagaaaacttttttgccagctttaaggtactggtacaggaagggtatctgaaggtggcgaacttctcttttaagaaggagaatacggcaccgaaggaagataaagagaatgagaatgaaagcgctgatgaaaaatgtgatgcagagcttaccaatctgctgatgcatctgaaaaaaggagattctctgactgcggatacctatgagatcaaggagggcgagacttcgccacccaagcgttacacttcgggaagcattatcctgaccatggaaaatgcgggccagtttatcgaggacgaagaactgcgggcccagatcaagggaagcggcatcggcaccagcgccacgagagcggagatcctgaagaaactggtgaatatcgaatatctggcactgaacaagaagacccaggtgctgactcccacccagatgggagagatgatctatgacgtggtatcggattccataagaccacttttaaatccggcactgacggccagttgggaaaaggggcttaccatggtggcggatggtgtgatcacaccggaagagtacatgggaaagctgacggattttgtgggaaggcgaactaccgctgtgcgcagcctgaacaatcagggagtgctatggagacagttccaggctacagaagaattttatcagaagaagacaaagcaatccaatgccaaaaataaggaataaagatgaggagaaattatcatggaaaatattacgattgagaatctgtatgatctgaaggagaccattgcggcagatctgttcactgaggcagaatatccctgggaggtgcttcccagaatccacgatttcattctggaactgggtaagagactgccggaagaaatttatgaaaaaagaggcgaggatatctgggtggcaaagaacgcaaaggtagctcctaccgcctgcctgaacggtccgctgatcattgatgaagaagcggaggttcgtcactgtgcctttgtccgtggcaatgccattgtgggtaaaggcgcagtggttggcaattccacggaacttaagaacgtggttctgttcaataaagtacaggtgcctcattataattatgtgggagacagtgtgttgggcttcaagtcccatatgggggccggttccattacttccaacgtgaagagcgacaagacgctggtggttgtaaagaacggagaagagaagattgaaaccgggctgaagaagatgggggccatgttgggagaccatgtagaagtgggctgcaacagcgtactgaatcccggaacagtcatcggacgcaattccaacgtgtatcctacttcctgtgtcagaggggtgatccctgctggacatatcttcaaaagacccggagatgtggtgaaaaaagataatatctaaaaattagatcattattattcaaagcatcgatgaattttgattgacgaatgtccttttatgggttatgatatttatcagtgcaacgctttgacggggtaaagcgtctgcgcattacagtaagcagatcgtaagatccgcagaaaagaggacatttattatgaaaaagaaattattatctgtagtacttaccgcagtaatggcagcatctgtcctgacaggttgtggcagcaccgataacggaactgcttccaccgcagcagctaccggcacagctcagagtgaagcagcagctactagtgccgcttccacagatggcaaggtatataacatcggtatctgccagctggttgagcatgaagctctggatgcagcaacccagggattccaggatgctttaaaagaaaagcttggtgataatgtaaaatttgatctgcagaatgcacagggtgagcagaccaccgcagctaccatctgtaatgggttcgtatctgatggtgtggatctgatccttgccaatgcaacctctcctttacagagtgcagcagcagctaccaccacgatccccatcttaggtacttccgtaacggattatgctaccgcactggagatctccgactggtccggtgctaccggcagaaatatttccggtacttctgatctggctcctattgaagagcaggaagctatgttaaaggaactgttcccggatgtaaagcaggttggtctgttatattgctccgcagaagctaactctctgtatcagatccagctgtttgaggctgctctggataaagatggtattgcatataaagagtatgctatcgccgataccaacgaagtacagtccgttaccacggctgccgcaggcgagtgcgatgttctgtacatccctaccgacaacacactggcatccgtaaccgagactgtatataatgtcgtagctcccgctaagattcctgttattgcaggtgaagagggtatctgcaacggctgtggcgtagcaaccttatccatcagctattacgatctgggatatgctaccggtgagatggcttacgagatcctggctgagggcgcagacaccactactatggatgtacgttatgctcccaatgttaccaagaagtacaatgccaagatctgtgaggagctgggtatcaccgttcccgatgattacgtagcaattcagtaagagttatacaggtatttaagtacggttctaacaaaatatacttcgatagggatagcgcgtaacagcgatatccctatctggagttttaggaggaaaaagaaatgtcttactttatgtcactgaatcccctttccctgttcagggcaatgccgggatcgatagcacagggaatgatctggggagtcatggcactgggagtgtatattaccttccgcctgctggatttcgctgatctgaccgtggatggttccattgcaaccggtgctgcggtatccgttatgctgattcgtgcgggagtttctcctatagctacgctgcccattgctttcctggccggagcattggcaggcatggtaacgggactgttgaacaccgcactgggaatccccggaattctggcaagtattctgacgcagatctccctgtattccattaatttgaatatcatgggcaaagcaaaccagccggtcagcgtagataattatccgctagtggtatctctgcgttatgtgacggacggttcggtgagcagacttctgtttttcctgggaatgatcgtatttttactggcactgatcgctgtgatgtactggtattttggaacagaacagggtcatgctatccgtgctacgggctgtaacggtaatatggcaagagcacagggcatcaataccaacttcatcaaagtgctggcactgatgatctccaacggtctggtaggactgtgtggtgcactgtacggccagttccagggggcatcggatgtcaatatgggacgcggtgctatcgttatcggtctggcagctgttatcatcggtgaggttctcttcggtaagtttgccagcaagagaaagcttgcgttcgcatttaccctggcatcggttattctgggcgctgtgatctactatatggtatatcagttcgtactgtggctgaagatgccttcagaggatatgaaattgttctccgctatcgtagttgccattttcctggcaattccttacttgaaggagaagagaacacttcggaaaggagcgtcaaagtaatggcttacgcattggagatacaggacgtacataaagtatttaacagaggcaccatcaacgagaaggtggccttgaatggagtaaacttaaatctgaatcccggggatttcgtgacgatcattggtggtaacggcgcgggtaagtccaccacgctgaatgctatcgccggcgtatggcccatcgattccggcaagatcatcattgatggtacggatattacgaacctgccagaacacaagagagcaaaatatctgggaagagtattccaggatcccatgacgggaaccgcagctaccatggatatcgaagagaacatggcgattgcgttacgtcgcggtgagaagagaacccttcgctggggtgtttccagagaggacagagagttattccgcgagaagctgcagactcttggattgggactggaagaccgtatgaccagcaaggtggggctgttatccggtggtcagcgtcaggccatcacactgcttatggcagcattgaagcagcccaagctccttctgctggatgaacataccgcagcactggatcccaagaccgcagccaaggtactggagatcagcgacaagatcatcgcagagaatcagctgaccgccatgatggtaactcacaacatgaaggatgccatcgttcacggcaatcgcctgatcatgatgcacgaaggcaaagtgatttacgatgtggctggggaggagaagaagaatcttcaggtgaaggatctgctggcaaagttcgaggaagtcagcggcggagaattcgccaatgaccgcatgatgttggcgtaaaaataagaacgggacacgctgccgatttaggcagcgtgtttttgcgtgtgcgcctagcggcgcacgtttctaacgggttaaagtcccgaatccgcccggtagtgggaaggatatagccgaaggcaagggtgtccatcgtgaggtggaatctgaaggaagctggatgtgaggaaaatactaactcatgggcaaatctctggtctgacggacagaaatcttatatgaggttatgcatgagggtaaggttgcacgccaaatcgaagcccaataactacacggaatcatgcatgataaatgaggcagatggatggagaggaagaaacgtgtggtacctagggaggtctgtgcggtacgccttgaaagaggcaaccattgcataaagcaatgctgaacgcacagaagtcagcagaggtcatagtagccaaacggaacaagttccgttcgaggtgaaggaccgaatcagtaggagtcttgagtatgaccgagaaaggaggaatgaccgtctatggcagaaaacattgaaaacaatggctgttcgcaaagagataatgcggaacatgaagggtatgtgaaagcgtccaggtcattcaatcggatatggaaagaaagagacagtgcacagccgagacttttggaagcgatactgtataaagacaactttaacagagcgtacaagagagttaaggcaaacaagggagcgccaggaattgatggcatgaccgttgaagaggctcttccatatctaagggaacatcaacaagagataaccgaccgcatttatcgtggaaagtacactccgtctccagtaagacgagttgagattcccaaagcagat

SEQ ID NO: 5584 - DNA, 4419 bp, Unknown
  gut microbiota DNA sequence
cccaactcttccaggatcttgttggcatctgttacaccgggaatctcgatattgatacgatcggtaccctcctggtatacaatagcctctttactgtagttctcaacacgcttctgcagcttggcaatagtatctgccatgtccgttgcatccggctcttcatcgcctaccacctgataagtgatactgacaccaccggccagatccagtcccagacttatgtctgaagcactggcagttccttccgcatctacgccatacagatccacatagccgacacccagcaggaccagaagggcgcagagcagaatgatgattgctttactttttttcatctttcctttgtcctttctattcttctgaagcttctgctgcttccgcagccttcagcatgatagcacattcgatacgctttctctgcagctcacagccgatgtcatacgcatcattgatattgccatggaaattataggagttcgcagcacatccgccgctacaatagaacttggcaaaacacttcttacacttgtcctttgcatagacattacagcatttgaactcgtcacggatatcatctcttaccacaccggtatccacattgcccatgaggaacttctcgttacccacgaactgatggcagggatacaagtctccccagggagtaaccgccagatattcggtaccggatccgcagccggagagtctcttggctacgcagggaccgccctgcagatcgatcataaagtggaagaaattgaaagccttgccctctttcttacgcttgatcatttctactgccagtttatcgtattcttcctttaagatcggaagatcctcttctctgatggcataatcatccgtaggctgtgccacaacgggctccacggagatctgtttgaatcccagatctgccagatgcagaacgtccttggagaaatcgagattattgtgggtgaacgtaccacgcacataatagttcatctggtctctgctctccgctaccttctggaacttgggaacaatgatgtcatagctgccctgtccgccacggaaaggacgcatcttgtcgttgatctccttacgtccatcgatactcagcacgatattacccatttccttattcacgaactccaggatctcatcatttaataagataccattggtagtcagggtaaaacggaactttttattgttggacttctctaagcttctgccgtattctaccagctgctttaccacatcccagttcatcagtggttcgccgccgaagaaatccacttccaggttcacacggttgccggaattggctaccaggaaatccagtgcctttttgccgacctcaaagctcatcagtgctcttctgccgtggtactcaccctcttccgcaaagcaatatctgcaggcaaggttacagtcatgggcaatgtgcaggcacagtgccttgactacggtctgacgcttcttaaaatcaaaaatgtaattctcataaatatcgggagcaaacagctgtcctgccttctccagttccaggacctcgtccaccgcttcggtgatctcttcctggggataggggatatttgcaagattcagtacagcagccttgatggtgtccgcatccttgataccttctgtcaccagaggctctaccagcggaatcatatcatacacaatatcatctaccacatggacagaaccactgttcacatccataacgatattatagccgttgctcttatactggtgtatcacagttctattcctcttctttctacttcttattgcttaaaatacattaacattaactatcggaaccccattcgcaaaatcatcctccggactttcctgaataacatgcctgcatgttatttgctcatgtggttacttcgccgtattttgccggacgtatcttcttacgtatgcaagcatccgacaaagaatacgctgtcatctccagctccgaatagttaacagagaataagcagcgacctgaatcgctgcttacgttagtctcttctcattttcttagattatttaatcttttcacaactctggtttcctacagtgcaggaagtcttacatgcagactggcaggaagtctggcactcgccgcagccgccctttttcatagattcctttaaatctctggttgttaaagtcttaatatgcttcattaaaaatagcctccttatgatttcaaagcgcctatagacgccagcgtgtatataaacatacagacacgcaactcatttttgctcattatatcatgtatttggcatttgtaaaagctttttttctcaaaaaccgttaaattcctgtccatttctgtattttaccctaacattccgcccagtgtccccccggccacacacaataccattgtggtccagaaggaattgcccaatgcagtttccggcgttttgatcaatacggataccaccgccagtatcacgaaatatgctgcccctagcagtgctccccaaagaaacttctgcgtcttcatcttttttcctgccaaaaatcccgccataaaggtagttatgacataaatagcagagattgcaatggtcaccattccttccgtcagatgcaatttatacaataaaagtgccaacagacataaaagcaacagtgtcagcacataggatgccagcagacattttgccagtgcaagcaccggaaccccttcttttctctcgcctcttttttccatgttgctcctcctttttacctatgtaaaatgtatattcaaatcattcggaaaacttgacaactattcctgtcctattgtatattgttgcttaataacttataaatggggcttatgcctactactattatttaagaaggagtgaacttttttggatacctctggtgtcatacaacttgtttctatcgtaattctgatttttctatccggctttttctcttctgccgagactgcgctgtccacggtcaaccgtgtacggatgcgtaccctggaagaggaaggcagcaagcgtgctgcacgcgtcaacaaagtcctggacaattacagtaaaatgatcagtaccattctgatcggcaacaatattgtcaatctgactgcatcttccctggcaacaacattagctatgcgaatcaatctggctgtaggtatcgcaaccggtgttctgaccattgtcgtgctgctctgcggcgaaatcgtacccaagacctgggcaatactgtattctgagaagctggccctgacatattgcaatgtaatctattttctgatgcaggtgctcacgccggtcatcttcattgtggatctgctgtcccacggtatcatgaagctgttacatatcgatcccaacaaaaaagccagcaccatgactgaaagcgagctgaaaacctacgtggacgtcagtcatgaggacggtgtcatcgaatccgaggaacgcaagctgatctacaatgtgttcgatttttccgatgcccacgccaaggatatcatgattccacgcatcaatatggtaacggtcagtctggatgctacttatgacgatgttctggcagttttccgggattccatgtataccaggcttccggtctatgaggatgacaaggacaatattatcggtctgatcaatatcaaggactttatcctgacggaggatcagagtgctttccatgtgggaaacattttgcgtgatgcttactatacttacgagtacaagaaaatcgcagacctcatgtatgagatgcgggaaaagaccaccaatgtctctttcgtattgaatgaatacggtgctaccgttggtatgatcactctggaggatctgttagaagagatcgtcggtgagatccgtgacgaatacgatgaggacgaggaagaactgatccagaagatgtcagaagatacttatctggtggaaggcagcatgaagctggatgacatcaacgacgttcttggaacaaatctgaccagtgaagattatgactccatcggcggtctgatcatcgactgtctggatcgtctgccggaggatggtgaggaagttaccctggagaacggtattcacttgaaggtacagggtatcgaccagaaccgtatcatcaaggtactgatgacgattccagaacccaacgaagaacatgtggaacacagttccgagacctctgagaatcacgaataactctgacggttccgcagtccctgaggcacacggacagttctggcactcccgcagcttttgcgatccacgaaccgcaccggcacttacgctcttttgatatccacgaaccgcaccggcacttacgctcttttgagatccacaaaccgcaccggcacttccgctcttttgtgaattatgaatgggaataacgaaaggaatacaaatgtcacaggataaaaatacacaaaacaagaaaacaaaaatgccttccaaacagatcttc

SEQ ID NO: 5585 - DNA, 17244 bp, Unknown
  gut microbiota DNA sequence
ctccagtgttgcgttcagatcctcttcttccatctcaacaccatcgatcataccgccggcaaagttccattccgtaccactcagatccgggatttccataactgccacctgtaacaggggaccgccctctgcttctgtacctgtctctgctacagtctctgtgggagcttctgccacttcctgggtctgtacttcctgggtctgtacttcctgggtctgtacttcctgggtcacttcttcgttggtgttctccacaattacctcttcctcaccgcaggctgtcaaagacaatgccagtaccagtcccattgcgcatgcaaaatattttttcttcataattgtttcctccttcttacaacagttctctgttgtctgaagatagtgtaccttattttttccatttatgaccgtttttgacaccaatcgacccaaatatgacatgaaacgaccggagaaaaaattctccggtcgttttatgctaaaaatgtctggtttttacgaaaaaaataggaaaaaaatttgtctttcagttccgaatattttccatgcggaatcgggatctgggtaccgtccgacaggatcacagctttgttagatatgctctttacataatccatattgatcatatatgacctgtggcaacggacaaagcattcataatccttcaactgttcgcacaaatcgtccagtttaccaacgctgtccagtacttctccgtcttctttgtgaagcagcagattcctccccgttacctcgcagtacttcagtttgtccagttccagccttgtgattcccgtcttacatcgcaggatcagactgttcttttcattcttgaggcactccctgagtaccgaatccatcaatcggtagaagctctcctgccagataggcttcaactgataaaaataggcccccacttcataggaatccacagcgtattccgaagaggatgtcagataaatgatcttcaccgaagtatcatacttacggatctctctggcggcactgattccatcctgtcctggcatcagaacatccagaaatataatatccagccgggtcccccgctctacttccgacagcaattccagcggactgtgaaatgctgcataagtaatatcctgattccgttctacccgatatctgtccatcagaacgcttaattctttaagtactgacagatcgtcatcacaaaaagctacttttatcatgattcttcctttgccgcacaaaccgatgcagctcattcgttttatcgtatgtgtcttgacatgtttttctacgcttattacaataattatatccgtacatcgatgtacgatgcaaggataattttgagaaaggcatatttttgatgtcatcaaacgaagaaaacggaaaaagtgaaaaaagactgatgtccatcggagaagtctccaaagcgatcggcatcaccagaagaatcatattgaactacgaagccaaaggtctcctgcttccggataaaaaagaaggaactgccgggaatcgctattataccccggattccatctccctgatccgctccatccgggtactgcagaatttagggctgtccctggatgagatctcctcctattataatggatccacggatctggaaccattgatcgaacgtctggaagccttacgagacggcctgacgcagagtatcgagaagttaaagcaacgtactgcgtccccggctgcttccgtgatacagtttcttaccctccccgcccagacggtgtactgccgcaagggggcttttaacggagtggaagaacgcaaagaattcctgcgggaggtctttatggaagccattcatctgtacggctccgacagcagtaagcggatgtttttcattgagtacaatctggaacatccggaagaattcacctgttgtatctccgtacctcctgccagcaagggagaacatgtggtgcatctgccggagcagaaagctctcggcatcttctatcacggctgttacgaatcactcccggatgcccgtagaaaactgtctgcctacgcagctgcgcagaatctgtctctgtcaggcacggtacggcatacttatctggaaggtcctccccagcataaggatccggcgaattttatcactcaggtggctcttgttttacaatgattcagtcaaacaggatttcctccaccgttacgaactgaaagcctcttttctgtagaatatccactacttccagtgctgcggtgacagaagtctcataataatcatgcatcagaataatatcgccgtcccccgccttctccaccactttggacgcaatacagtctgcattgttggaacaccagtccagaggatcgatattccacagaaccgggaacatattcagttctttctcaaagcttttgtcccaactgccgtaaggcggccggacaaagcttattttctcccctgtgatttcttcgagaatttcattggtctgcaccagctcctcccgaaaggtctcccggttgcgggaagtgagctgtatgtgactataggtatggttcccgatcagatgtccttcgtcctgttctctccggataatgtccgggtaattctccgcattctctcccgtcacgaaaaaagtagctgccactccccgctccttcaatccatccagaagctgttccgtatacttcggatgcggcccgtcgtcaaaggtcagcgcgatctttttcggttctcctgatgtcccgcacacgccggtgtctgtttctatataggttccatatgatttctgctctgcgtatcgttccgttcccactgccagacacaagattcccagaagcatgtcaaagatcagaattcccgccagtacttttttcatttcaagccgtccgtttcacgctttcacagaaaatatatgcattctcaaaagtgaccattcctgctgccgcaataaaacatgcttgcaaaaaaggagacccgagactctcatctcccggatctcctctgtatgttacttttttatttatactcagatcttgaatacggaaatctcgttcttaagtccttccatattctcatccagtacacttgcagtagtgctcagcttctccacatggttcagaagcttattggccacatcgttgacggtctcggcactgcctgcggtctcttcaatgatatcggagatattcttcacggctgccacagcagcgctacgctcaccgtctgccttctccgtgcttaccacgatatctttcagtccctcgatcagctggcccatacgctcctgcatctcgcggaatactgcgatcacttcttccacagctttggtctggagttctaccattgctttcgcctggcttgcactctccacgctgttctgggtctgggctgtaatgttggccacattgttgcggatctcgccggctgcctttgcagaatcatctgccagcttacggatctcttctgctactacagcgaagcctcgtccagcctctcccgctctggctgcctcgatagaagcattcaatgacagcaggttggtctgctctgtgatctctgtgatcgtagctacgaaactgttgatgatctcagattccttgcgaagagattcgatactctcactcactttcacagtcatctgtgttgtctcgccagcacgatcacccagtacctgtacgatctccattcccttgttgatcatgccttccgtctcgcctaccagcttctccacacgttctaccacatggctgacttcctggatctcattggagaggatatcggtcttctccacgcactcctgtgcatgtctggactgttcttccataccttcgttgatctcaccgatggcacgggtaatatcctgtgaatactcatgaatcagttcagaagcctgtcccacgttctgtgcagacacttccaactctccggtagcattgcttacctgattgaccagcttcttcgtattcgtgatcatgttggtagccgagcctgccagatcctggaactcatcatgtcccttggcagatacggtaaccgtcagatcacccttcgccacatcaccgaactttctggaaatgcgtctcatgttattctcaatacctgcagtgataaagatacctacgatcactacgatcacacatgccaggatcaccagaccgatggtcatgttgcggatctcggtagcctgactggtcactactctcataggtaccagtgcacaggtggtaaagccgatatctgcactgtggctgtaaatgaaaagatacttctcaccctggaaatctacctccgcagtacctgcatccgctactgcctcacccatgacagctgtataatactcctgtccggagaatacatttccctcttccggaaggacactttcttttccttcttctacattctcaacaaccagttctctgcctccgggagttacaaatccgatgatactgccgtctccgatatcgatctcttccatgaaatccgtaatagcagaaggcttgatatcgataacaacgcaggcattgttcgactggctcatcatttcgaaggccataatataatctttttcggtctccgttaccttttcatccagtacaggatgactgtcgatccactgcgggatacttcttctgccttccccgcttgccacgtcttccttgtactcatccaggaaaccgtccacaccggatgaaagcttagtggacagaaggtttactcccttcttgggaataatgtgcatgtggctgatgaacgggttggaggtctgcaccgacagaaggttggacttcgtagatgtcaggaaattcaacttatccacgggattatcttcgaacattcccaggaaatatttccgcagatcatcatcgtaagcatatttcagaccctctgagcggataaaatcacagctcatattcagattttccgtggccatacgcatcgtctgtaatgtggaatcggtgaatttctcgcttaatccttctgcggatttctggtatgctgacacaccgatgatcaccataaacacaataggcaccaggaaacatacaacgatcttgttgcggatgctgagcagtttcgagctctttccactctttttctgcttcggagccttttgcttcttctccgcagatgccttctttcccttcactgctttttcaggcttcggcttcttttcggaagtcgtctcttttttcaccgtaaaaagagatttctttggtttttcaacattcgtactcatttaataccctccggtacttgttatacatatttagaattatagcataataattaccagaatggaacaacattttctgtcatttgttacgctttttgtatatttttagttaaaatttatcttcgtcagaaaggtctcagggaacttctcttcctccgccagatttaggatacgtatctgcaattcctgccgttttcgaaggtcatccccaccatctggcaatgttccttccgccgtttgctttccacctgctgtaaggatccgactgcccaccatggctgcaccgctcagtgccgtattgccgccggtcaccgtgcaatctgccagttcttccggaagcagcccgatagccacagccgccttcggatccagataataaccgaatcctcccgccagcaccactttcgaaatgtccgaaaatcttatgccatagctgtccgccagaatctcaatgcctgcggcaatggctccttttgccagctgcactgcacgcacggactccttcgtcaccagcacatcgccgatacggactcctttcgtaaaataaggttccttcaaaagaccctgtccgtccatcagcccctcttccagaagtttttgtaacagtctcaccatatccgcgccccagatgccccggttggctccgccttcgaaagcagggccagccgccgtggcacaggcatgtaatctgtgccggtttcccagtgccatctccccgttggttccaagatcgatgagcagggtggaggcctcctgttccagcattccactggccaatattccggcagtgatatcgccgcctacaaaggctgacaatcccggtatgatatgacaggccactcctgcaatttctgtctccactgcgccgctatgactgactgtaaaaggtgctttgcccagttcctccggattccagcccatgagcagataggtcatggtggtatttgccgcaacgaccatctgcagagtctcctgcggctgcagctttttggaaaaacgctgcactcctttttccatgaggtcacggacttttttctgcatatctgccgcttttcccggatcctttgctgcctctatccgtgagagcacatcggcaccatagctgacctggggattcacactgggaaagctgtccaccactttaccggtcatgtcatacaactgcatggcaatggtagtggtaccaatatccacagtcatcagccgtttaccgtccggattttgtaatgttaacggaggaagttccagcttttccgtcaccacctgcatcccccggatcactcctggacatctgccacaaccggtacagatcaggcatctggttcccttttttcctgtgggattggtactgctcgtattatacaaactgattcctctcttcatcgtaatgatagtcaatggctgccagtttatctgtgatctcctgttccttcacatccagatcatcgcagagttgtttcaggcttccgtagaaatcacggagttttaaatttataaagcttaataacattacgggatcctgtggtatcataacgttttcctctcttttcctgtttttgacagagttatattgtaaacgaaaggagcaaaaatgacaagtatcatcatctttgctcctgttttattttacagattattgatttttcaatcccttttcgcacttggcggccaattgatcattctccacggtaatgacaatggtatcgccttcttctacctgatctgccaggatcatcttggctgccagggtctccacgtacttctggatataacgcttcaaaggccgtgcaccgtagaccggatcataagcattgtccacgatatactgcatagcttcctccgacagacggatggtcagctgcttatcctccagacgtctgttcagatcggcaatgatcagatgaatgatgccgccgatattgtccttggtcagaggcttgaacaggattgtctcatccagacggttcaaaaactccggacggaaatgtgcccgcagatcattcatgactgccgcctctgcttccggcttgatggtaccgtcttcattgataccgtccaacagataacttgcgccgatgttggaggtcatgatcagaatggtattcttgaagtccaccgtacgtccctgagaatccgtgatacggccgtcatccagtacctgtaacagtacattgaatacatcgggatgtgccttctcgatctcatcgaacagtaccacgctgtaaggttttctccggacagcttcggtcagctgaccaccttcctcatatcctacatatccgggaggcgctccgatcagacgagagacagaatacttctccatgtactcactcatatcgatacgtaccatattattctcatcgtcgaacagtgctgccgccagactcttggccagttccgtcttaccgacaccggtaggtcccaggaacaggaaggagccgatgggcttgctgggatccttgatcccggctttggaacggatgatggcttcggtgactttggtcacaccctcgtcctgacccaccacacgtttgtgcagttcttcgtccagatggagggtcttgttacgctcactctcggtcagtttggctaccggaatgccggtccagcgggaaatgatccttgcgatctcttcctccgatactttttcatgtaccagagacagatcggattctcctaccttatcctcttcctgtgccagctgcttctccagtgcgggcagttcgctgtattttaatctgccggccttttcatagtctccttcccgctctgcgatctggatctcattattcatgcggtctctctcttcccgcagtttggaaagtttatccacggatgccttctcgttatcccactgtgcctttttagtgttgaactgatcctttaactctgccagttccttctgcagatctgccagacgttccttactgatccggtcatcctcttttttcagagcggtctcctcgatctccagctgtgtcaccttacgctgcagttcatccagctccgtaggcatactgtccatctcggtcttgatcagggcgcaggcctcatccaccaggtcaatggccttatccggcagaaatctgtcggtgatataacggttggaaagcacggctgcacttaccagtgcgttatccatgatcttgacaccgtgatatacttcgtaacgatccttcagtccacgcaggatagagattgtatcctccacggtgggttcttctaccataaccggctggaaacgacgttccagagcggcatctttttcaatatactgtctgtattcatccagtgtggtggcaccgatacagtgcagttcaccacgggccagcatgggcttcaacatattgcctgcatccaatgcgccgtcggtcttgccggcaccgacaatggtatgcagttcatcgatgaacagaatgatctgtccgtcactgttcttcacatcatccagtacggccttcagacgttcctcgaattcacctctgtatttggcaccggctaccagtgcgcccatatccagtgcgaagatcttcttatccttcaatccctgagggacatcgcccttgacgatacgctgtgccagaccctccaccacggcggtcttaccgacaccgggttcaccgatcagcacggggttattctttgtcttacgggacaggatacgtaccacattacggatctcgctgtcacgtccgatgacgggatccagcttctggttccttgctttctccaccagatcctgcccgtatttttccaatgtatcataggttgcttccgggttgtcactggtgactctctggttgcctcttacggtagacaatgcctgcaggaaacgttctctggtgatgccgtattccttccagatctcggcgatctccttgttgggattcttgatcatggcaaggaacagatgctctacggagacatattcgtcacccatctgttttgcttcgtccgatgcgctgaccagtaccttgttcagatactgaccgacataaggctgaccaccctgcacctttactctcttctccaaagcctgttttgcacggtttacaaaatgatccttctggatctccatcttttccacaagctttaagatcagactgtcatccagcgtcagcagactgtacagcagatgttcctgttcgatctcctgattgccatattccatggcgagcttttcacagccattgactgcttctatggatttctgtgtaaatttatcaatattcataatcgttcgcctcctcacataaggttatgcaatttgcaactattcagagccattaaatattgcctgagctttgttgattgcttgcattcataaaaagctttggcaatatttatttggcgaggtagcctcaatgagcaaaaaggaagctgtgtaacagcgttttgcgaatgaggctctgaatagttgctttatttattttcttactcgcgaacagattcacaggctttctgtatcatctgttctatagttaatataacacatagtcagagaaaatcaattaagaaattataaactttatatggaatctttcgaaaattattttccattcacgcggaagattaatgccgttaggagaaaaatcactctccagatactcatttttcacaatttaagtatctatgcctgaaatttttctgtatagacccatacgccacatatattcctgaaatattgcattgaaaagtacctgcggatcacttttttctctatagacccaaaatagcgccgtccggtgtcgtgtttgcaaaaacacggcatcttggcagcgccatttctctttttccgttattgtaacctacagtaacactttatttttctgtaacgccctttacttcatatcctgcgtcaactacagccttggtcagtacttcgtctgccacatcagaagccagttccacggtagcattcttctgctccaggctcatggttacggcctttacgccctctacggcctccagtgccttctgtacggtcccggtgcagtggctgcacatcattccttcgatactgattacttttgtcattgtgtttgtcctctctttctcttctttgctattttgctctgcgggggcttccagtatgcactgttctccctccacagctgcctgcgttgtctcctgttccgtccgggctgcttccggcgttcctgttttcagcggagtaaatccgctcttaaagcctctcagccgcagggcatttcccacgacaaagatactgcttaaactcatggctgccgcgccgaacatgggattcagacggattccaaaagacgggtacagcacaccggctgccagagggatgccgatgcagttgtagaagaaagcccagaacagattctccttgatgttgcagatcacggaacggctcagtttcatggccgtcacggcatcccgcagatcatttttcatcagaataatatctgcgctctccatggctacatccgtgcctgcaccaatagccatgcctacatctgcggctgccagtgcgggggcatcgttgatgccgtcaccgatcatggctaccttatggccctgacgtttcagctcgctgacctttttctccttatcctgcggcagtacttctgccacgacctcagagatacccagcttctgtcgtacagcttctgcagtacggcggttgtctccggtcagcatgatgactttgacacccattttctcccagacacgaatagcttcataagaagtggccttaacagtatccgccacgccgataactcctaagaatcttccttcctgtgccacaaggagcggtgtcatgccttcgtccgccatccggttcagaccttctgtggcttcctccggcagagtgatatgattctcctgcagaaaggcaaggttacctacatagaattttgtaccggcaggaattatcacgctactggcacccgatactgtatttctcgccatctggttctgttccgttgtcttgccggagccatctgtggtgtcgttctgttttccggcataaaataccgccgtagggccgtcattttttactgattctaccgcacggaattctgctgccagtgtaccttccacgccacggccgaaggttgccttgaaatccacgatctcgggaattgccagaccgaactgctctgcccattccactacagcttccgccagcggatgctcactttttttctcaagagctgctgcgatctgcatcatggcatccatcgggaagtcgctctgataaccgcctgcttcttctacctttaacttaccgctggtgatggttccggtcttgtccagtaccacagtgtcaatctctttggcctgctgcagggcctcacccgtcttgatcaggataccattgctggcacctacgccggttcccaccatgatagccacgggtgttgccagtcccaacgcacaggggcaggaaattaccaatacggcaatggctgtggaaatggcaaactccgcggtagcaccgcttatcagccacacgatcagggtgatcagggaaatggtcatgaccgtcggcacgaatacaccagccaccttatctgccagctgtgcaatgggagccttgctggcactggcctcttccaccagacggatgatctgtgccagtgttgtgtcatcgccaacacgatccgcacgacattttaagaagcccgccttgttcacggtagcggagaccacatggtcacctgcctgtttctccaccggaacactttcaccagtgatggccgcttcatccacactggagttgccttctaacacgataccgtccaccggtaccagacttccgggctttaccagaaaaatatcgcctttctgcaggctctccgtgggcacttccttttcctgtccgtcctcggtaacaagaattgccaccttgggagccagattcatcagcttggtgatggcttcactggtctttcccttggaacggctctccagatattttccaacggtgatcagagtcaggatcgtaccggaggattcaaaatacagatcgtgggcataatgctctaccactgccatgtcaccataacccaggccgcagctgatccggtacatggcgaaaatgccgtacaccagtgccgcgccagatcccagagcgatcaggctgtccatgttcggactgcggtgcgccaatgttttgaaacctacagagaaaaacttccggttcacatacagaatcggcaataacagtaaaaactgcgtcaatgcaaaattcatggcattggcattgccgtgcatcgtgtttacgataaatgccggaaccggaattccgaaccattctttcagcatatggtgcatagacacatacattaacgggatcaggaatccaatggagattcccagacgccatttcatggctcttgcgtctgcatccagcttctgctgtagctcctgtttgccatcgactgtggactttcctgtacttcccgcattcccggaagtgctctgtccgcctgcacctgccacactgccttcggtcattaccgaagcaccgtagcctgctttcaccacagcatcgataatttccgccgaagtgatcttcgtctcgtcataggtcacatccatagtctccgtcagcagatttacggatgctttttccacattttccagcttgtttactgccttttccacatgggaagaacatgcggaacaggacattcctgtaacatgatatctttccttcataatacccttgcctttccatgacctgcaaagtctccggtgctttcaatgcaccgcagcagcacaaatttacaggtttatctgcgaccattccgccgcttatttcaatttcttcacaagttccactgcctcatctactatagcagtattccccttccggatctcttccaccacacaggtctccatatgttccttcaggattgcatagccaaaggcctgtaaagcactctccacggcagctacctgtgtgagaatatcaccgcagtaacggttctcttccagcatccggctgataccgtttaactgtccgctcatacggcttaaacggttctgtaattgttttctttctttttcggagcggggcgttgccttctggtgacaatgacaacattccatgcctttttctcccatttttcttccttttgttctgccataattttccccttcctgagcctccggcaccggaatccgaattttccagaatcttcccggttctacacatatgctgtttccggcctgcatatcagtgcacgcaacatgctgccggatctttcgttgcagccatacgcaaaataccctacaggggtatcttgttttcttctacaagatatacccccatagggtatttgtcaagaggtactttctaattcctgccagttcacctctgaccaaaacagatccttacgatctgcatcttcatgattctgtcgccggttctggcgaggaagcggaataatccgctgacggaagggtctcgaagatcattatatcccagcatatagccacggcttgtgacctgcaatctgctgttccacggggaaatctcacttttcgcatccgaaaccgcaaaatatgcacccacatcctgaattttagcgctcctgagccatgtctttgctatcatcttaaccgctgtccggttcgccgcgtcaaataccagcacaccaccgggaaaactgtcagccattgcctgtaccagcgtcctgacttgctccgtcagaaaataatagaatactccggaggcaaaaaatattgccccttcggacgcgtcgattttggtaaaccattccgtatcattcaaattgcagggaatattttcctcacggtctccggcgggcagtaattgattgcgtacggcgataacatccggaaaatccagattgtaaattttacagctgccattgtcacaggctctgccggtaccgtcaagtccacagcccaaattgaccaccgccgcatcaggatgatctgccaggtaattttgtacctcccatgcaaggtcattctgccgcatggcaacctccagcgaaccgaaacgctgcatcaggccgtgggattttttctccacctgtgaaaaatcatagtcgatctggtcgatcaggtgtaccgccatctcgtcccgatataggttcggatacaactccgagcatagcttccgggaataaagcgggatgatcagtgtctcctgtacggtgttcttctcaatcttgtatttcatggacatctctcactttcttgcatttttgccatttcttttttgttagttttgtctaaccgctgtatagagttatgtggttagcttgtgctaacttaaatgccttagaaaagccgcattactgcggcctttcaactgactgtttttggttttcgtttctattatactgaacttatttctgttttgcaaggtagatttccaccaatagatatttcttgtcttcttcccagttatagtagaactgaatcagtccgatgcggctcctggtgccggtcttctcattcaacgcagaaaacatgccgctagagcagcgcacgggagacaaataaggctgtcggcgatcaccggcaccgacaagaaaaatcccactgccttgaacgcagtgggattcccggttttgcttttccataatagaaaacagctaatgaaagcatggtctctccttaaacagactggaaaccgccttccagatcctcaatgatatcatcaatattctccgtaccgatagacagacgaatcgtattgctgtagattccctgctcattcagctcttcctcagacagctgtgcatgggtggtggaagccggatggatgaccagagacttcacatctgccacgtttgccagcagtgagaacagctccagattgtcgcagaacttcttggctgtctccttgccacctttgatttcgaaagtgaaaatggagccgccgccgttgggaaaatatttcttatacaatgcctgctgctccggatccgtggatacggaaggatgatgcacgcgctctacctgcggatggttgttcagatactgtaccaccttcagtgcattctctacatgacgttctacacgcagagacaacgtctccaatccctgtaagaaaataaaagcatgcacgggagaaatgcatccgcccatatcacgcagaagcattgcacggattgctgtcacgaaagctgcacccggtactgccttggtgaaggtaacgccatgatagctggggttcggagtgcacaggtgagggaacttgccgctgccctcccagtcaaatttaccattttccacgatcacaccgcctaagctggtgccgtgtccgccgatgaatttcgtagcggaatgtaccacgatatctgcaccgtactcaaaaggacgtaccagataaggagtagcaaaagtattgtccactaccagaggcaccttgtgtgcatgggcgatctgtgccagacgttcgatgtctaccacatcagagttggggttacccagagtctcgatgtagagagccttggtgttctcctgaaagcttgcttcgatcttatcataatcggaaggagccacgaaagtggtggtcacaccgtagtccaccagagtatgcgccaacagattgtaggtgccgccgtaaatattatttgcagaaatgatatgatctccctgttttgccaggttctggatcgtgtagcagatagctgctgcgccactggctaccgccagagctgcggtaccaccttccagtgctgcaatacgctgctcgaagacgccctgtgtcgggttgcccagacgaccgtagatctcaccgggatcttccagtccgaaacgggctgctgcgtgatcgcagttgcggaatacataagaagatgtctgataaatgggaacggctctggcaccggtcacaggatcgggctgctcctgtcccacatgtaactgtaatgtctcgaatttcagattacgctctgcatagggctttttgctcatgttctgcctcatttctgcactttgatgtgctatgtattattgcgtaacgatcctggcggaaccgttacaatttttataaaaacatgctaaaacacattgcaaaatctgtcaatgtaaaactttagcgcagcagatatttttgtccactgcgcctctattcctctccagattgcattatattactttacttcaccagccggtccttatacttcagccattttcccgtacgtaccctgttagtgaacaaaaatgcccgtacgacccagtccatggtcatagcgatccagacgccgatgacgccaagtcccagaccctgtcccaggatatatgccatgcccacacggcagagccacatggaagcgatcgccacgatcatggtaaatctcacatctcccgcagcgcgaagtgcattggactgtgcaaaggacaacggatgcaccagcatacaacatacacagctgtaacataacagaaaaacagttattttcattgtctccggactcagatgatagattccgcagatcggccttgcaaaaataatcatgggaattcccaacaggatcatgcaggcatatgccgccttcatcatttttttcagataatataatgcctgctctgtctctcctgcaccgatgcactgtccgatcacagtgatcattgctacaccgatggcgttggcagggatctgctgaaagctggcaatactgcctgttacggcatttgccgtcgtagcagccattccaaaaccggcgatcagactggtggtcagaagcttaccgatctggaagatactgttttccagtccgttgggaacaccgatatacagaatctttcccaagattttcgtatcgaccctccagtgattgctcactatgatcttgtcactttttccaagcagcactatgatcatcacagccgacaatattctggaaaacagcgtggacaacgcagcaccggcagcaccgatccctgcaccatagatcaggatcgcatttccggcaatatttaccagatttgccaccaatgacactttcatggacaccttggaatctcccaccgcacggaacagagccgcaccaccgttataaattcccagaaaagg
